United States Patent Application Publication US 2026/0092266 A1 - sequence listing, part 17

SEQ ID NO: 2770 - DNA, 9633 bp, synthetic construct
  misc_feature 1..9633: note = Synthetic
  source 1..9633: mol_type = other DNA
caaaaatattgttttaatttgcattgcgtggtattattgtctaataaagtacaagtgtaaaatggctttatggttttaagatggttgaaggagttgttgaattcagaagggaggaagatatatgcgtctgcttaaagtcatttttagaaacgaagctatttttaaggagggcgtggttgttgattttaccaatgggaattctgttcgaaaatctcctaatgaaccagatactcttctaaaggcatttaaactgaaaactggtatctattcccaggtccttatgggctttacgggactgaatggcacagggaaaacaacggtgttggaaatgctttctgttgtagcccaagttttgtttagacatgaaagcctcaatatgcctgcaatccaaagtaaattggtgaaagttgtttccagtcatgtaccttttgaatgggaagtgttctttctgcataggggtcgtatgtatcggctgaaatccgagattattgaacaaataacggcagaagaacctaatagggaattaaaatttgtgtataaggaagagattctgcaggaaaagagcttttcttcggttactcgtaaaactttgtttgattttgcaaagagtcaatcttccctccgctctcagatattgatggattcaccttaccttcaagatgatgacagtattgcctcaagaataaaggatataaaggagaacattcatcctctgggtcttgagacgaatattaacgttgctgcattcagaggagcacctcctgaattttttctaaatgtttttgatcccaatatcaagaaattgaacattacaaaaggggaagatggtaaagtaaaatcggaactgctttttaaaaaccaggaaagaaaagtttatggcggagatccttctggcttgctgttttttctttcagcaggaactatcaaaggcttgtctcttggccctgtgatcttgggtgcgctaaaaagcggcggatatgtttttattgatgagatagaaaaccatttcaataaaaagattgtggaatggtttatggaattgttttcagatactcggaccaatccttatggagcctgtctggttttttctactcattaccctgagcttttggatactatggatcgaatggataatatttatattaccaggagagataaagagaatttctgcagctgtgttcgctatagtgatatgatcaagagaaatgagctgtcaaagagcagagtgattcttgaaaatgccattggtggcacagcgccccgtttccaggatttgcaggctgccaaaaacgtaattgctgattttgtaagaaagggggaatagcattgtcagctttggatcagtactcatatttatttttcgtatgcgaaggaaaaaatgaagaagcgattgtaaaatggctggctgaagcggacgcaatcgatttccccaaaaagcagtattcccttgatttctgcagagcacgaacgaaaagtacccgacctaaaatactacgagcagcgacccaatttgattatggtgggccggttgccataattatgtttgtgattctcatggagagaaatggtcagtggggaaagattgcatggggaatgaaattccggtaataaagatagtaacaagtccggaaatcgagattcttctggtgcataaggctcattgtattgagaaatggaaaagtgcccgggcaaaaaatccaaaactccatgtatcagctttttgcaggcagatgttcaagatggatgtaaaaatggcgaaaactttgtacaacagttttcgtcagttaaagatttcaaaaaaatctgtctagaatataaaagtgcctccgacagccgaaaattcaagaacgagttgacatggtatgatttgttgaagtaaaaaataatgcggaacatttctattgagaaaataaaagaatttgcgcatcggcaaggaattggaattgtagttggcaggctgcagcatgacggaatgatttctttccggacttataatcagtataagagcaaatagggagcttgatcgattaagcgggccattgggggagaaggatggcgcctagcggtttgcggctctggggcggtatgtgattaccccggaagtgttcgatatcctggaagaaacccggcctggcaaaggaggggaaatccagctaacggatgctgcgggtcatggccatatggggcatgtgtatgcgtacaatttccaggggaaaaggtatgataccggggataaattggggtatttgaagtctgtggtggaatttgctttgagaagggatgacctggggccggggttccgggagtatctgcgggaacttgttaatgttcagctgtgaccacccacgaaacagggattccaaggggaaaagaacgtggttaagggattaggtggctaagtggttatggaaccaggctctttcttagagtcggtttaaaaacgccaaccctagtcggatcaaaacagccaatggccgggaagggcgtgcctgcggcgcacctctacagcgttgaggtcggatggcgtttcttcaatcgagtggacgaggttgccggtgaaccggagaccctcattgttatcctcagttcgacggagacggcgtaggggcttcccgggggagcccgtcccggcctccgtttttttgtattcaaaggcagatgtgggagcatctggtattattcttctactcttgcatattctgaaaaaatatggtaaagtaaaattaaccttagaggtaaatgagatgacgtgttggatgtccggtataagaacaagaaattgcagaagatatgcacagatgcagagacagcgcgggcttcttatggcaacgagatggcgcgtaagcttcatttaagaatagatcaattggaggctgcagattccattcaagaattaatattgaatcatattggtcggtgccatgggctgagcggaaatcgtcaaggacagtatgccatggatttagcacagccatatcggttgattttcaaggaagtggaatcaggaatccagattgttatggttatggaaattgtggattaccattgaagagaaggtgatcattgtgttggaggaaagcagacattacattgcaacgccgccaggagctacaataaaggaacagattgtagatcgggggatgactcaaaaagagtttgctatccgtatgggaatgtcggaaaaacatatcagcaagctaatcaatggcgatgtgcatttaacgccggatgtggctgaacggttagaattggtcctgggaatccctgcttctttttggaataaactggaagctatttatcaggagaaactggtaaaggtcagaagagacacagagctggagcaggaagaaagtgttgcaaagagatatccttataaggatatctgcagatgctggggcatgaaccttcccgtaaaaaagggcaggaagtcattgacctttgccgcttctttgaagtaagtcgtttacaggttttagagaaccaggctctaacacctattgcctgccgaaaaatgggtgatacggagaaaagccattatattcttttatctttggctcagctggccaaacgacaagctcgggacatggacgtggctgcgtttagcaaagaaaaaatgaaaaaggttataacagaaattcgcagactcacagccaagataagtctggattttaaagaacaacttattcatgtgtttaaaggctgtggtgtggcattggtttttttgccagaagtaagaggctccttccttcatggaattacctttgagggagaaaaccataagtcgtcctggggattggtttgcggggcaaagatgcagatcgtttctggttcagtctctttcatgaaattgcccatattttgttgggccatatttatcaggaaaaaggcatttctgaagaggatgaagccagtgccaatgccatggccgctgatttactgattccgagggagtcaattagaaagttttataacgagagattattttccattgaaaaaataaagaaatttgctgatgaacagggaattggagcaggaatcgtaattggcaggttgcagcatgacggaatgataccttttcacatgtataatcagtataagagtaaatacggagtttaattggataggagagtgcggcccacatgggccacactctgcagggcgttgaccaggcggagaatatcgttgttagcattagttcgacggagacgggtcgtaggggcttcccggaggggagtccgtcccggcctctgtattgttatttatggcgatgcctttattatagaaatatcaagataactgtcttacctcaaaatcgcgattttgaggtaaaactattttctgacctcaaattttgcggattttgcggtgtgggattaacggatgggcgggctgcccggcgtgcagcccctacggcattggaactggatgctggatacaacgattttcgaggattttgcggtttgagattaacggatgagcgggcttgtcagtttgtccagaaacgggcgcatcgggcgacacggctttgccggtcttgattctccttacggcattggagccggatgatggatacaacgattttgaggaactatttttaaactgggagtttttttacatagctggtgtggtatagttgagggagaagattcaatgaagaagaataggccttcgggtgaagaaaaagccgaaatatgatacaataatcgtaatattctttactttttgtggtaagtgcgctataatatcatcggttgtaccaaaccaatgatcagtgggttactatgataaggtaacacaccgaggagttctaacgcttgccatttggcaaggcgttatctctttatagggagaaaatatggaggaaggcgggaaggttatgaaatatggcattggactggacattggtatcggatctgtggggtgggccgtactggctctggatcatgaagaaaatccctggggcatcattgatttgggcagccggatctttgatgtggcagaacagcctaaaacaggggcttcactagctcttcccagaagagaggccagaagtatgcgtcgccgtctgcgtcggcgcagacatcgtttggaacggatacggaatctttttattaacggtggactgttgacggaagaacaactggagcatctgtatgacggaaatctgaaagatgtatatggccttcgtgtcaaagcactggacgcccggctgacagatgaagagttggcacggtcctgctgcatccggcccatcggaggggatttaaaagcaatcggaaagcagaatcatctaagtacagaggcaggagaattgaagaaagccatcagtctgaatcaaaagactatggaagaaaaccaatatcggacgataggggaaatgttctttaaagattctcgctatgcagaatacaagcggaaccggggcggaaattatcttaatacggtggaccggagcatggtggaagcggaagcctgtaaaatactggaaacccaggaaaagcttggaaacagcaaactgacaaaggcattccaggatacttatctttccatcctgctgagccagagacagtttgatgaagggcctgggggaaagagccattacgggggaaatcagatcctgaacaaggtggggaactgtacttttgaggatggatcccatggagaacctgccgaaaagagagcgtccaaagtttgttattcttttgaatactttaatctcctgcagaaagtgaaccatttgcggctaacctctgcaaaagataatcgaggattggacaaaggagaacgggaaaaggtcattgcgctggcaaaagacaaagcggatctgcgttttgaaaaaatccgggaaaccctgcagatttctccggaatatcgatttcagggcgtttcttacagcaccaaagaatctcgtgaggatatcgagaaaaagaataagtttaatttcctgccattctatcatcagatgcggaaaatcttaaaatcaaaggcaaaaatcgatatcagagaatattctttggacaagttggacaaaataggtcaaatccttgccttctataagggggacgataccagacggaaagaactggcgggactggaaattgctccgaaagccgtagaagccctgttggaactgaatggggccagtaagttctcccatttgtcattgaaagccattcggaagattactccttttctggagcagggcatgacctatgataaggcatgcgaggcagctggatatgattttcgggctcatcaggaggacaagtcctttttacttccagccaatgcatcggaactggaagatattaccaatccagtggtacgacgtgccatcggccagactatcaaagtagtcaatgccattatccggaagcagggttccagtcccttgtatgttaatgtggagctagctcgggaaatggccaaagattttcaggaacggaagaaaatcaaagatgataatgaagccaatcaaagccaaaatgacaagttgatgcaggaaattaaagagaattatcaaagattgaatccctcaggcatggatcttatgaaatggaaattatggaaggaacaggatggtaagagtccctattctcaaaaatccatagcgacagagcggctgtttgaaaccgggtatgtggatatcgatcatatagttccctacagcatcagctttgatgacagtttaaaaacaaagtattggtgttttcctgggaaaaccgggataagggaaatcatttgccctatcaatatcttctgcagaagtatggacaggatgcagtagatcggttcaaggtatggttggcaacaatgtccgggattatcggaaacggcagagacttttgaaagaaaaaatgacggaagaagaaatatccgggtttaaagaacggaatctgaatgataccaaatacatttcccggttcatgtataatttcatccgggatcatctggaattcgctccttctgaaacagggaaaaagaaacgggtattggccgttaatgggatgattacttcctatctgcggaaacgctggggtatccgtaaaagtcgggccaatggggacaaacaccatgctgtggatgctgtagtcattgcctgtactacggataagatgatccgtgacttgactctgtattcggaagaacgggaaagtaagtatgatgtggatgagagaggaagccgcctggtaaatgagtcaaccggagaaatcctgaaagaatttccgttcccttgggacggattccgacaggaacgtggaagcccgttgttctgacacccgggccggggattgctggtttgaccttttatatgaataaagatttaaatgacatcaaaccgatttttgtttcccggatgccgcggagaaaggtgactggagctgcgcataaagatactgtccgcagtgccagacatattgcagacggaattacggtttcaaaagtttcgctggccagtttgaaaatgggaaaggatggagaaattgccgattattataacccagacagtgaccgattgttgtatgaggcattgaaaaaacggttaaaagattttgacggagacggaaagaaagcttttaatgaaccattttataagcctaaagcagatggatctcagggacctctggttaaaaaagtgaaaatccaggcaaaatcgacgttggcggtgcctgtggaagaaaaaacaggcgttgcagacaatgacagcatggtccgtgtggatgtattcaaagttgagggggaaggatattatctggttccggtttatgtagcggatacggtaaaaaaggaattgctgaatagggcaattgttgcctataaaccttatgaagagtggaaattaatggatgataaaaattttcttttttccttgtatcccaatgatttgattgaagttgaaagtaaacgaagatatcaaatttgccttaaacttaaggaagcaaaaaaagaagagtaactttagaacagagctttttgacaagaaaagttctatcttactatcagggaaccaatatcagtactgcagcaattcatttaatcaaccacgataaaacgtatgaacaaacaagtttaggagtaaaaactttaaaatcgataaaaaaagttccaagtagatgtgttgggagagattcatcctattaaaaaagaggctcgtcaaaaatttaccattcaacagaagaatcgatgaaggataaggcaggtcttaatcaatgggatatcgctatatcgtaattgcttctgctgctactttatcctgcagggaaaatcagctgattatccttaatgaaaagaacaataaggtccccctggaagatatcagtgccattgttttggaaaaccagcagagcaggatcagcttggcagctttggaccagttggtatccaacaatgtaacagtctatctgtgtgacaagcagcatgtgcccagtgcagttgtgatacccttttatcagaactccaccaatgctgtggtgattgagaaacaggagcaactatctgttccccagacaaaacagatctggaagcagattgttgtgtccaaaatccagaatcaggccgctgcctgaaggaaagaggggatgaggaaggcaaccattatctgacggaactggcaaaaaccgtggccagtggagatatccacaatgtggaggctattgcagcacggtactatttccgccgggcttttggagaaaaatttaccagaacgggggatgatggaagaaacagtggattgaattacgggtatgccattatgcgggggctgattgccagactgctcacaggatatggatttctggtaatcaagggaatccatcacagcaacaagtacaacagctttaatctggcagacgatttcatggagccgctgcggccggttgttgatttgtatgtattgaaccatatgtcgggagatgatagtctgactccggaactgaaacacgccctggtgaatctgctgggggtagacgtgttgtcaggggggcaaattcacagcttgaattatggcgcggaacggatgatccagagctttatgcggatctgccagcaggaaggaaaagaactgatgattcctgaactggttcagctgagacagcatcaatatgaataaatttatgcgtatacttgttctttttgatattccggtgaaaacaaaatatcaacggcatgtggcttcgagatttcgtcatttcttgttgaaagacggatattatatgctgcagtattctgtctatgctcggatctgcaacggcccggatgccgtggaaaagcatcggcagcgcctgatgggagcgctgccggataatgggtccgtcaggatggttgtcctgacggaaaaacagtatgaagcgattgatgtgttggtggggagatacctgcctgaagaaaaggcctatgatgcaaagcacgtttccgttttttgaaaacaaccgaataaggcttcaaaaaattccttattaaagaattttttggaaaaagtgaaaagcccttgtgccggatgacacaaggcttttgctgatcaaattgtaccaaaccaatgaccagcagggaactacaacgtcccgcactaaaaaataacgggtatcaacattgtaccaaaccaatgaccagcagggaactacaaccgcaaaccta

SEQ ID NO: 2771 - DNA, 9050 bp, synthetic construct
  misc_feature 1..9050: note = Synthetic
  source 1..9050: mol_type = other DNA
tgacgtagcttttgcagccgatatactaaatgcacaaagcccgaacgaaaaagttacgcaacattcccaatttacaaaaaagtgcagccgtgatataatacagttgttcttataccataccaagaacaattaggttactacaacaaggtagaaaaccgaaaagctctgacggttcacttttttggtgggccgtcatctttttcatgaggaggatacatatgaaatacggaatcggtttggattgcggcatcgcctcggtcggctacgcagtcatgcagttggacgaaaacgacgacccctgtcggattattcggctcggaagccgtgttttcaacaaggcggaaaatccacaagacggcgcctcgcttgcagcccctcgccgggaagcgcgcggtatgcgccggcgcattcgccgtcatcagcacaggctcgagcgcattcgctatttgttggtttcgtccggcgtgttgtcaaagacggagctggacaatctgttttgcgggcagctcagcgatatttatatgctgcgcgccaaagcgttggacgagccgctgaccgccgcggagttttcgcgcgtgctcattcatttggcgcagcgccgcgggtttcgttcgaaccgcaaaaccgacgcacaagataaagaagccggcaaaattttgagcgcggtttcggaaaatacaagcgaaatggaacgcggcggctatcgaaccgtcggtgaaatgttttatatggatgagaaattccggcaatacaaacgcaacaaaggcgatgattatgccgccacggtggcgcggagcatggttgaagacgaaatgcacaaaatttttgaagcgcaaaggcgcttcggcatgtcgtttgcaagtaaagctttagaaacgcaatacacggaaattgcgctttcccaacggccgtttgatttaggtccgggcgcagggcctaaaaacgcgccgagccgctatgccggcgaccaaatcggccgcatgatcggcccttgcacccttttgccggaagaaaagcgcgcgccgaaagcgtcctattctttccaggtgtttaccctttggcaaaatatcaaccatttgcgtatcgccgcgcccggcaaagaagcacacgggcttacggatgaacaacgatgggcggtttttgagctttgccaccaaaagaaagatgtgaaatacaccgcgcttcgcaaacttctggcgcttcgcgacgatgaatttttctcgattctttcttacggcgcgaaagaggccgtcgaagtcgaaaaagcggcgtttaactttttaaagccttatcatcaaatcaaaaccgctttaaacaagttgggaaaagattatatccgcaatctttccgccgacgaactcgacgacatcggctatattctcacggtgcaaaaaacagacgattcgattcgcccggcgcttgaagaaaaaggttttgcgcccgaagtcattgacgcactgctttcctgcgggtcattttcaaaattcggtcacatttcggtgaaagcgtgtcaaatgctgatcccgtatcttgaaaaaggcatgacctatgacaaagcctgcgacgcggcgggtctggattttcgcgcgcacagcaaaacggaaaaaagcctgtatctttcggcaaacagcgactatctttgtgatattgtgaacccggtcgtgcgccgggcagtctcgcaaacaattaaagtcgtcaacgcgattatccgcgaacagggatgtagcccgacctatttaaacattgaacttgcgcgggagctttccaaaacctttgacgagcgcaaaaaagccgaaaaaagcatgaaagacaacgccgcgctgaacagccgcgttgtggaacgcctgcaaaccgaattcggaattgtcagcccgacggggctggatattgtcaaattcaagctgtggcaggagcaggacggcatttgcccgtattcgcaaaaaccgattttgctcgaaaagctgtttgccccgggctatgtggacgtggaccacattattccttacagcatttgttttgatgacagttacaacaacaaagtgctgacattcagcaaggaaaaccggcagaaagggaacaaaatcccgatgcagtatctgacaggcaaagcacgggacgattttgaaatttgggttgcaaacaccattcacaaccgcgtcaaacgccagcggcttttgaaaacggagctgaaacccgaagacaccgaaggctttaaaacgcgcaatttgaacgacacaaaatatttaagccgcgttttatataactttatcaacgacacccttttgtttgcggattttgcaagcgacagaaaaaaacacgtccgcgccgtcaacggcaaggtcacttcttatatgcgcaaacgctgggggattgcgaaaatccgcgcggacggcgatttgcaccacgcggtggacgccgccgtgattgcctgtgtcaccgagcgcatgattcagaaagtctcgacctattccaaatatcacgaaatctattatgtgtcagacgacgagaaatcgtttgcggtggattttaacggcgaagtgattgacgagttcccccagccgtatccgtatttccgcaaagaacttgacgcgcgcaccatggccgacgccaagcgcgcggtgaaagactgccgcttcccccactattccgccgcgcaggaggacgccgtgcaaagctgtttcgtgtcgcgcatgccgatgcgcaaggtgactggacaagcacacgatagtaccattcgctccgggcgtgaaccgggctttgtgatttccaaagttccgcttgcaaaactaaagctcggcaaagacggtgaaattgaaaactattataaccccaaaagcgacaccctgctttataacgcactgaaagcgcggctcgcagaattcggcggcagcggcgaaaaagcgttcccgccggacaagccgttttacaaaccgactgcttccggcgaagcggggcctttagtcaaaaaagtgaaaattatagaaaaatcaactttcagccctcccatacgcgggaagtgcggtacaacgaagaaacaagctgtggtgcgcatcgatgttttcaaacccgaaaacgacggctattatttcgtgccgatttatgtttccgacaccgtaaaacccgaactgcccaacaaagcgtgtgttgcttttaaaaatgcctccgagtggaaagaaatgcaggaagcggattttctcttttcggtttatccgaacgatttgctgcgtataaaggcgaaaaaagatataaaattcaccgtttccaataaagacagttccctgcccaaagaaattttgcgcaatgacgtgttggtgtattacaacagcgccaacattcatacagcctctattttagttttactgcatgataattcatatcgtttagaaggtctcggtattaagaccctattatctcttgaaaaatacaccgtagacccgctgggcaattgcagcaaagtcggcaaagaaccgcgtcagcggtttcggtaaaggaggcgaaaaatgccttaccgcaatatttttgtcgccaacggctcggtgcgattgttggtgattaccgagcggcaatatgcatccattcaaattctgttgggcgaacgccgccaagcggacacccccgtcgcttacgaacaactgaccttactgtaacaaaaaaagaaccgtaaacagcccgcttttaagcttgttttcggttttttttcggcgaaaaacgccgaagctctccgattcttcatgctttttgtgtccccatattataccataccaagaaaaattagggaactacaatagttttttacaacactactttcctttgtaaattataccataccaagaaaaattagggaactacaatttaaagcagtctattgttaatcaatttaattataccataccaagaaaaattagggaactacaatagcataaccgccggataacttgacgttaagattataccataccaagaaaaattagggaactacaatctcggtgaccgtataagcggcttttttactattataccataccaagaaaaattagggaactacaataagttactcaacggtgtttgggtttcaaaaattataccataccaagaaaaattagggaactacaatgcaagtttataaaactccctcgaaacttcaattataccataccaagaaaaattagggaactacaatcttctttgagcgcttctttttttgccttttattataccataccaagaaaaattagggaactacaatgtatacttcgtccacaaaatcggggtaatcattataccataccaagaaaaattagggaactacaatacttgatacattggcaacaactcccgcataattataccataccaagaaaaattagggaactacaatccctcaccctccgaaattgtctgccctgctattataccataccaagaaaaatcagccccatcaccgaaagtcgccgcgccgatatttggtgcgcagaaatccattttccatgtgttttgagtataccatatttttcttttctttgcaaagaaaccagccccgaccgtttttcggcagggctgtttttctgtattgcgattcgatttcaaacaagttgctgaattaaattctgcttccccgccttacgaaattccatacatttccatccaatcgttgacctgtaaaaaataggcgagcatttgcgggccggccatcagctggccgaaccaaggcttgccgtaatctttcggctgggcgagaaaccgctcggcctttttgttgtccaaaaagcggtgaatgggcgcttgtttgttttggagcatttgctcaaagcgttcggaaagcagcgcttcatataccggcgaataggttttcgggtaagggcttttcttgcggtataaaagttccggcggcaaaaggtctttgcaggcgtcgcgcagcagcttcttttccatgccgtcctgatatttcatttcccacggcacgttgtaaacatattccacaatccggtggtccgcaaacggcacgcgggcttccaacccccacgccatgctggtgcggtccatgcggtctaacagcgtctgcatgaaccatcgcagattgagaaagctcatttgccgccggcgcaaaaccgctcccgcttcccccggcagcgccggaacgcgtgccaaagaatcgcggtactgcgcttgcgcataactttctaaatccagttcccgaattgcctcgtccgaaagcagaacggttcgcgccgacatgtcggacgaccacgggaagccgtcggcgtgcaggagttcctcgcggtaaaaccaggggtagccgccgaaaatttcgtccgcgcactcgccggttaaggcgactttgttatgttgtttgacaagcccgcaaaaataaagcagcgacgcgtccacgtcggtcatgcccggtaaatctttcatgcggaccgcgtctttgagcatatcggctaacgtcgtctcgtcacattcaagataggtgtggttaagcggataaatcgcgagcaccttatcgacataagggcggtcgcgggtcggctgaaaggcgttcgactgaaaacaggtgtcgttgtgggtaaagtcaaacgaaaaggtgttgagcgtcacgccctgtttcgccaattcccgcgcggcaatggcggtgaccacgctcgaatccacgccgccggacaaaaaactgcacaccggcacgtcggacacaagctgccgtttcaccgcgtcgcgcaacagccacgacactttttccaccgtttcttcgcagctgtccgtatggggctttgcctcgagcgtccaatagggtgcttcttgcacacgctcccttgaaaattccagaatacagccgggctttacctcacgaagtccgcaaaatacgccgcagcccggggttcgcgccggtcccaaaccgaaaatctcgcggaagctgtctaaatctgctttcggttgaatttgcgggtgcgcaaacagtgccttcggctcggacccgaatacaagcgcgtccccttttatggcataaaacaggggcttaacccccattcggtcgcggcagaggaacaaggcgtcgcggctttcgtcccagatagcgaaagcaaaaataccgttaagctttttcgccacctccatgccgtattccatatagccgcagagaattacctcggtgtcacaggtggtttcaaagcgacagccgcgccgaagcaaatccgctttcagctcttcggcgttataaatttccccgttatagacaatgccgaatgtctttccgtcgcgtttgcgcagcatcggctgtgtgccgccgaccaaatcccgaatcgaaagccgtgtatgggcaaggcctatacggcgattaagatattccccggtctggtcgtgcccgcggtgcgcaatcgcagtccgcatatcgactaatacctgtttccacttttccgcatctttcagaaagtctgcgttgaaatcacaaaatccggcaattccacacataaaaacaccccacagataaaatgaagaagcgcttttcttccttagaaaagaggcttctttttctgtatcagtatattcaagcttaaaaaaaggtattcacagaggggtaaaaacaaaaaatccgaacttttcccaagtaagagaaagttcggattttatttgtatggagctactgggcggactcgaaccgccgacctgctgattacgaatcagctgctctaccaactgagccacagtagcatataaatttaatcggctgaaacctgttttcgccgcggcgggttacagccctattattatatatgagaagccggcgaaaagcaagaggaattttcatttttcttgcaggttcttttcaacggctgttctttgcgccggttttgccgtctgtcacaagcgcacttctaaaaaagcagacaaaaagagtagatttcgcgtctttctttataaatgggttttccgaaagaaatttcggcttgccacaacacacaaaaagccttatactgtaaacatcttatttaagcgggggaaacttatgcgcacacgcgacaaaaatgcgctttttcaaaatctttcctatatgcttcgaaactggtaccgctggcaccggcgcagttttctgtatcttgcggcgcgcattccggcgctgattgccgtgccgatgctcgcggcgttcgtgccgaaagctatgatggactgcatgaccaaccacgccccgatttcggaacttgtgtggaaagtggcgctgttaagcctcggcattgctctcgcttcgtgggtcgcgccgttcatgcagcaaaaaatgattggcgcggcgcagattttacggatgcgctacgcggtgatgtcgttccgcaaaaccatgtcggcggattatgtcgacctcgaaagccttgcggggcgcgaacgcctggagcgcagcaagacctttatcaacggcaattacagcggcgccgaacagttttgcgacgtcatttgtcagcttgcgcaaagcgtattcggtattctttcttcggtcgccctgctttacaaactgcccgctttgatgcttttgctcattctcgccacttgcgcgtgtgagtttgggcttcatcggctcgaataccgcgccgaccgaaaatcccgcgaggaccgcaacagcgtttatttaaaactggattatttcttccgcacaagccacgagttcggcgccggaaaagacattcgcctttatgggcttggcgactggtttattaaaatcaccgccgattttctcaaggcttacaccaaaatcatcgggcggtttttgcgcgtcacctattccgtttcggcggggcgcgcgctcatttccgccgtgcgcgacggcgtggcgtatcttttcttgattcgcgccgtgctttccgacagcatttccgtttcggatttcattttctattacggcattgtcaccggcttttcgggttatgttgcgcttttgaccacggagtacaatcagctgattcgctgttcgttggaatgcgggaaattccgcgaatatgtcgaacgccccgaagcgcgtgacgaagaaaagcctgcgcttcccaaaaatgacgggtacagcgtggaatttcgcgacgtgcattttcgctaccgcgacagcgaacaggagacgattaaagggatgtcgtttcaggtgcgcgccggggaaaatatcgccattgtcggtgaaaacggcgcgggcaaaaccaccgcgattaagctgctttgcgggctttacggtgtcaccgacggcgaaatccgcgtcaacgggaaaaacatcaacgatttttcgctcgacagttattttgacctcttttccgtcgtgtttcaggattatcactttctgcccgtaagcgtggcgaaaaacgtcgcgctttgcgaagacgacaaaatcgaccgcgagcggctttacgactgtcttagaaaagccggcatcgccgaaaaaatcgagtcgctcccccaaaaggaaaacacgctgatgaacaaaaccgtctataaaacggcggtggatttttccggcggggaaaaacaaaagcttttgcttgcccgcgcgctttacaaagacgcgccgattttgattttggacgagccgaccgcggcgctcgacccgattgccgaaaacgagctctatttaaaatacaacagtctgtctcaaaacaagacctcgtttttcatttcgcaccgcctttcctccacgcggttttgtgacaaaatcctgtttttgtcggacggccggattgcggaggcgggcacgcacgacgagctgatggcgctcggcgggaaatattaccgtatgtatcagctgcaaagctattactacaaagaggaggccaagcttgtatgatgcgcacaattcgttattactgcaaggcctttcgcaaaatcgccgcctttgagccaatgctcattcctttgacgctggtgctcgcggtggcgaccggcgcaaagccgtttgtcaacatttatttttccgcccgcgtggtttcggaactttcgggcgcgcgttcagtttcgacgctgacgacgcttgtgcttttgtgcctcgggcttaacttcgcgttacagattttgaccgaatggctgatgcc

SEQ ID NO: 2772 - DNA, 9013 bp, synthetic construct
  source 1..9013: mol_type = other DNA
  misc_feature 1..9013: note = Synthetic
taccgcctctgtcaaggccggtaccctgtccatgatcggcgtcctcagcgatgagcgtctggccagcttccccgatacccccaccatcatggagaccttcggtgaggagtacaacctggttatgaagggctttgtggcgctgtccgcccccgccggcacccccgatgatgtggtcgccgccctgcgcgatctgatgggtaaggctgttgagagcgacgagtacaagacccagatcgagtccctgggtatgcagtacatcaccctgtacggcgatgagctgaacacgttcatcaacgagcagatggctttctataaggatatctgcgccgacatcgatatcaacggctgatttggctgcggtatgcttcatcgcgtaaaataagaagaggtgcctgccgcatatatgtccggtaggcacctccttgttttgcggagagaggatcccctatgttctggaggtcatttgcatgaaaaaatacaactatatcgtatccgtggtgatgctgctgttatccggatatatcttttatgaatccagtggttataccatcggatcttcggcgcagaaaaaccccgcggtgtggccctgcattctggccggtgcgctggcgctgctgtctgtggcgctgatcatcgaaacggcgcttaaaaaagaacccagcgaggaaaagaagaccatcgactggaaaagccccggaatgatccatgtgtacatcatgttggaaattgttgtgggctttgtggtgttgatgaagatcgtcggtatgctgctggcgctgctcattatgatccctgcgatcgaatatctgatgggctgccgcagcaaggtcatgctgatcgcgttgcctgtgggcatggtggcctttgtgtacctgttcttcgtggtagcgatgaagctgaccctgcccgcgcctatctgggcttgagaaaggaggaaaacaatatatggatacttccgcacctgcgagagtctgggcggccacacagtggtccccgatgccggacggatcgaggaagtcctcaacggcggaagcattacagtagatatcttataaagcaacgaaaggatgtaatgaaatatgtctcttgttacgatgcgtgagatcctcccctatgcagaggaaaagaagatcgctattcccgcctttaatattgacacgatggagatcacccaggctattctggagactgtggaggaggagaactgtcccgctatcatcgcagtcggtcaggcagccatcaaggacggcaagctggagagcctggccgccacggtccgcacactggccaaggatatgaagacccctgtggtgctgcacctggatcacgggcagagcgtggagcaggtcgtcaaagccctgtgcgccggttttacctccgtgatgatcgacggatccaagctgtccttcgaggacaacatcgccgttacgcaggaggtcgtccgcatcgccaacgctgccggcgcctctgtggaggcggaactgggcgcgatcctcggctctgaggacaacatttcccacgatgactccaagccgttcctggtccgcgtgcaggatgtgatcgattttacctccgcggtcaaggtggacgcactggccgtgggtatcggcaatgcacatggcctgtataagggccgtcccaatctggatttccagcgcctgcaggaggtccgcgacgtcaccgatgtgccccttgtgctgcacggtggttccggtatccctgacgatatgatccagaccgctattgagatcggaattcgcaagatcaatgttgccacggagatccgcatggcctatgtggaagggttgctcagcggctctgccaatggcgactactacgagatggtcaaggccggtaaagccagcgtcaaggcccgcgccaagtctaagatcgacctgttcctgcgtaaataagttgccttcctccgcggcggcgcttactccttgtgccccgccccctccatacgaaggaccgtcccgttttaagcggacggtccttttccctgtgcggccggcaggctgcgaggcgccgccgcgggatatatttccgccgggagcggcataggatagggcaaaaacagaaaggggcgcacgttttatgagcaaggtcaaaatactcctcctgcggcgctggtacatggtgggcggtgcggcgctgctggccgctgcggccattttttacgcggtgaactacccggcatccgtcagcgctgcggccacgactcggcagctgcccatctactctgtggagcgcagccagaaggtctgtgccatcagcttcgacgccgcgtggggcaacgaggatacccagcatttgatcgacattctggcgaagtataacgtgaagactacttttttcgtggtgggggactgggtggataagtatccggaatcggtgaaagcgctccacgacgcgggccatgaggtcatgagccattctgaccaccacgaccactataacagtctcagtacctcacagatcgtggcggatattcagaccagctgcgacaagatcgaggctgtcaccggcagctgtcccacgctgatccgctgtccctacggcgaatatgatgaccatgtgatctccgccgtccgctcgctgggcatggaacccatccagtgggatgtggactctctggactggaaggactatgatgcggacaccatctatcaaagggtgacgtccagggtgcagccggggagtatcgtgctgttccataatgcggcgcttcacacgccggaggcgctgccgcggatcctggaatacctcatcaacgacggctataccgtgctgcccatcagccagctgatcctgacgggggactacaccatcgaccacacgggacggcagtttgcggcggagacggtgtccgcagaatagacagaaaaatatacagagcacttgcaatttgctgaaattcgtgctatattagtcatagttctttataccataccaagaactatgcaggttactatgataaggtagtacaccgcagagctctaatgccccgcatacgcggggcattatctctatccggcgtttgaggaggacatactatgtatccatacgcgatcggctttgacatcggcatcacatccgtaggttgggctgtcgttgctttggacggagaggacaagccctttggcatcatcaatatgggctctcgcatttttgatgccgccgagcagcccaaaacaggcgcttctctcgccgctccgcggcgggaggccagaagtatgcgccgccgtctgcgccgccaccggcatcgcctggaacgtatccgccacctccttgtggcggaaaatgtcatttctcaagcggagctggatgcgcttttcgaaggaaagctggaggatatttacaccctgcgcgtcaaggcattggataccgcagtgtctcatgcggactttgcccgtatcctcctgcatatcgcgcagcggcggggctttaagtccaaccgcaagtccggcacatcgaaggaggacggtgagctgcttgccgccgtgagtgccaaccgcgcacttatggtcgaaaagggctatcgtaccgtaggtgaaatgctgctgaaagacccgcagtacggcggcagcaagcgaaacaagggcagcaagtacctggcaactgtggggcgggacatggtggaggaagaagtccgcgccatcttcaaggcccagcgtgagcaagggcaggctttcgcgacggcagaactggaggagcagtacctggaaatactcctgagtcagcgttcttttgacgaaggccctggcgagggcagcccttacaggggaagtcaaatcgagaagatgatcggcaaatgcacgctggaggcgggagagccgcgtgccgcaaaggcaagctattccttcgagtacttcacccttctccaaaacatcaaccacctgcggctgatctgcggcggcgagagccgtccgctttccgatgcacagcgggagtttctcatcgcactggctcacaagacaaaagacttgaacttctcccgcatccgcaaagagttagacattcccgcagatacgacctttaatgcggtgtcctataaaagcgcggatgggtacgaagatgccgagaggaaggctaaattctgctatctcaaggcgtaccatcaaatgaaggcggccttcaacaagctatccaaaggtcattttgacagtctcgcccgccagcagaaaaacgaactggggcgcgtcctttccacctataagacttccgccaatatccgcccgcgtctggctgcggctgggctgtcggagatggagatcgacatcgcggagacgatgagcttcagcaaattcggtcacatctccgtaaaggcctgcgacaagctgatccccttcctcgaaaaaggcctgaaatacaacgatgcctgtgcggcagccggatatgatttcaaagggcatgacagcgaaacgcggacacgccttctccaccccacggaggatgatttcgcggatgtgacgagccctgttgtgcggcgtgccatctcacaaacggcgaaggttctcaatgctatcatccgcgaacgcgggaacagccccacctttatcaacatcgagctggcgcgggaaatggcccgcgatttcacggagcgcagcaagatgaaaaaggatatggatgaaaaccgcgcccgtaatgagcggatcatggagcgcatccgaacggaatacggcaaagaacatcccacagggcaggatctagtgaaattcaaactgtgggaagaacagcacggcgagtgcgcctattcccaaaagcacctttccctggagcacctctttgacccggactacgccgaggtggatcatatcatcccctacagcatctcttttgatgatggctataagaacaaagtgcttgtactagcggaggaaaaccgcaacaagggcaaccgcctcccgctgcaatatctacagggcgaacgccgggatgatttcatcgtttgggtggaaaacagcatccacgactaccgaaagaagcagcgactcttgaaggaagcgatcaccgccgaggacgagaaagggttcaaggagcgcaacctgcaggacacgaaaaccatgtcccgcttccttctgaactacatcagcgaccatttggagttttccgacttctccacagggcgcaaaaagcacgtcaccgcagtcaacggcgctatcacatcctatctccgcaagcgctggggcatcgccaaaatacgcgaaaacggcgacctgcatcacgcggtggatgcgcttgtcgtggcctgcacaacagacggcatgatccagcagctgagccgctattctacgctgcgggaatgcgaatacgtacagacagaggccggcagcatcgcggtttccatgcataccggcgaggttttgaagcacttcccctacccctggccggaatttcgccgggagttggaggcccgattgggagatgatccccgccgcgccgtcatttcgcagcgtttccccgtgtacgcaaacggcgacattcctgtacggaagctctttgtgtcccgtatgccccgccgcaaggtgacaggcgcggcacacaaggagaccatcaaaagccccaaggcgctgaacgacggcatagtcgttgtgaagcgcgccctgaccgacctgaagctcgacccaaagaccggggaaatttccaactattatatgccgcagagcgaccgcctgctctacgaggcgctgaaggaggcgttgaaaaaacacggcggtgacgccgccaaggctttcgccgcgcccttccacaagcccaaaagcgacggtacacccggcccggtcgtcaacaaggtcaagctgtgcgaacccacaacgctgaacgtcgccgtcctgaacggtgccggtgtggcggacaacgacagcatggtgcgtatcgatgtgttccatgtggagaacgatggctattactttgtgcccatttacatcgccgacacgctgaaaaaggaactgcccaacaaggcgtgtactcgcggaaagccttatgcggaatggaaagagatggatgccgaggatttcctgttttcactctatcccaatgacttaatacgcgttacatctcaaaagggcttgactctctccaaagcgcagaaggaaagcacactccccgacacctatgagacgaagcaggaaatgctgtactacaccagcgcgagcatcaatactgccgcagttgcctgccgcacccacgacaacagctacgagatcaagagcatgggcatcaagacgttggaaaagctggagaaattcaccgtagatgtgctgggcgagtaccacaaggtcgagaaagagccccgcatggcgttttgcaggaagtgaggtttgcgtatggcttttcggaacatcatcgttgaaaatcccgctgtgatctccctgcgaagggagcagctctcgattttttgaggaaaaaagtcgctcaaggcaaggccttgagcgactttttcggtagcctattataccataccaaggactaccagggaactacaacgcttgatgcggccctcgttgatctcctccgattataccataccaaggactaccagggaactacaacttcgggcacgttcgacttcacccgcattctattataccataccaaggactaccagggaactacaactaatgcttttgtattcacgttcgcagatgcattataccataccaaggactaccagggaactacaacctctcccgctacatcgtggagggcgtgtccatgggcagcgtcaagggctgacaagcctgtttccgacagcaaaacgacacaactcacccggcagggaaacgtcccagcggatcgtaaaagcgaggtctgaccgcacgtccgtggccgggatatgccccgccctacattttgtccagcgcatcctcccgtgacagctccagcagctgggtcagggacattcccagctcctcggcgatacgccgcatggtgctgatgcgggtgcgctgggtgctgccggtgaggatgtgcttcatagtcagcggtgcgatgccgcagcgctgcgccagctctgtgggcgtgatgctgcgtaggatacacgcccggcagacggcgcgggcgtactgttcggtctgcgacatatcgttccctcctaccctttatggcagaagcataccacgtttcgcgccggagggcaagaggcgttagccggcaacgtagccgccgcccacgtcatagcccaggtcgcaggtgtagacccactccaccacatcgccgttttgcagcgcgtagcgggagcagccgtaattgggaaaccagccgttgacacggtacatccagcccgacccctggctcacatcgaactcgtacaggttgttgatgccctccacgtaggcgctgttatacacgggcgtccaactggcctccatgtggatgccgttctcgcggcagacacgctggagcacgtcgtagacgctctcgccctcgctgaagctggccgtggtcgcgcccagtatcacaccgtcggcggggacgaggggctttttcgccgccgccgtctccgcgtcccactcgtcccaggcatcccagttattcaggatcgtattgcaggagatggagatggtgcaggtataggtggtggtctgatccaccgtggtatcctggggctcggacggtgcgggcttgccctccggtacgggatcggtctgatacttgtccttgccggtgtccgggtcgatctcctgcttgggctgctcctcctgcttcttctgttcctcctgtttcttctgctcttcctctaacttcttctgttcttccagctttttggcttcctcctcggactttttgtcgtcctcggtcttgtcttctgcctttacctcagactttttgtcttcttttttgtcgtccgttttggccgcgtcatcctttttggtgtccgcggtctgctcctgctttgtgtcgggggtcgtgtcggcggcaggggctttctgcttgccgcaggcggcgcaggtcagcagcagggacagcgccagcgccagcagccaaattttcttcactttcttcatgcgttttatacctcgtaaaagcgccatacgcagaggcgctttcgcgcctctgcgttggctgtttcgttgttacttgctcacgcgcttctgcttgcgggtcagcaccacgacagctgccgccgccatgactgcgctgcccagccaaatgaccatctggctgtcgtcagccgtgttggcggaggtgggcttgacaacagtgatgctgccgctgccgctgccaccgccagtggagacagtctcataggacacgatggcaaacgtagatgccttgtccgtctggaagctcagcacgcggttgccctccgtgccgcccaggtacgcaggcagctcggtggtggtcacgttaccgctggcatcggtgtggctgcgtaccacgcagaccttgcggttcaacagactgttatacatctcatcagtgatagagatggtcacggtgacgctttggggcagctcgatgagctgggccacggacgttacctgctcgttgacggtcttgaccagctccaccgccacgtccacgaccttctcgatctgcgcgtccttcttgccggagttgtccttacgcatatcggccagcttgtcgatcagcttggtcagctcgttcttgacctcagcgggcgtatccgcagcgttcgctttagcttccagtgcgctcttaccgccgtcggtcttcttctgctcatcggtggcctgaatggtttttttgttgtccaccttgacggtgatagaaccgctctccaccgccgccttgatctccatgagcttctcgtcatccaccgttacctcggccttgatgaccaggccgctgctgtccttgaccagcgtatcattcttgctgtccacctttatgtcatcggtcttgacgttggccgtcgggttcctgacaccgcagacggtgcagacgccgttgacgtaggtgtgcttgccggtggcagggatggtcgcaccggcggtcactacgaagccgcagcgcttgcagtaggtatccgcctcatggccggagg

SEQ ID NO: 2773 - DNA, 8968 bp, synthetic construct
  source 1..8968: mol_type = other DNA
  misc_feature 1..8968: note = Synthetic
catggctttccgttccttacgagccggttcgttacgatttctcctcttttccctgcgtccgctcgacgctcggcgaccgcggtatcgtcatgagttcgctggcggaccccgtctgccgcgcgatggacctgatggaactcggcgacgccaccgtttgggcgctcaccgagccggagcacttcgcgcggacgctcgcggagattcaccgccgcggcatggcgaacctggagcagatgcttgagtgtaaggtggttgacctttacaggatttgcggccccgaatacctcacgccgcccttcctcccgccggtttattttgaaaaatatgttctgccgtaccttgcggacatggttgatttgattcaccgttacggggcgaaggcgaggattcactgccacgggcgcatcggccgcgtgctgggtatgatactcgcctcgggcggggacgccctcgacccctgcgaagcgccgcccgacggcgacatcacgcttgccgatgtcaagaaacgcgtgggggataaaatgtgcctgttcggcaacctgcagatgaaactgctcgaacacgcaggcgccgaagaggtccgaaggaagtcgcgctgtgcatgcgctcggccaaagagggcggccgttacgtcatcatgccgacggccgcgcccatcaacgtcccgctgtcgaaaaaaaccgaggagaactacaaggcctttatcgacgaggcgctgaaactcggcgcctactgaaccggagcagccgccggaccacaggaggggatcaaatgctgcgcaatcaaaaaatcgttttaacgggcgccaacagcggcatcgggctggagttcctgcgtatcgtatccgccgaaaagagcaacaccgtcctggcggcagatatcaggagcgacaacctcaccggcttcggcgcgaacgtcgttcccttcatctgcgacatttcctcgcaagagggcgtcgacgccctctttgaaaaagccgcggaggtcctcggcgatatcacgctgttttacgccaacgccggcttcgcctatttcgaggtcatgcggcggcccgactgggacaggacgcgcaggatattcgaaaccaacgtgttctcgccgctgtattctttccaaaaatacgcggcctttctggccggccggcccggacgcttcgccgtgtcgatttccgccatggggaagatggcgatgcccggctacgcgctgtactcggcgaccaagttcgccctgcacggcttttaccaggcggcgcggctcgaaatgcccgccaatctccggctgacctgcctgtatcccgtggccacgaatacggctttcttcaaaaccgcgaaccccggcaagtacgacaaacccttcccgatgcagagcgcgcgcctcgtcgccgaaaagatggcgaaagggctcgaaaaagggaaaaagtccgtcgtgccctgcaaattgttcaccctgtcgagcgtactgttcgccgtcctgccctttacgcggacgctgtattggaaaagggaaaaagccaaactcgaccgcctgctcgcgtcggaaggtgttacggggaccggggtttgacacgtgatagaaataaggaggcacgataccatgagaaagattgaaagaatatggtccgtctgcatggcggccgttctccttttcggcgtatgcgcgccgtatggcagcgccgccggggcggggcagacgtattacgtcgacgcggcggcgggctcggacctcaacggcgggcgctcgccggccgacgcatgggcgaccctggcaaaggtgggcgaaacggcctttctcccaggcgacgtcgttttgctcaagcgcggcggcgtctataccggcagcgtttcgctcggcggctcgggcacggcggaaaacccgattaccctcggcgcttacggctcgggcgcagcgcccctgctgaccgtcggcagcgaccagaccgtcctgacgctgcttgaccagtcccattggatcatccgcgaccttgaaatcaccgcgccggcgggcaacgccatcctcgtgcgtttccgcaacaaaacggtcgaaaatatcctgattgaaaacgtcgtcatgcacgacgtgaaaaaccgcccctcgccgacctactacagcggcagcaacgccgcgctgcgcatcatgggcagcgcggccgtctacggcgcgcatatcgagaacgtgacggtcagaaactgcgagatttatgacgccggctacggcgtctttaccggcggcaactacccgaaccgccccgccgcgccctataaccgcaacatcgtcgtcgagggctgcagtctgcacgacatatacgacgacgcctttattatggccgataccgacacgattatcctgcgcgattccagcgtcatcaaaacctgccagagcgacggcctctatcccaccgcgcccgtctggatgtggggcgtcaaccgcggcctggtggaacgctgcgagttcgcgggctccaaaaacaagcgcgacggcatgaccgtcgacttcgacgcgcacaccatgaacagcgtctaccagtatgtctattcccacgacaacgtccgcttcatgaccaactgccccgccggggacgattaccggcgcgccaacaccgtgcgctactgcctctcggtcaacgacaacgtcctcgacagcggcggggcgttctaccagtcgccggagacggacctgctgttttacaacaacaccctggtcaactgcggcgacctgcgcttcaaaaactatgaccgggcgacgattatgaacaatattttctatatgaaaaccgcctgctcggtcagtttcagccccgagcgttcctaccgcctggggaacaactgctactacaacacctacaccccgatgttcgacctggcttccctcaaccgaaaccccggctttgcgggcagcgatttcagcgacaaaaacagttttgccctgcggcttgattcgccctgcaaccgggcgggcgccaccctcgggaatatggggaacgtcgacttcttcggcaacccgaccggcagggttcactccgtcggttgctttgacgcggatatcggcgaacccctgccgcccggaccgcctcaaacaagcggctggcctgcgctggcagcgctgctggcgcggctcgtaacccttgtcaggagcctttcggaatgagaaccgtccggcgctttcggctcataccggcgctggcggctttgctgctggcggccgccctgtacggctgctcgggcggcgggcaagccgcgctggcggccggctcggttaacggcgaaacgattgccgccgaggaactcgactatttcaaaacccgcctgagggcggatgtcgtcctgtattttaccgaaaaatatgcggcggacgccaacgcccccggtttctggcagacgccctacggcggcgttacgcccgagcaggaactcgaaaacagggctttcgacgcctgcgtccgcgcgaaagtccagttaatcctcatgcgcgaaaaaggcatctacggcgacgtttcctatcaggggctttatgataaggcggtcgccttcaacaaccgcggcgcctcgggcgcgaacggcccggggcttcaaaccgtccgcctcgacagtttttatacctactatattgataccggcgccatgcagttgaagaacatcctcgccgagcgtgaaatcaagccctctccggccgccgtcgccgcgcgcgcggacgccctggcggcgcaaaaccccggcgcgggccgtaccgaactggaaacgatggccaaagcggcgcttatcgacgaggcgtatgaagaatacgtcaaccgtctggtcgaaagcgcggttgtcgtccggccctgacgccccggcgcgcttttgggcggcggggcgaaaagttctgaaaacatttgacttgcaaaaggcaaatattataaaattgaaaataatttaacagggtaaagggataaagcatccggcgataccgcaaggagggcggcgaatgagagcagccaaagcgcttttcaaaaccgcggcaatcctttgcgcctgctgcatgattgcggccggcaccttcacggttgccaaccgctccgctccgccgaccgaaaggaccgtgacggcgaccgtagcggcgaaaaccgcgcccggcgcggcgcaggcggaaacggcggaaaagatcagcgaaaccaacccggctgccgttgaatatcaaaacgcggcgccggttcaaaacatacaggccgcgaaaccctcttgcgtaccggttgagctgccgaccccggcgaataccttccatgaagccgccgcttccgcgctgcctgcgcccgatagcgtcggcagacttctggagagttacatggcgggcgggcggcttgtcgaagtgtacctcgaggagttggctgacgggaacaaagaattggtcgtgcaaatcaccgagccggacggcggcagccgcgctttcagaaccggcatcgcggtggacgaagacggccaatgccttttcggcctcaacggcaagggtttgctgaacacgggcttcaacttcgattacgggcagagcattttgtattacagcgaagtggttttccagcgcaagtacggctactgcgaactgtacgatatcctcgcgccgctgatttcggcggacttcctgacggtgcgtttcaagtttgaatacgccggcatggactggatgattcaattctggaagggcatctatttctttaacaccaccggcggtgaagtcggcgtttacaataagccgcaaagccggccctgcgaattctacgactgcggcagggatgaggatcaaatgcccatttccgttaccgtgctgcgaaacggcgaagtcattttccgcaaaccgctcgaggtctgctggtggcagacgggcttcgccctgcgcgaaccctgccccaaggaggaactgacgctgcaatccaccctcgtgttcccggccgaagagatgagaacggctttcacctaagccatggacgcggctgccgccgaggacttttcctataccgtcgacggcaacgctgtcagcgttgtctggtagggctatttaggtttgctgcaaaacggcttcatcacatattactgtccgtttaatgtccctttgctgtgatttttgtgtatttttgatatttgcctatttacaatcgtcatatctggtgatatgatgaacccggttcttataccataccaagaactattcggtcgctacaataaggtagtacaccgaggagctctgacggtttgcctttcggcaagccgtcatcttctttatttccccgttttactgtcccattgatcggcctttaccttgttaagccataaataaacacgaatctaatattgatatttgtaatttggcgtcttatgatgataaagaattacaaaaaggaagtgtggttatggcatattcgataggattggattgcggtatttcttcggtcggttacgctgtccttgaactcgattccaaagaagagccgaaacgcatcatacggcttgggtcaaggatatttgataaggcggagaacccgaaggacggttcctcgctcgccaagccccgccgagaagccaggagcgcccgcaggcgtttgaggcggcaccgcttccgtcttgaacgcgttaaaagtctcattgtcgaggcgggtgttctgaccaagcaggagttggaaacgctttttgaagggcgcttgcctgatatttacgctttgcgtgtcgaggcgcttgaccgcgcgctcttgcccgccgaattcgccagggtgctgattcatctcgcccagaggcggggctttaagtccaaccgcaaaacggacgcttccgccaaagaggaaggcgaactgctcggcgctgtgtcgaaaaacgaggctttgatgagggaaaagggttaccgcacggcgggtgaaatgtttgcccgcgacgcgcttttttcggtttgtaaacgcaacaaaggcgagaactacctaaacacggtgtcccgttcgatggttgaggatgaaatcaaactgattttcgacgcgcagcggcgcgcgggcaaccctcacgcgtcacaggcgatgcaggcgcgttacctcgatattgttttatcgcagcgctcgtttgaggatggacccggcggcaacagcccttacggcggcaaccagattgaaaaaatgctcggcgcctgcactttttttcccgatgaaaagcgcgcggtcaaggcaagttattcctttcaatactttacgctgctgcagaacatcaacaacctgcgtattgtctgcgcaggcgaaacaagaaccttgacgtcggatgaaagggaggcggtaaaagccgccgcgttcgcgtctgccgaactgacttacgataaactgcgcaaggcgcttggtcttgctgatgacgagtatttcgtcgccctgcgctacggcaaaggcgacatcgctgaaaccgaaaaggccgccaagttcaattacctgaaggcgtatcatgaaatcagaaaggcgctcaaacgcgaaaaacttgatatcgggctgctgacgaaagagcagttgaatgccgtcggctatgcgtttaccgtttataagaacgatgaaaaaatcggcgaagccctcaagcaggccggtatcggcggtcgggtgctcgaggcgttgatgaaactgccctcgtttgccaaggcggggcatatttcggtcaaagcctgcgaggcgattatcccgtggctcgaacaaggccttaaatacgaccaggcttgcgaagcggcgggcttcgattttaaggcgcatatcgccggcaagaagagatttctgcctgccgacgaaaaggaggcgcccgaactcggcgccatcaccaaccctgtggtgcgcagggctgtgtcgcagaccgtcaaggtcgtcaacgcgattctgcgcgaaatgggcgggccgcccgtgtatatcaatatcgaactttccagggaaatgtccaaaacctttgacgagcgcaggcaggacgagagccgtatgaaagagaatatggctttcaacgagagaatcaagcaggagatcaaggatcatttcggcaaaacgaacccgacgggcatggatatcgtcaaactgaaactgtggaaggagcaggacggccgctgtccgtattcgctcgagagcatcgattacgcccgcctgttcgaggacggatatgtcgatatcgaccatatcatcccttacagcgtcagttttgacgactcttacaaaaacaaggtactcgtcatgtcggcggaaaaccggcaaaaaggcaaccgcctgccgctgcaatacctgcagggcaagcgccgcgacgatttcgttgtttgggtcggcgcgcatatccgcgacgcgagaaaaaggcaaatgctgttgaaagagaaactgacagaagaggacgaggccggcttcaaacagcgtaatttgcaggacacgcagtacctaagccgttttttgctcaactttatctgggaccatcttgacttcgccgtgagcgtgaccggcaaaaaaaagcgtgtcacggctgtcaacggggcggtcaccggctatatgcgcaagcgctggggtattcagaaaatcagggagaacggcgacctgcaccacgccgttgacgcggttgtggtcggctgtgttacggacggcgtcattcggaaagtcagcgaatatgccaagcgcagggaacagtatgccgatgcgggcgggcgcatcgtcgaccggcgcacgggcgaagtaaaggacgtcttcccgcccccgtggccggatttccgcacggaggtcgaaatccgtctgatgaaagaccccgcccgcatgctcaaagaaaagccgctggcgaactatgcgtttgtcaacccggacggcatcagcccttgctttgtttcgcgtatgccgcagcgcaaagcgaccggcgccgcccataaggacaccgtccgcagccccaaggcgctcggcgaagggctgatcgtcagcaaaaaaccgctgacggacctgcggctcgacgcggcgggcgaaatagccggttactatatgcccggcagcgaccctttgctttacggcgcccttcaggcgcggctgaaagaatatggcctctacgcgggtagcggctcggcgaaagatttggaaaaacgcgccgcggcggcctttgccgggccgtttttcaaaccgaaagccgacggcagccccggtcctgtcgtgaaaaaagtgaagatagcggaaaaggcttcgctgaccgtcggcgtccacgggggccgcggcgccgcggttaacgattcgatggtgcgtatcgatattttctatgtcgcgggcgagggttactactatgtgccggtgtatgtcgcggataccgtcaaaccggttttgccaaacaaggcatgcgtgcaggcaaaaccttatgaacagtggaaggtgatgcgggaagaggactttctgttctcgctctaccccaacgacctggttcgcgtgacggcgaaaaagccgttgaaaatgggtctggttcatccggcttccaccattccgaaggagatggcggtcaacggggcgctgctgtactacaccggcgcggggatatccgccgcctcgatcacggtcatcaacgacgaccatacctacgtgatacacagtctcggcgtcaaaacgcttgtgaaactcgaaaagtaccaggtggatgtcctcggaaacgtcagcaaggtcggccgtgaaaagcggctgggattcgcggggtgaggtatgggctatcaaagcgttatcgtcgccaatcccgcccggctcagcgcgaggaataatcgcctttgcatcgacaacggcgaaacggcgggcatccctctcgaggacattcgctgcctgatgctcgagagcgcgcagatttccctgacgtccgcgctgctcgcccgtttggcggagagcggtatcaccgtcttcgtctgcgacggcaaacacctgcccaaagcggtttttcagcccgtcagcagccactcgcggcagttgcggcagttgcgcctgcagatgaatcaaacgctgcccgcc

SEQ ID NO: 2774 - DNA, 8886 bp, synthetic construct
  misc_feature 1..8886: note = Synthetic
  source 1..8886: mol_type = other DNA
cttgccagccgttttaacctgcataacacaggtattaagacagtaatgatttccaagaactccatgccgcaggggcagtatatttgtaaagcaacctacggtgaccaggttaatataggtattagggacgacgtatccgacagatctatttactacggtccctcagaagaccccaatgaccttacacagcttaagaaaatagaaaccaatgccgacaaaacccccggtgtgcttgactatagacaggaaaaatataacctgtcagatccgaaggctccatacattatttatcagaatactcaaacacagcccatcaatgccgaaggggatttgaaatttaaggcccagttcgttgacgactcaaagatcaaggccgcaaatatgtattacagaacatttaatacagacggatttgttaaagtaaagatggccgagatacccgatgaacccacattctatgaatgcaccgttccttataaatttctgcgttataccaatgctattgaatattactttgaaggtacagacggacttcacacagtaatactcaatgacgagtcgggagacccattcaagattaaatttaacgatattaccggtccgcagataacatattataaacccgaaccctattactactatgagaatcagtatatcccctcaatagagatacatttcgaggataattcgggtattgacaaatctagcatcaagctttcacttgatggaagcgatgtaacaggcaaagcatccataaagacaagcgacaggggatttatcctaaaatacgttcccacaacagctctttcggcaggaacacatactcttgaatttattgcaaccgacttgtcgacagctaaaaacaccacagtaagacaaactgagtttattatgggcagcgatgaaattcttaaccactataatggtgagttccactcacataccgaactttcagacggtataggcacaccagatgaggcatatacatgggctcgtgataatgctaaactggatattttcacaatcaccgaccacagccattatcacttgcagaaagggcatgatttactgcttgaaatttccgaaaaatactataaacccggccccggcggttatattcctttagttggatgggaaatgacctggtcaaatgccaccggctggaacggccatatgaatgtaatcaataccaagtggattgaggcaaacctctcactaaccctccctgaattctatgagcttgttattactgaccccgatgccattgcccaatttaaccatgctacatatacatggggtaacttcaatgactatgcatattattctaaagaggcagatgcaagaatagatttgtttgagttcaataaagaaacttatgaagaagaatatgcccgctgcctcagcaagggctggcatgtaagcccctcccataacgaggataaccacagcggcaactggggttctgcaagctcaagatgcggcaaggttatagccggctcacttacaaaagataatgttattgaggcaattaaaaagaacagaacatatgccgtagccgatcccaaaacatatatggaatataagataaacggccagtggatggggtcaatattaaagaatcctaccgaactcaatttcgatattatagttgcacatggtgaaagggcacaaaccggaagactaagaattataacagaagattcaatagtagtatacgacagaacctttacccaggcagatctggttaatcacccaagatataaacatcctgtaattcatattaccgatcttaaacttccggtagaatacgactattactatgtagcattcatcgacagcaataacggtcatacaatttcgactcctgtatgggttgaaagggatgagcccattgagataaccggtatggatatcgggcttaacccctctaagaccacacccaactctgtatatgcaaccattaaaaatgtaacaaatacagagcttaagaatgttaaggttgaattctacagaagtgcaacaacaggtttcactctttccaccaaccttgcagaggttgctcccattgagcccttagaggtcagaacattcgataagttaggcccctatgaatctgttgaagtgggtgcaaactttgcaaccgatgatgaccagagacgaatatatgcaatagcaacggttgaaaaggacggtaaaacctataagagcattagatatgtaatgctgtcagagcttatgattaccgaaattgcctcggcaacaagcgattatctatcacccgaaggatttgtaacaataagacccttctcatttatcgagatatacaacaacagcaacaatcccataaatcttaagggcacacgtcttgcaaaggcagtatctacaggttcggccgcaagcggcaccaatgtttacgctatctctcaagacttcataatcgagccaagaggtacgaaggtgctttggattaaggacggaacatcagcaaattccaacaccaaactaaagattagcgatttcaataccagatacgcaacaaaattcggtcttgcaaatcccgagaagcgggaggcagctcttgagagtaaatatccatatgagaaggtatacgaatttagaagctccagcatagaaacaacaagcacaatacagatagaactgatcagatctaaggttgtaaccgattccagcggaagaatgacaaccaagaatataaccgataccataaccagaatgaactatggtcccgccttaagtcaggacagtaagaccgacctggccaacatctacaaatactcaacaggcggaacacatgaaagcgttaagctttcaaacagcgcaacaccaacccccggcactgtgcttcccgagcaggttccctccactaaagaggactatggcttaaaggaactcaaaattgagactaacgcaggaacagttaaggttaacttaagcgacctttctacaagctaccgcgtcaaactacccgcaggttcaacctgggcaagaataattccggttctcaacgatcctgcacttaaagttcgagtaaatgataagattcaatacagtgcccagggcttaacaaccctgcagcttaagaaggatatcggcgctaccgcaacaatcgaaatcttcgatgtggacggtcaggtaattaaatcaacatactcaatacctctcggcgttggtgaaatagatgtacccgagaacattccagctcccgatacaccaaccggcggatccggcaatcccggaacaactcccggcggaacaaccaacccaggcacaacacctggcaccacaacacctgatacccccacagcaccggcttctcaggctaaattcaacgatactgcaaaccactgggcaaaggaagctgtgaactatatcgccgataagggaataatcaaaggttacgacgatggaagcttcagaccaaacgataacatcaagcgcggcgacttcacacttatgctcatgcgtgcatttgccgaaggcaagaccggaacaggcaaatttaacgacgtaagcgaagacgactattatgccgaggcaattgcaatagctaaagaccttggtatagcaacgggcagtgaaggaaacttcagaccaaaagacaatataacaagagaggatatgttcgttctctttgcaaggacacttaaagcatttggtttgattgatgaaaacatagacacaagtggagtttcatttaacgactttgatgaaatctccgactatgctaaagatgacattttacttcttgccgcactcggatttataaatggttctgatggcaatattaatccaaagggcaccgcaacaagagcagaaaccgctcaaatgctatacaattactttactaagcagacttcctaatctctatatattctcttaaatctctcactcgggttcatgccctgatgagcataagctcattagggcatgttccttttaattgctttattcaaatcgcagttttgtaaatacgagcgtacaaaagatggttttcatgtgtaaaattctaaaaatctctttacaaaattatctaaatatgttattttaatattaagttataccataccaagaaacatacaggttactacaataaggtagtacaccgcaaagctctgacggcctgtcattcgacaggtcgtcatctttttttattgaaatttgagtaattttgtaatatattaggtttataagcaaattatgtaaactcaaggaggagcagttatgggttataaaataggtctggatataggcataacttctgtgggctgggcggttttagaacttaacaacgaggatgagcctaaaagaataattgacttaggcacaagaatattcgacgccgcagaaaatcctaaagatggttcctcattagccaaaccccgcagagacgcaaggggagccagaagaaggcttagaaggcataggcacagaatagaaagaattaagcagctaattaaaaatagcaatttactaacttcttccgagcttgagtccctttatgacaatgttaaaaaagacatttatgaaataagagtaaaagcccttgacagtgaaatcgacagatttgactttgcaaggcttctaattcaccttgcccaaaggcgtgggtttaaatcaaacaaaaagtccgacgccaatgataaagaggccgggtctctactttcggccgttgaagccaataaaaaactcatggccgaaaagggatacagaaccataggcgaaatgctttacaaagatgaaaaatttaaagaccacaagagaaacaagggcgacgattattcccacaccgttgacagaaagtccatggaagatgaaataaaactcatttttaaatcccagaggcaatttggcaatccctttgccacgcaagaatttgagaaaaaatatttagatatttacctgtcacagcgatcctttgacgagggcccggggggcaacagcccatatggcggcagtcagattgaaaaaatgataggaaactgcacatttgaggatggagaaaaaagggcagcaaaagcctgcttctcctttgaatattttacccttttacaaaaggtaaacagcattaggctaaataccccgaaaggtatcattcctcttaataaagagcagagagaccttgttataaatcttgcatttacaacccccgatctgaaatatgccgccatcagaaaaaaacttgacctttcggatgacgaaacctttgtgggcctttccggcaaagatattgaagaaaccgaaaaaaagaccaagcttggctgcatgaaggcatatcatgaaataagaaaggcccttgataaggtgtcaaaaggccgaattaaggccctttcccatgaacagctagatgatataggtcttataatgacaaaatataaaagtgacgaaaacataagaaacggccttcttaacgccggaatagacaaagtagatgttgaggcccttcttttgctgccgggattttctaaattcggccatctgtcccttaaagcctgcagaaagcttataccatttttagaacagggccttacctatgacaaggcctgcgaggcggcgggctatgactttaaggcccattccgataataataaacggcccctgctgccccaatccgcccccgagcttgaggatataaccaacccggttgtaaggcgggcaatttcccagaccatcaaggtcattaatgcaataatcagaaaatacggcagcccttcatttatatctgtcgagcttgcccgtgaaatgtccaaggatttcaccgagcgcaaaaagctggaaaaattaatgaaggaaaatcaggaatataacgaaagaatagccgcttatcttaaagacgagctaaagataataagccccaccgggcaggatattgtaaaatataagctctggaaagagcaggatggtatttgcccctattccttaaccacccttgaaattaacaggctttttgagcccggttactgcgatgtggatcacattattccctatagtatcagttttgacgacagctacaaaaacaaagtccttgttaagtcaaatgaaaacaggcaaaagggcaacagactgccccttgagtatttaagcggcgagcgaaaagaaaaatttattgtctgggttaacaacaatgttaaagatacagaaaaaaagctaagattactaaaagaaaaaatcacagaagaagatattaacaaatttaaagagagaaacttaaacgacacaaaatacatatcaaggtttatgttaaattacataaacgattatctgcagtttgcagactcatccgccggccgtaagaaaagggtaaccgccgttaacggcgccgttacctcctttgtgagaaaaagatggggcatagctaaaataagggaggatggtgatcttcaccacgccgccgacgccgcagttatcgcctgcataaccgacggtatgattcaaaaaatatcccgttattcaaaataccatgaaaattactattatgatcatgacttagataaaaataccggcgagcttttagaaaaattcccaatgccctatcccacattcagaaaagagcttgaaatcaggctttcaaactcaccctctgagtacctaaaagaaataattttgccgaattatgagggaattgacccagatgatataaaacccgttttcgtttcaagaatgccaaagagaaaggccaagggcgccgcccataaagacaccctaaaaagccccaaggctttaagcgagggctatacaatagtaaaacgcccccttaatatgctaaaactcgataaagatggtgaaattgagggctattataacccctcaagcgatttgcttctttataacgccttaaaagaaaggcttaaagagtttaacggcaaagccgacaaggcattcgccggggaattcagaaaacccacaagctccggcaaacccggccctatagttaaaaaggtcaaaattatggaaaaaagcagccttgtggtcgggttaaataaaggcagatgtgtggccgacaatgactctatgataagaatagatgtgttttatgtggaaaacgacggttattactttgttccaatatatgttgcagacacgctaaagccgacattgccaaataaagctgtaatagcttttaaacctgctgatgaatggaaagagatgaatgataaagatttcatattctccttatatccgaatgacttgattaaaataaagactaagtcaaagaaaaaattttctttagttaatcccggaagtacattagataaagaattattaagtaatgagttttttgcatattacatatcagctaatataactattggaacaattagtattattaatcatgacaatacttatcaaataaaaagtttgggtataaaaaccttagagtccatagaaaaatatcaagttgatgttttaggtaattactcaaaggtcaaaagggaaaaaaggcagtatttcagggggtgttgtgattgtcatacagaaatatttttataagcagccccgcaaagctttcaactaaaaataaccagctctgcgtccagacagaggatttatacacaattcccattgaggatattaactcaataatgcttgaaagccggcagataactataaacacttacactctgggaaagcttgccgaaaaacatgttgccctatttgtctgcaacgaaaaacaccttccctgcgcctgtctaacacccctttcctgccatagcaggcagcttaaaataataaggcttcaaaccggccagtctaagccctttttaaaaaggctgtggcagagcattgttaaagccaaaataacaaatcagtccctctgcctgtcaatgacagactctcccaatgcccaaaagctttccgacctaattggccgggttggttctggcgaccccgacaacattgaagggcttgccgccgctgtatattttaaatccctgtttggcccctcctttaacaggaatattgataaccccataaactccgctttaaattacggatatgccatattaaggggtgccatcgcaagaatgctggcggcttacggttttgaaccctctgtcggcatatgccaccacagcgaacttaacccttttaatctggccgatgatttaatcgagccctttagacccatagtagacctttgggtaaaaaccaatgcccttgaaacctttgaattcacctctaaaacaaaacagcagctctataatattttaagttacagcataatatccggtggccaaaggcacagcataaataacgccattgaaaggcttgtaataagccttagcaaaagctatgaggaaaaggaaaacaaacttatactgcccgaattaatggggctggtattgcacgagtatgaataggtttatgagaatgttggtttttttcgatcttcccgttacaactaaaaaagaaagaaaaatagccgtgaatttcagaaaatttctgttaaatgacggctatcatatgattcaatactctgtttacgcaagggtttgcaacggctatgatgcggttgaaaaacataaaaaacgtctggcaagcaatctacccgagaatggttctgtcagactgcttgttattaccgaaaaacagtatcagtccatagaaattttagtgggggaccttacaaccaatgaccttcccattaaatacgaacagcttacaattttttaaaaaatcatattttaatttaaaatcaaaactgttttttttaaaacaaaaaacccggccataggctatatggctgggttttttgctaatagaattataccataccaagaaacatcagggaactacaaccaatatccacgtgcagaaccagatgttataattataacataacaagaaacatcagggaactacaac

SEQ ID NO: 2775 - DNA, 8282 bp, synthetic construct
  source 1..8282: mol_type = other DNA
  misc_feature 1..8282: note = Synthetic
gcgagacagcgcgtatacacgactatagaatccatctggtcaaggatatggacatacgcggagcacatacatatctgtacctgagaaagcgacggtacgtctgcactttctgtgggaaatgttttatgagaaaaacagctttcttctctggttccacagcgtaacgaaccgtcttgtcgcaaagataatctacgacttcaaagacctgtgcttggcaaaggaaatttgcagcaagaataatgtctctactcagacagcactgaggtatttcgaatttgtgaattactcctgcaaggagcttcctgaggtgctgtccatagacgaattcaaaggtaatgcgggcggcgagaagtaccaagctagcctgacagatgtaaaaaacaaaaagatagtggatatacttcccaagcgaaaaagcgatctgattaagtatttcctctcatttgagaacagaaaagacgtaaagtatgtagtgattgacacgaaccgttatttcaaaggggctgcttagatttgctttccgaacgcaaaatagtgatcgaccggtatcgtgtagtctgtcaggccatattggcatttccggtttgtcgtaattacactgtaaggacatacctgcattacgaactggtttgacgacgcctgacttgatgttaaagaggttcagtatcgcgcgtgtcacggatgtccgaacatggccttcgaaagcacatgattccattgtttcttgactatggcaagatgttatttcaaaaagacttaaaaatccaagattctattttgtgtacagcagcggcgtggacgttacgctgcccgagccggtttatatcatttgttgccgtagagcgtgttgaaccctgtgaagtcaaagctcttcaggcagtccatcatcagctgtgtgttcgcgatggcaatgtcgtcgcctatgacgaaggcgtagttgttgtagctggcgtaatagtccgtgctgccggagaatacctcgtgctggagctcgtcatagaagtacatgccgtaggtctgctccgcgccggttatgctgacgtcggcaaatatctctgaggctgttctctcgcggttggagccgtcctcaatggccgtttttatgacgttctcaaccttgtagagctggagcatattgatgaacggacggtcggactctgccagcagcgtgtgcattggtccccagtttttcagcacttcctccgccgtcagatcgtccagcaccggcgaccattcgtagcccttgttgctggcaagcccggtcagcatgcgttccttctggtcaacggacgtgaagtacggaccgaggaatgtgaaataaaacatcacgttgttgcggtcgacattgtcccgcacgactatccacatccacggctccgcgccctcgcgccggtcgcgtatcttgccgctctcgttgtagtacggctccgccgtggcgctgtcgtacacctcgtagctcacgccccagcccttcgggatcgtgacggtgaagatgtcgcaggcgtaaagctccgtctccatggggggctcggtcgccgcgggttcttccaccacgggctcctccgcgggctgcgcgtcgtcaacggtgtcgacgaactccgccgtgggctcaggctcggcagtgctcgtgctgccgcaggcagccgccccgaagagaatgcacagcatcagcgcaagcgcgataagctttttcattgcggttgtcatgtattgtcctccttgcttttaagcatagcagttttgctctggctgtattatacaatatacggacgaaaataccaatactttgttctgtgttttttgagaaaattttctgcaccgccgggcttgccatgggcgcgactgtcagcatcggtcaggccgtgggcgcgggggacaagcgccgcgcggcggaatgcgtcggcaataccgtcacgctttttatggtgcttgccgttgcgctgacggtggtgctgctggtatccgttcgcggcatcgtcgcggctgggtctctcgtttcggtcgtgatctgcctcgcggcttatgcgctgatccgccgccgggagcgcgctatggaaaccgcggggtgaacgcatggatatgtcaaagctctttcgcatcgactacgggctgacaaatgaccccgccaaattcgtcacggaaatatccatcccggttgaggtgagcaagaaaaactgtaaaaatgtcaaaatattggttgacaaaagtggaaatacattgtattatatagacagttctttataccataccaagaactattcaggttgctatgataaggtagtaaaccgaagagctctaatgccccgtctcgcacggggcattatctctatcagataaaacccaaattttgttgatgaataatgtgaggataaaggcgcgggagggaatgcatatgcaccaatacgcaataggcttagacattggaatcacatctgtcggatgggctgcgctggctttagatgcggacgaaaacccctgcggcatactcgattttggttcgcgcattttcaccggggcggagcacccaaagactggggcgtcgctcgcggcaccgagaagagaggcgcgcggtgcgcggcgcagactgagacgacacagacaccgcaacgaacgtatacgcaatctgatcgtatcgagcgggcttatttcgcaggaacagctcgatgctctgtttgatgggcagttggaggacatttatgccctgcgcacaagggcgctcgataaaacagtcacgcgggaagagcttgcaaggataatgctgcacttgtcgcagcgcagagggttccgctctaaccgcaagggcggcactgatgcggaggacggtaagctgttggaggccgtgggtgacaataaacgccgcatggacgaaaaaggctatcgcacggcgggggagatgtttttcaaggacgaggcatttgccgcgcataagcgaaacaagggcggaaattatattgcgaccgttacacgcgcaatgaccgaagatgaggtgcacagggttttcgcggcacagcgcagcttcggcgtggattttgcaagcgaaaagctggaggcggagtatctcgatatactcttgagccagcgctcttttgatgagggaccgggtggcgacagcccgtatggcggcagccagatcgagcgaatgatcggcacatgcacgtttgaaccggatcagcccagagctgcaaaggcgtcgtattcctttgaatacttttcgcttttggaaaagctcaatcatattcgccttatcgaaggcggaaagagcgaaccgctgactgacgcacagcggaaaaagctcatagagcttgcccataagaccgatacgctcagctatgcgaagatacgcaaagagcttgatttgaacgaggcagtgcgctttaactctgtgcgctatacagatgaagctccaatcgcagagcaggagaagaaagagaagatcgtttgcatgaaggcatatcacgctatgcgcaaggcggtggacaagaacgcaaaggggcgctttaattatctcactgtgccgcagagaaacgagatagggcgcgtactgtccacatataagacgagcgcgaaaatagaaccggcgctggcggcggcagggatagagctgtgcgacgttgaagcgcttgaggaactgagcttttctaaattcggtcatctctccgtcaaggcttgcgataaactcataccgttccttgaaaaaggaatgaattataatgatgcctgcacagcagcaggttacgatttccgggggcacagcaaggacgggcggcagatgtatcttcctccgctcagtgatgattgcacagagattacaagccccgtcgtgcgccgcgcggtttcgcagacgataaaggtcgtaaacgccataatacggcgctatgggacaagcccggtgtatgtgaatattgaactcgcgcgcgaaatgtccaaggacttttccgagcgggcaaagataaaaaagcagaacgacgagaaccgcagcaagaacgatagaataaaagaccaagtcgccgagtataagcacggcacggcgaccgggcttgatattgtgaagatgaagcttttcaatgagcagggcggtatctgcgcgtattcacagcgccaaatgtctgttgaacggctcttcgaccccaattatgcggaggtcgaccacattgtcccgtacagcatcagctttgacgaccggtacaggaacaaggtgctcgtgctcacagaggagaaccgcaacaagggcaaccggctgccgctgcaatacctcaccggggagcggcgcgatcactttatcgtatgggtgaacaacagtgtccgcgattttcggaagagaaagctgctgctgaaagaagaactgacgccggaggaagagaacgactggaaagtgcgcaacttgcaggatacgaagacggtgtccagcttcctgctcaattacataaatgataatctgctttttgcgccgtccatgcgccgcaaaaagcgtgtcacggcggtcaatggcgcagttacggattatatgcgcaagcgttggggtatcagcaaggtgcgtgaggacggcgactgtcaccatgctgtggatgccgtcgtcattgcctgcacaaccgatgcgttgatacaaaaggtatcgcgctatgaatcgtggcacgagcggcactatatgccgacggagaacggcagcatacttgttgacccggcgacgggagagataaagcaggagtttccgtacccgtgggcgatgttccgcaaggagcttgaggcgcggctgagggcgcttgaaagcggaaactgacaaaggaggaaaaacaaacatggcaagctattacctgaaaggatacaccacgccggacggcgtgaacagccgcgcggacgtgcgcgaatggcagaataagctgggcgtaaaggcggacggcatatggggcccgaacacgcaggccgcatacgaacgatacgcaaacgcaagctcaatgagcaaatttcaggagtattacgacactattttgggcgcgctgaacgtgccgagcatatcggtaagcgtgccgagcaaggcggagctgaaggaggacatttcaagctaccttaggccgggcgttgatcttgcaatatccaagcgccgcgccgcgggcgagaccgcaaaggcagagcttgatgcggacgcggtgagcaggggcatgggagcatcgacatatgtatccagcatgaaggagcgggaggacgacgatgtacagagcgacatttcaattatggaagcgcagtacaccgcgacccttgccgagcgcattgccgccgcgcttgaaaaatatcaatccatgagccttcaggcgcagctgcagaacgcgcagtacgcatataatgcgcagaccaccgcgatgaatttggcctcccaatggttcaattcatatatgaacaacgccgccaaggccgcaaaaagcagcggcagaagcggcaaaagcagcacggcgagcaaaaatatgtccacgctggactatgtgcgctttgtaagcgggcttagcgcgccggaaagatccatgctgtataactccggcgcgagcgaatgggtaatgatgcgcacggagcttgaggatgcgctcggcaaggacggctaccgcaccgtgcgaagcgcgttcccgatactcggcagcgcgggcgtgaggagcatatccaacaaaagttatgataaagcgagggatacatggcgatgggcaaggtgacgaaaagctttaaggtaacgctggacattgcaaggagcatttcaaacagggagttcagcgtggttgaaggggacacgggcaacacgctgagcataacgctcaacgacgacggcaaggccgttgacctgaccggatgcagggtgcttgcgctgttttcaaaatcgaacggtgaaaccgtgtgccaggacagcgcggagcaaaacggcggcgtgacaataggcgggcagagcatgaacgaaataagcatagagctttttgcctcctccgttgcgccgggaatggtggaaagcgaaatacaggtgtattccggaagcgatttaacaacgcttgtaacatcggcgcagttcaatttcaaatgcaggcgcggcatattgaacggcgatacgcttgccgccacaagggaatatccgctgcttacggcgctgataaaggaaacgcaggccatgcaggcaaggcttgaagcaatgctgagccaaaacgagaccatagccgcggcggaaaaagagagggcaagcgcggaggcgatacgcaagcaggcggaaaagcagcgcgtgagcagcgaaacgctcaggaacaacgccgaagccggccgaagcacggcggagagcggcagaaggagcgcggagacggcgcgcgtgaacgaattcaatgcaataaaggcccaagcggaggcgcttattgccgagcttgaggcggcgaagggaggagcatgagcatgacgcgcagggaggaattcaccgcatggatatgcgcgcagacgggcagcgcatacgtttggggagcgcaggggcataaggtgcggcgcgacggaacggtatatatgaaccaaagaaaggtgagcgacagctacgaaagctgggtaaggcaaagggagaatagcgaagaaaatgcgcggcgcgccataagcggcataaggcaaaggctcacggagggcgcaaacgaggttacgtgctatgattgcagcgggcttataatggcctacatacgggacataaagggctacactacgcgggatttgagcgcgcggggactttttgccattgccaaggaaaaggcgaaggaagggcttataccgggcgatcttgtgttccgccacaacggggaaaagataacccacgtgggcgtatatatcggcagcggatacgccgtggacgcgcggggcagggacagcggcgttataaagcaaaggctggacgcggccgggtggaaccggtttgcatcgcttgaaatgctgaacgaacagggcataggcacggttgacgcggacatgccctcctacggccgctgcacgggcaaaagcgtatatgtgcgcagcggcgcgggcggaacatacccgattcttgcaaccgcgcacaggggagacaggctctcgcactgccggagcaaaacggctggcacaggattgcaatatgctgcaagggaaagctgctcacgggatacatgagcgcaaaatatatagaatatgcataaaggagaaagaaaaaatgaggaacgaaatgggcgataaaatagcaatgtggataaagagtgcggctgcggcaataggcggcgcggcggcgtacctttgggggccgtgggatgcgctgataacggcgctgatagcgcttgtagcgatagactacgttacgggcgttatatgcgcggcggtgaacggaaagcttaacagcagcgttggcttcaaggggcttatgaaaaaggcgcttatattcgcgctggtagccgttgccggcattgcggacagggtgatacccgcggcgaatcaggccatacgcgcggcggtgatactgttttacacggcgaacgaggccataagcataatggaaaacgcggcggaattgggcctgcccgtgccaaagcggctaaagggcatgcttacaaaggcgcagaacgagagcgaggccgaataaaacggccttgcccgccggacaaatgcggattataattaagcatatctatcccgaaaaaggagaaggacatgctgccgcaggacataaaaaagcaatacgacacaagccgcgcccgcgccgaggcagaggccgcgcagcgcaagcacgccgcatataccgccatgccgagactgaggcagattgacgaggagataaggcaggtatccttcaacagggggctggagctgataaaggccgaaaaccgcgaccaagtaagaagggatacggcggaaaagcttgccgcgctttacgcggagcgggcgcggatgctgagcgagcggggcatgagcatggacgatcttctgccgcgctacgcctgtgaaaaatgctccgacacgggctaccttgaaaacggggagctttgcccgtgcgcacggctgaagctggcggggcggaaatattcatcctccggcataagcgaaaacgcgggctttgaccgctttaacgaaaacatattcaaagaccccgagcaattaaagcgcacacgccgcgcggcggagatctgcgcccaatacgccgagaatcttgaaataggcggggcgaaggggctgctgcttatgggcgaaacgggccttggcaaaaccttccttatggacagcatagggcgcgaggcgatacggcaggccatgaccgagcggca

SEQ ID NO: 2776 - DNA, 8228 bp, synthetic construct
  source 1..8228: mol_type = other DNA
  misc_feature 1..8228: note = Synthetic
gtttccgatttcgccgccgcaggtcatcacgaaccaggcacgccgggcgccccggagctccgatgccaggaggtgctgccgcaccagccgggggatgcgccagccgtaggtgggggtgacgatgaccagccgctccccggtctctatgggcgaggtgtcccggctgcggatgcggtcggtgaggcagcagaggtcgtcccccagtgcccgggcgatgcgccgggcagcataggcactgttgccggtgccggaaaagtaaagtaccatagcgggcctccttctcagcggtggatgctttctggtatattttaccagccccgggaaaaatgcgcaagggagaatatccccccggacaggggagggggaaggaggagagaagcagaagaattctctgccggctctcccggatgatatataccctgtgcggtcgtgttctttttgcgcttgtcatggagcgatatgcgtgctatgatgcaaaaaaaggaaaaggggagaatcatgcaaagaagatacatctctttactgctatgtctgctgatactgctgacactggcaggatgcgggaaagacatgaagcggaactatacagacgaagagatacatgcgctcgtggatgcagatatttctttcacagaggcctgcgaaaaaatttctacggtggcagatgccgcacagtttttggaagcccgtggctattacttcgcaccggattacgccggcattgaggcggcagtgcgatatcagctaaataacggcggctgcgttggcacatcggcactgtttgccgcactgctggacggcgactatgatgaagtcggttatgtttatgtattctggctggagggcgaacatgttttcaattacatcaagcaggacgacatttactatgcttgcgacttcgtctatggaccggtgagtcagaccggcacaaacgcaaggcaaagctgtgttcgctacacaggaaaaagcctgtccgggctttttgatgcatacgcgcggcaggagggcagcgatatcggcgatgctgtggcgatcatgtacaccacgatctgctgcggcgatcccaccatgcccaccgtttggctgcgggattctgcagatgggcaccagtctacgatctatctcagcgatgcggaaaaaaactctcaacagatactgctgctgcgggatggatatacctttaccttttgaaaaacacgcccgccggaacagattcccgcgggcgtgttcttttttctcacttcttcagctgctccagggcgctgcgggcggccaaggcctttgcagagccactccacaagccgacgagcgatgggacacccggccccatcgtcaacaaggtgaaaatctgcgaggcctccacgctgcaagcgcccgtcctccggggagacggcgcggcggacaacgacagcatggtgcgcatccatgtggccgtgaatacgagggcgaaaatcaaggaacagaaaagggagcggcaatccaatagtctccaccgctgccggtctttataggcgtaacgagtcggtattctcctccgggaattggcttttctccgctgcgccaaaaggtgctaaaatactctgtgccgccgggttccagctttagcgcaacctggctctcgcccgaattgtctgccttgacattataccagccgccgtttttctgatattggagcgcaaagcggtttgtgcagaaggcggccccggaaccgctgtttacgatacgatagacgcctcgggttttatcaaactgatcaaagattatcgacacaggggcatcggcacggatgtcgtaggtgttggggtcattggtaacaagccaaggacgggcggcgagaagatagaccattacggcggcgaccacggcggccagagggatcatgatagcgaggcgctttttcatgttttctctcctttataacatcatcttatggttatagttccagcggccattgtgcttccaagagaaaacgctttcgcaatatgacttccagagcgaagaactgatgcaggaaaatacaaaagacaatgctgcaccgttttttccgttggagagtctaatataagttgttctctggtggacggtaccaacatcggaagcattggaaacgataccataccaagaactaccaaggaactgcgattatattattccacaatacaccgccggtgtcaatcgggggatgagaaaaaggaaccggtcggggccgcggcaggatccgcccgggcgtgggcggcggcgagctcagcgaggtgttcgagcacgccggagatttcacgcgggcgtatgacagcgcgacgggggtgtactccctgacgatccatcatgcgttcttcgcgggcttcgtttcgcagatcacctgcttccgcttctgcgcacaggtatcggcgagcgccattgacgcctccttcttcgacgactgtgctctgacgatcaatgaagagatggcgagttgacgggatttgagcaaaaaacacaaaaagcaacttgaattttccaaaaagttgtgttatactatctacagtccataagttataccataccaaggactatgcaggttactatgataaggtagtacaccgcagagctctaacgccccgcgtaagcggggcgttatctctacccggaaaaagaaggagggcgcgttatgatcccctatgcgatcggctttgacatcggcattacatccgtgggctgggcgaccgtggctttggacggtgaggacaagccctacggcatcatcggaatgggctcgcgtatttttgacgcggcggaggagccaaaaacgggagattccttggcggcaccgaggcgcgaggcgcgcggtatgcgccgccgtctgcgccgccgaaagcaccgtttggagcgcattcgccatctccttgtggcggaaaatgtgcttacacagacagaactggacaccctctttgcagggcgcttggaggacatttatgccctgcgggtcaaggcgctggatgaaccggtttctcaccttgaatttgcccgcatccttctgcacatcgcccagcggcgcggttttcgctccaaccgcaaggcggagacctcgaaggaggacggcgaacttctttccgccgtgagcggaaaccgcacacgcatggcgaaagagaactatcgcaccgtgggcgagatgctgctgaaagaccccctgtatgccgcctataagagaaataagggtggctcgtatatcgcaaccgtaggacgggatatggtggaggaagaggtgcgtgccatcttccgcgcccagcgcgcgctggggcagccctttgcggcggagtcgctggaggagggatacctcgcgatcctcctgagccagcgctcctttgacgaaggccccggcgagggaagcccctatgccggcagccagatcgagcggatgatcggcaagtgtacctttgaggagggcgaactgcgggcggccaaggcgagctattcttttgagtacttcacgctgctgcagaatgtcaaccacctgcgcctgatccgcggcggagagggcaccctgcttaccgatgaccaacgggaagcgctcatcgccttggcgcacaagaccaaggaactcaacttcgctcacatccgccgggaactggacatccctgcggacaccaccttcaacgcggtgtattacaagaacacggagaacacagaggaggccgaaaaaaaggccaagttctgctaccttaaggcgtatcaccagatgcgcacggccttcaacaaactggcgaaaaatcatttcgacgcacttacccgtgaacagagaaacgaactggggcgcgttctttccgcctacaagacttccgcgaagatccgtccgccgctgaccgccgcgggcctgtcggaggcggagatcgacattgccgaaacgctgaatttcagcaagttcgggcacatctccgtaaaagcctgcgacaaactcatccccttcctggaaaaggggatgaagtacgacgaggcctgcgccgccgccggctatgacttcaaggcccacggcggcgaggagcgcacacaccttctccacccgacgccggacgaccttgcggacatcaccagccccgttgtgcggcgggcggtgtcgcagaccgtcaaggtgctcaatgccatcatccgcgagcgcgggtgcagccccaccttcatcaacatcgaactggcccgtgaaatggcgcaggacttcagcgagcgaaatcaggcaaaaaagaggatggacgaaaaccgtgcccgcaatgagcggctcatggagcgcatccgcacggagtacggcaaggaaaaccccacgggacaggatctggtaaaactcaaactctgggaggagcagcacggggaatgtgcctattcccagaaacacatctccatcgagcacctctttgacccggactatgccgaggtggaccacatcattccctacagcatctcctttgacgacggctataagaacaaggtgctggtgctggcggcggaaaaccgcaataagggcaaccgcctgcccttgcagtatttgcagggcaagcggcgggaggatttcatcgtttgggtgcaaaacagcattcacgacagcaagaaaaagcaatgtttgctcaaagagaaactcacgcccgaggatgaaaaacagttcaaagagcgcaacctgcaggacaccaagaccatggcgcgattccttctgaactacatcggcgaccacctggaatttgccgcctttaccgccgggcgcaaaaagcacatcaccgccgtcaacggtgccgtgacctcctatatgcgcaaacgctggggcatcggcaagatccgcgaaaacggcgatctgcaccacgcggtggacgccctcgtgatcgcctgtaccaccgatggcatgatccaacaggtgagccgctatgcccaactgcgggagtgcgaatatgtgcagacggagagcggcagtttggccgtttccctgcacaccggcgaggtgctcaagagcttcccctacccatggccggagttccgccgggaactggaggcgcgcctgggggatgacccctgccgcgcggtcatctcccagcgtttcccggtgtacttgaccggtgagatccccgtacacaagctctttgtatcccgtatgccccggcgcaaggtcaccggcgcggcgcacaaagagaccatcaagagccccaaggccttgcaggacggcgttgtgattaccaagcgggcactgacggacttgagactggacaaaaacggagagatcgccaactattacatgtgggaaagcgaccgcctgctctatgaggcactcaagaaacgcctgcaggagcatggtggcgatgggtccaaggcctttacagagcccttccacaagccaaagagcgatgggacacccggccccatcgtcaacaaggtaaaaatctgcgaggcctccacgctgcaagtgcccgtcctccggggagacggcgtggcggacaacgacagcatggtgcgcatcgatgtgttccgggtggagggcgagggctattactttgtgccgatctatgtcgccgacacactgaaaaaggagctgccgagcaaggcgtgtgtagcattcaaatcctatgcggattggaaagagatgaccgatgagaacttcctcttctccctctatcccaatgacctgatgcgcgtgacccacaagaacaagctcaagctgacaaaggcgcagaaggagagtacgctccccgccacctatgagaccaagcaggagatgctgtactatgtcggcgcgggaattgccgttgcatcaattgcctgccgcacacatgacgctgcctatgaaataaagagcatgggtatcaagacccttgaaaacctggagaaattcaccgtggatgtgctgggcaactatcacaaggtggaacgggagccccgcatggccttcaacagaaagtgaggtttgccatggcgtttcggaacctgatcgtagagagccccgccgccctctcgctgcgccgagagcagctggtcatccgcacggacgcggagcacaccgtgcccgtggaggatattgccgcgcttttgttggaaagccgccaagccaccattacaacagccgcgctgtcccgtctggggcagtgcggctgcgccgtttttacctgcgatgaaaaacacctgccctgcgcggtgctggtgccctatcaacagcacagccgggggctttccgttctgcggatgcagatgggactgtccgagccggccaaaaagcgcctttggcagcggatcgtcaaggccaagatccaaaatcaggccatctgcctgcagttgaccgggcacctcccgcaggcggagaccctccgcgccatggcggagcggggccgttccggcgacagcgagaatgcggaggccgccgctgcgcagttatactttccggctctcttcggggcgggttttacccgcggagaggacagcggcatcaacgcgggactgatctatggctatgccgtcctgcggggctgcattgcgcggcatttggcggtgtacggatttttgccggccttgggattgcaccaccgcagtacgctcaacgcctttaatctggcggacgacctcatcgagccctttcgcccggtggcggatcttttgacggcgcgctgcattgatgcccgggagacactgggcacgccgcaaaagcagctgctgttcaactgcctgaatctggacatcctctccggcgggcagcaccacagcgtgtcctacgccgtggagcggctggtgcagagtttggggcgagtcatggagcgccccgaaacgcccctgacactgcccacactgctggaaacggcacagcaccgctatgaataagtttatgcggatcctgattttttttgacctgccggtcaaaaccaaggcgcagcgccgggaggccacccgctttcggaacttcttgctgacggatggttatcatatgctgcaatactccgtctatgcccgggtctgcaacggtatggacgccgtggaaaagcaccggcggcgggtggagcaaaacttgccggacaacggcgccatccgcctgatggtcatcaccgagaagcaatatgagtccatggatgtgcttttgggaaaattaacggaggcggacgccgagttccaatgtgagcagctcactattttttgaagaaaaaagaccggtaaggcagtgccttaccggtctttttcggtagtctattataccataccaagaactaccagggaactacaacacggagatggtggaggagaccgccgcccgcaattataccataccaagaactaccagggaactacaaccgcgggtgttcgattttggccgaaattcttattataccataccaagaactaccagggaactacaaccgaacggatgtccccgattttggcgattttattataccataccaagaactaccagggaactacaacaaaatgacctccgccatgcagcaggactattattataccataccaagaactaccagggaactacaacgccagatttggcgggtggcgcgatgagttttattataccataccaagaactaccagggaactacaactgtatggtacgggcaaaaacctggctttctattataccataccaagaactaccagggaactacaacaggccggatttgtctgcttcgtctgttagaattataccataccaagaactaccagggaactacaaccgctgatgtctaaagtgtttgaccctgcgaattataccataccaagaactaccagggaactacaacggccagaaggtgaataacacggtcgttgttaattataccataccaagaactaccagggaactacaaccatttcatgctcgacaccatcgcaagtgcgattataccataccaagaactaccagggaactacaacccggcgccgcgtggattttctgcagcagagattataccataccaagaactaccagggaactacaactccgcaactactacgccatgcgccgcccgtaattataccataccaagaactaccagggaactacaacggtggctcgtcttggtcgcttcggtctgaaattataccataccaagaactaccagggaactacaactgtcaagaagttttttacaatcttgcaaaaattataccataccaagaactaccagggaactacaacatattgaatactgggtcaagtaacgcttgaattataccataccaagaactaccagggaactacaacgccagatttggcgggtggc

SEQ ID NO: 2777 - DNA, 7388 bp, synthetic construct
  misc_feature 1..7388: note = Synthetic
  source 1..7388: mol_type = other DNA
agagccggttttctcgccgggatcagggggatagaacaggccgtgagcctgagcatccgccgcgaggtcgcagagtcttacgccaacctgggtgtgtacgcagaggttcttcatatcgtagccgaggatcttgttcatgcgcgccgtgcagataatgacgccgccgttcagtgcgaccgcgccgccgacaaggccagtgcccgcgccgcgcggagtgacggggatgaggttctcattgcagagcttcataatggccgcgacctcttcggtgctctccacctcgcataccgcttcggggaagcgtttgccgtagatgggcatttcgtcgtggcagtagtcctcgggaatgctgccgtcaaaatagaatctgtcctcaccgactatcgccttgagcttttcggcgagctcagcggtgatcttgttgtatttcgccatgcttttatctccttaaagtatttttatctttacgcaaatcccggcgtccgggacgcggtctgtactgttattcatgcaccattcactgcctgtcagcataccataaagccgtttttaaggcaagtggtaattgggatggacagactatgtttcccacaaacgacagatatctgcaaaaacagcattgactttttcttttcgtcacattataataaaggtggtatttaccataccaagaactgcgcaggttactatgataaggtcttagtaccgcagagctctgacgccccgtttctgcggggcgtcatctttttatatagaaaaatacttatatagaaaaatacaaataaaataggaggctccgcaatgctttcatacgggatcggtcttgacataggcatagcatctgtcggctgggctgtagtcgcgcttgataacaatgaattgccctacggaataataaatatggggtcacgcatattcgatgctgccgagaaccccaaagacggcgcctcccttgcgctgccaagacgggaggcgcgcagcatgcgccgcaggctgcgccgtcacagacaccggaacgagcgtatacgcgccatgctcgtcaggcgcggtattctgacgcagggcagccttgacactctttttgacgggcagctcgaggatatatacgcgctgcgcgtccgtgccctggatcaaagcgtaacggcggaggaatttgcgcggatactgatacacctttcccagcgcagaggcttccgttcaaaccgcaaagccgaagcgtcaaaagaggacggggagcttttatccgcggtgagcaaaaatgctgagcggatgcgtgaaaacggttaccgcaccgctgctgaaatgttcatgaaatcggaggaatactcagagcataagcgcaacaagggaaacagctatatttcaacagtcagccgcagcatggtcgaagcagaagcaaagatgatctttgccgcgcagcggtcatttggcatgtcctttgcctcggaggaaacagagggagagtatctcagcattcttctgagtcagcgctcctttgacgaaggtcccggcggtgacagtccatacggcggcaatcagatcgaaaagatgataggtaaatgcacgctcgagcctgacgagctgcgggcggcaaaggccagttattcgtttgaatacttcaatctgctgacgcggataaataatatccgtatagtggagggcggagcgtctgtcccgctcgacaacgcgtagcgggcgctgatcgttgagcttgcgcacaagaccgaagctttggattttgccaaactgcgcaaagcgcttgagctctcgccgtcacagaccttcaaccttgtgtattatcgcgcggacgaaacgcaggaagcatcggagcgcaagcagaaattcagctttctgaaagcatatcacgagctgcgccgcgcttttgacaagctctccaagggctatataaacggcatgagccgcgaaaaacgcaatgcgatcgcttacgcgctgacagcatataaaacagaaaagtcgatacgcacggggctcgaaaatgccgggctgacagaggatgagctaaacactgcgctcacaataggcagcttctcaaagtttggtcatctctccgtaaaggcctgtgacaagcttatcccttatcttgagcagggcatgaagtataacgacgcatgcgccgcggcggggtacaacttcaaggctcacgacggtgaaaaaaggtcgcggctcctgcacatcacgtctgatgacatggaaccgataacgagcccggtcgttcgccgcgcggtatcgcagacggtgaaggtcatcaacgcgatcatccgcgagcgtggatgcagtcccacattcgtcaacatcgagcttgcgcgtgaaatggcaaaggatttccaggaacgcggcagactcaaaaaggaaatggacgcgaacgcctcgcagaacgagcgcgttatggagcagataagggagctgggcaaaactcagcccacagggcaggatctgctgaaatatcttctctggcaggaacaggacggacgctgcgcctattcgctgaagtcaataccgattgaaaacctgttcgacgagggctatgcggagatcgaccacatcataccttacagcataagctttgacgacagccgcaggaacaaggtgctcgtcctttcaaaggaaaaccgtgaaaaaagcaaccgcctgccgctgcaatatctgagcggtaaacggcgcgatgacttcatcgtatgggtcaacacagccgtgagggatcagaagaagcgcagaaatctgctcaaagaggagataagcgacgcggaccgcggcaagttcattgagaggaaccttcaggatacaaagacaatgtcaagcttcctcatgaattatctgaacgataatctggaatttgcgccgtcggataagcgcaggaaaagagttaccgcggtaaacggagccgtcacgtcgtacctgcgcaagcgctggggtatcaggaagctccgcgcgaacggcgatacccaccatgcagtcgacgcgctcgtcatcgcctgcacgacggacagtctgattcagcgcgtcagcagatacagcaggtggcacgaaagcagcaccgttgaggtcgaccctgagaccggcgaggtgatcgagcgcttcccgtatccttggccgcagttccgcaaggagcttgaaggccgcttgacaagcgacccgatgaaaaatctccgtgaactgaacctgccgctttacggcgaccctgaggtgccgctgcggccgctgtttgtctcgcgcatgccgaggaggaaggtcacgggcgcggcgcacaaggaaacgataaaaagccccgctgcccttgatgacggcttcctcgtcgtcaagaagccgcttaccgagctgaagctcgataaggacggcgagatctcgaactactatatgccgcagagcgaccgcctgctgtatgaggcgctgaagcggcagctcagcgctcacggcggagacgggaaaaaggcattcaccgagcctttccataagccgaagagtgacggtacgccaggcccggtcgtcaacaaggtgaagatatgcgagccgagcacaatgtctgtcccgatccttggcggcagcggcgcggcggataacgacagtatggtgagagtagacgtgttccgcgtcgagggagagggctactactttgtccccatctacgtcgccgatacgctgaagcctgagctgccgaacagggcgtgtgttggatcaaagccttatagcaagtggaaaataatggatgacagagatttcattttctcgctctatccgaatgacctgttcaaagcaacgagccgaaagacgctcaccctgaagctttcccagccggacagcacactgccgccggaatactgtgtgaagtcagagcttctgtacttcaagggagcggacatcagcactgcaagctttgccgcaatcaaccacgacaatagctacaaagtgaaaggcctcggcataaagactctcgagaacttagaaaaatgcaccgtggatgttctcggtacataccacgccgtagggaaggaaaccagacagccgttttataaaaagagaggttgaacatggcgtttcgaaacattattgtcgaaaatcctgcgcatatatccgtgaagaacagccagcttgtgatccgtaccgataccgagcacagcgccgcgcttgaggatatctctgcgctgctgctcgaaaaccggcagacaacgataacagcagccgcactctccgctcttggagagtgcggctgctgtgtttttacctgcgacgaaaagcatttaccctgtacagtgctcgccccattcatgcagcacagccgtcaggccgccgtcatcgaaaagcagcttgcggcgggtgaaccgctgaaaaagcggatgtggcaggccatagtcaaggcaaagatcaccaatcaggcactttgcctgaaatactgcgggaatgagcatgactgccagaccttgaaagcaatggcggagcgcgtccgttcgggcgacgtggggaacgtagaagccgctgcggcgcgcttttatttccccgttctcttcggggaaggcttcacgcgggggaacgactgtatatacaatgccgcgctcaattacggctatgccatcatcaggggcagcatcgcccgctctctggcagtgcatggtctgctgcctgtcttcggaatacaccatgaaagctcgatgaacgcatttaaccttgccgatgacctgatagaaccattccgtccgctgatcgatcttcttgtattctcctctttccgccccgaggatgagcttggtcccgataaaaagcgtctgcttttcggtgcgctgaatctggacattctttccgattcccagcatcacagcaccgcatacgcgatagacaggctcgtgcagagtctgctgcgttcactggatgaaaagcagccccggcttctcctcccggagctgcttgcacttgaacagcaccggtatgaataagtttatgagaatgctcgtattttttgatctgcccgtgcagacaaagacgcagcggagagaggccacaaaattcagaaactttctgctcaaggacggttatcatatgctgcaatactccgtatacgcccgcgtatgcaacgggactgacgccgtggacaagcaccgtgagcgcctgcgcgaccgtctgccgaaaaacggggcgatccggatgctcgtcattaccgagaagcaatacgagagtatcgaaattctgctgggtgagctgacccctgcggacgaacctttcgagagcgaggtcctcagcgttttttgaaaaacggaattttttacatttttgccgcggcagcacaggctttttataaaaaaaggagccccgaaaccattaatttcagggctccttttccgcagtcagttttaccataccaagaactgctagggaactacaacaatggggctgactgacaccgaccacccgcgtgttttaccataccaagaactgctagggaactacaacctgaaagctgttggccttttgagccaatccgttttaccataccaagaactgctagggaactacaacaactctatgaaggttttcactggctttttcgttttaccataccaagaactgctagggaactacaacatctcagaagtgacaattgacggcttatatgttttaccataccaagaactgctagggaactacaactgaacgcagcgcggcagcgcagccacgcctgttttaccataccaagaactgctagggaactacaacgagaggacaagactaatgtcgatcgcgtccgttttaccataccaagaactgctagggaactacaacactggcttagcgttgcagacaaaatctgcagttttaccataccaagaactgctagggaactacaacattggaaagagttttgtggtgagaataccggttttaccataccaagaactgctagggaactacaacacctcagccgcagccaatgacacggggcggtgttttaccataccaagaactgctagggaactacaacagccttgtaatagactgcttcaagcgagcgggatttaccataccaagaactgcgaagagactacaacaatgggttaactgacatcagcctgctacgttcattcttcgatgacctcaagttcagattccacacaatcatatagtttccagctatcatcttcaccgaagccgctgggtgttccctcttcgtcggactcaactataaaccactctgtgccctctattgtgtgaatgtcaaccactatgccggtgatgccagtctcttttattctcacgtgcgcgaaccaatctatcatacttcacacaccctttttataagcagtatacactatcgctttctttttggcaatacataccgccgcactgggcggcaaatcctcccgccgtggctattgacacggcgcaaaaacctgctataatatcacagtacaattgaacaccttatcaagagcggtggagggaacggccctgtgaagcccggcaacctgcgtatgcaaggtgccaaatccggcggtgatacgaaagatgaggcttttatgcagactttatgctccgtcggatgacggagcttttttattgctctttatcgctcttgacctaaagttctgtaaaaatacaaaggaggaatataaatgagccattactttttcacatccgaatccgtgaccgaggggcatcccgataagatctgcgaccagatctccgacgctgtgctcgacgccatccttgagaaggacccgcaggggcgcgtcgcctgcgagaccaccgtctccaccggccttgtccatatcatgggcgagataagcaccgagtgctatgttgacattccgcgtatcgcgcgcgaggtcattcgtgagataggctacgaccgcgcaaaatacggctttgactgcgacacctgcggcatcatcacgaacatcgacgagcagtccggcgacatcgcaatgggcgtcgacaagtcccttgagaacaaaaacggcgaatatgacgagctccagaacggcgccggcgaccagggcatgatgttcggctacgcctgcgacgagaccccggagcttatgccgatggctatctctctgtcccacaagctcgcgaagaagctcaccgccgtcaggaaatccggcgctctcacctatctcagacccgacggcaagacccaggtcaccgttgagtatgacgagcagcgccgccccgtcagagtcgacaccgtcgttatctccacgcagcactcccccgaggtctctctcgagcagatcagagccgacatgatcgaaaaggtcatcaagaccaccgttcccgcggagcttctggacgagaacaccaagtaccttgtcaaccccaccggccgctttgtcatcggcgggccgcagggcgactccggtctcaccgggcgcaagatc

SEQ ID NO: 2778 - DNA, 6590 bp, synthetic construct
  misc_feature 1..6590: note = Synthetic
  source 1..6590: mol_type = other DNA
acagcttccgcccgcagggtaagctaacccgcgccgaagccgcagccataatttccaaactactctaactcaataccattaacttcataaaccaccaaaggggcgaaccaagtgttcgccccttttgttaaatggagttccgaaaacgcttgctgtgaacggaatgccagggtggcgcattgtaatgcaatccttagagcggacaatgaaaacatattaaaagtaagcaagcacggcttcaccccttaaatgtaaaaaatattgaaaactgctagaaaattgtcaattggtctggtataattatccatagtaccataccttgaaccattgggttgctgcaataaggtagcaaaccgcaaagctctgatggcccaactttggttgggccatcatctttaaggggacggttgaggagagtgttacaatgaattatcgtctggggttagatatcggtattacttcagttggatgggcggtattggagcataatgaggaacaggaaccaattaaaatcgttgatttaggggtacggatttttgatcgcgctgaaaatcctaaggatggatcttcgcttgctcagccgagaagagaggcacggagtgcccgacgtcggcttcggcgacatcgtcatcgccttgaacgtatcaagcgccttctcgaagaatatgacacaatctcacaatcagatttggaggacttatttcatagtccccagccactagcagatgtatatgaacttcgtcaccaaggcattcacaggcagctggccaatcacgaatgggccagagtgctgattcatttggcccagcgccgtggattcaaatctaatcgcaagaatgaaaaggataaggaaaaggaagatggcaaactgctggcggccgtaaaaaccaatcaggaaatcatgctggagaagggttatagaactgttggtgaaatgttttatcttgatcacaagttcgcctcgcacaaacgcaataaggcggaagattatggccataccattagccgccagcaagtattggatgaagtcagtttgttgtttgaaagacagagagattttaataatccctatgccaaagttgagtttgaacaagcgtacacagacattgtatctggacaacgatcatttgacttagggccaggtgatcccagcccctatgggggtaatctcatcgaaaaaatgcgcggtaattgcacatttgaaaaagatgaaccacgagccgctaaagcatgctattccttcgaattattcaatctataccagaaaatcaatagtatacgcattgagagttcgcaagacataagccgatttttggccagcgaagaacgcgagttgatagttcaactagctcatcagaaagctgatctgaattacggcattatacggagaactttggggttaacagaagagcaaaggtttaatagcttgacctacggttcagatgatattgtagaaacagaaaagaaaagtaaattcaattatcttaaatcctggcacgaaattcgtaaggcactggattccgtgagtaaaggtagaatccaacaacttagcattgaacaggccgacttaataggggaaacactcacactatataaaaatgaagaaaccattagtaaaaaactattagcggcagatttctccaagcacgatgttgaagcgttattgcctctaacccctcgaggttttagtcacctttcccttaaagcaatcagacgtatacttccccatcttgagcagggatacgtttattcggaagcaactacattggccggatacaattttcgtgcccatgacaatagcaccaagtacaaattccttcccctcagcgatccacagctgaatgacataaccaatcccgttgtgcgccgcgcggtctcacagtcaatcaaagtaatcaacgcagttgttcgaaaatacggcagtcctcagcttatttgtattgaactgagccgagaaatgggaaagaattttaatgaccgtaaagaaattgaaaagcaaataaagcaaaatactgctttgaatgaacaggtgcgaaacaagattattgaatacggcaaccccaacccaactggtcaggatattgtcaaaatgaaattgtggcaggaacaagacggtcgctgcgcatattctggtgaccacatacctattgaaagactgtttgagccaggcgtagcagatgttgatcatattgtaccgtatagcatatccttcgatgatagctatactaataaagcgctggtaaagagcagcgagaaccgtcagaagggtaacctgttaccttgtgaatacatgaaaaacgaccctgccaaactagaacgatttacagtgtgggttaacactagtgtaagaaactataacaagcggcagcgactccttaaaagagctatcaccgatgaggatcggaacaaatggaaggaacgtcaattgaatgatactaaatatatatctagatttatgctcaactatattcgcgacaatcttcaatttgctcccgctgagtacttgggcaaacgtcgggttatagcagtaaacggaagcattaccgcttacatgcggaaacgatggggattaaaaaaagaccgattagcaggtgatttacaccatgctcaggacgcggtagtagtagcttgcgtaacagagaccatgatacgaagaattacacgctacagtcaatactatgagacaagatatagccccaatcacttcgttgaccatgaaactggggaaataataaatgcccgccaggaaagatttggggtaaaattcgttgagccctgggagaacttcagacttgagcttgaaagtcgtcttagtgatgatccggccattaggattagtgcctataatctaaagaattatttaaacccagaggaagttaagccgatttttgtttcccgtatgcctaccaggaaaaaccgtggcccagctcataaagaaactattcgtagcccgcgtttagccgaggaaggattctttgtttctaaagtaaatattactgatctgacacttgatgctgatgggcaaatcaaaggatattaccaaccccaaagcgacttacggttatatgaagctttaaggagtagacttcgggaattcaacggcgatggcaagaaagcgtttaaagagccgttttacaaaccgactgatacaggaaaatcagctccgcaagtgaaaaagattaaagtaattgaaagaagtaacttaaatgtatctgttgggagtggaatagctgctaatggggatatggttcgcgttgacgtttttaagacggaggaaggttactattgggtgcccatttatgttgcagacactgtaaagggaaatttgcccaataaagcgtccgtagcaagtaaaccctatgatttatggaaaacaatgaaagatgacgattttgtatttagcctttaccccaacgatttaattagatttcagcgagaaaaagacaaggatgaatttatgtattataagaaggcagggatctccactgcatcaataagtgttgaaagccatgaccgctcttgttctattcccagtctaggagttaaaaccttgcttttacttgaaaaatgggaagttgacgtattgggggaccggaaccgtgtcaaaaaggagaatcggcagtattttcccggacagataaggtgaggtgatacttatcgcgtatcgtaaccttgtatttacccgacccgcagtggtaaagagtaagaataaacaactccaacttgatatggacatagatggtttccattccattccgattgaagatattagtaacatcatggtcgaaagtgatggtgtacagatcagtagtcacgcattgcgagaattagctgcaaatggaaccacagtatttttttgtgatgatactcatttgccttgcggagtgctattaccattaagctcacattcgcggcagttgaaaatattacagaaccaattatcgataaagaaaccccttaagaaacgtttgtggcagaaaattatacagcggaaaattgctaaccaggctgaatgtttgcggctatgtaataaccatcagggatataaggaactacaggtcttagccaaaaaggttcaatctggagatagtacttatgtagagtctcaggcagcacttaaatacttccggctactgtttggaaaccattttcgacggcgtaaccagcactcaaatgaagatgttgatatcattaactcagctatgaattatgggtactctataattagaggtgcaattgcacgcaccttggtgttatatggctttgaaccgtgtctgggtatatttcatcatagcgaaacaaaccgttttaatctttccgatgatttgttagaaccattccgaccattggtagacttatatacctacgttaatattcacggtaataagctgatgcctcagcacaaacggaatttattaggaattttacactatgaattacagtctgggaacgaaaaccatagtgtgctatattcaatagaacgcttagtgaaaagtatgtcatcggtttatcaacaaaatgagggtgaactccttttacctaggttgcattccctcaaagttcatacctatgagtaatagatttatgcgtattatagtattcttcgatttgcccgtaacgacaaagacccaacgaaaaacagccaccgattttcgtaaatttctcattcgagacggctactacatggttcagttttcagtatacgcacgggtttgtaacggttatgatgctattgacaaacatataaagagattaaaaggcgttgtccccaagaatggctcaattcgagtgttggtcattactgaaaaacaatacgaatctatgcatgtactaaccggaaaattaatggaagaagagaaaccggtttctgttcagcagttgacgattttctaaaaaatagaggaaagatacaaaatggcaactctaaaaagccgctttttaaaacagcaaagtcccgatatcgtagtgatatcgggactttgctgttgagaaaacaataccataccttgaaccatcagggagctacaacgaccatcgtcgctttgagctacgcagggacacaataccataccttgaaccatcagggagctacaacctacgggcactacccctataagcgccatttacaataccataccttgaaccatcagggagctacaacttaacaactcttgcatattcaaagaataaaacaataccataccttgaaccatcagggagctacaacttggcgtcgggaacaacactatgtctggtaacaataccataccttgaaccatcagggagctacaaccatagcgtggtaatacaagccagactgtacacaataccataccttgaaccatcagggagctacaacgctacgacagttggaatagtccagcatggaacaataccataccttgaaccatcagggagctacaaccaatctattcttcccctttttcaacaaaatacaataccataccttgaaccatcagggagctacaactacgtcttcttcgtcctctctttcgctatcacaataccataccttgaaccatcagggagctacaactgcgccgctactcaatcagccccgctttccacaataccataccttgaaccatcagggagctacaacctgactagacctgttatggtctagtttcgcacaataccataccttgaaccatcagggagctacaacgccttgaaagcttgatagctaggccaccgcacaataccataccttgaaccatcagggagctacaaccttcggtagcatctactgtttttctaactcacaataccataccttgaaccatcagggagctacaacatgacaacggtaatcgttaagctggagaccacaataccataccttgaaccatcagggagctacaaccaagaatcattatgaatgaaattatggtcaacaataccataccttgaaccatcagggagctacaaccctgagatatgctgattgatgcagtatatacaataccataccttgaaccatcagggagctacaacaagcgcggcaacgcttcttagtatcaaaagacaataccataccttgaaccatcagggagctacaacacgcgcgggcgggaattgaatgtaaatattacaataccataccttgaaccatcagggagctacaaccaagctctaacgaacaaaaaagaagaattgacaataccataccttgaaccatcagggagctacaactcaccaatgactgctacaacttttcataatacaataccataccttgaaccatcagggagctacaaccctaggctggagccggttagggctgtcaagacaataccataccttgaaccatcagggagctacaacattgaacaaattaattcacctcattacaaaacaataccataccttgaaccatcagggagctacaacccagggattcatcgggtaatttctcattaaacaataccataccttgaaccatcagggagctacaacagcaggagtattgacccaagtggacactggacaataccataccttgaaccataagggagctacaacgagaccgacacccactatatttgcgaaccgacaataccatacct

SEQ ID NO: 2779 - DNA, 6386 bp, synthetic construct
  misc_feature 1..6386: note = Synthetic
  source 1..6386: mol_type = other DNA
ataggaaggtttgggacggcgtgcgtaagattttccaaatatctatgcttttaatatttataatattaatcaaattactaaatttaattttatattttaatgatgatttaagtaagagggagtttttttggataacataatcgatttttcaaaatacttttcaaaattatggtatactactcataaataggctttacttggcagggaaagtacgctataataaccttggttgtaccaaaccaaggctcgtaaggttactatgataaggtagtacaccgcagagcactaacgccttgccattttggcaaggcgttatctttttatccagacaattatgaaaggaaaggatgagatatatgagttacggtattgggcttgatattggaattggatcagtggggtatgccgtgcttgatcttgatcatgaggaaaaaccgtggggcattattcgtttaggaagccgtatttttgataaggcagaggtccctaagactggggggtcactagcccggcctcgacgggatgctagaagttctcgaagaaggttgagacgtcaccggcaccgtttggaacgaatccgtcaattgtttttaaaaagtcatttgctttctcagaaggaattggatactctttatgagggaaaattgcctgatatttacgaattgcgagttaaggcattggatgaacgagtgactaattctgaattagcacgtatcctgctgcatcttgctacgagaagaggctttaaaagtaatagaaaggcagaactcgcagacagcgaggctggagcattgaaaacggccatcagtgaaaacgctcggattatggctgaaaaacattaccggactgtcggagaaatgtttttgcatgattttcgtttcaaggaacataaacgaaacaagggcggttcttataccacgaccgtagatcgcagtatggttgctgaggaggctgaattaattctggatactcagcaaaagttgggaaatatagttgtttcagatgcttttaaagatgattacatgaccatcatgcttagccaaagggcgtttgatgaaggccctggtggaaaaagcccttatggcgggaatatgattgaaaaaatggtaggaaactgtacttttgaggacggttctcatggtgaaccagaggagaaaagagctgcgaaggcatgctattcttttgagtattttaatttgcttcagaaaatcaatcatatccgtcttgtttccgataaagaaagcatccccctatcgaatgatcagcgcaatgttctcatttctttggctcataaagtagagaaactgacctttgcaagaattcgcaaggaattagggatttcttcggaatattcctttaatatggtccggtataatgaggtaaataaagataatattgccgaagctatgaaagctgccgagaaaaaggaaaagtttgaatatctctctgcttatcatcggattatcaaaacattgaaatcaaagggcaaagaccgaatcgtcgcatatactccagaaattcttgatcaggtggggtggtatcttacgatttataaaggggatgataaacggcgagaagccttgaaaaccgtaggtattcctgatgacgatgttgaaaaacttcttgagatttctggcgtaaggaagtttggacatctgtctcttaaggccttgcgaaaaatcaatccttttcttgaacaaggcatgacctataatgaagcctgtgaagcggcgggatatgacttccaagcccatttggtagaaaaatcgatgtatcttcctgctaaggctcctgaattggacgatataaccaatcccgttgctcgccgtgccatttctcagactattaaggtcgttaatgcaattattcgggagcagggtgaaagtcctctttatatcaacgtggagttagcccgtgaactctcaaaaaactttcaagaaagaggaaaaatagaaaaagaaaatgagagtaatcggcataaaaatgagatggtaatggaaaaacttcgtgagaattttacgaatcataagccttcgggacaagatttggtaaagttcaagctgtggcatgaacaagatggaattagcccctattcacaaaagaagatagaatatggacgcctttttgagactggttatgctgaggtagaccatgttatcccttacagcattagctttgacgatacttataaaaataaggtccttgtattggcaagtgagaatagggataagggaaatcgaattcctctcgcctatctttctgaagataaaggacaagaagctgctaatcggtttaaagtttgggtgaattccaatgtgcgggactaccggaagcgtcagagactcttaaaggaatcactcacagaagatgacttcaaaggatttaaggaacggaatttaactgatacaaaatatatctcccgcttcatgtacaactatatttctgaccatcttctttttgcaccgtctgagaccggcaaaaagcggcgagttacagctgttaacgggatgattacatcgtaccttaggaaacgctggggcattaacaaaattcgtggaaatggagacaaacatcacgctgtagatgcagtagttattgcagctgcaacaccatcattgattcaagaaatttctggctatacagcgtatcgggagactgggcgttataaaaagaactatgcctatgaacaagggcttaatggtggctatttaatccataagggtaccggtgaaattaaggctgaattcccttatccttgggaaggttttcgtaatgagctgattgcacgctcctctgatcgaccgaccatgggccttgaaaaatcaccttactatgttaatagggacctttcagaaattaaaccgatttttgtttctcggatgccaagaagaactataactggtcctgcccataaggatactgtcatgggcgcccgacatcttgaagaaggatatacactgagtaaggtttccttaactgaccttaagttagataaaaatggagaaatcaaggattattacaacccaaacagcgatcgtctcttatataatgccctaaaggaaagattgactgcatacggcgggaagagtcaagaagcttttgcagaaccgttctacaaacctaaaacggatggaacgccagggcctcttgtcaaaaaagtaaaaatcatgaataagacgacaatgcctgttatggttcaaaataaaacaggtgcagctggaaatgacagtatggtacgagtcgatgtgttccatgttgaaggtgaaggatactatcttgtcccaatttatgttgctgatacggtcaaaaagcagctgccgaatttggctattgttgcaaataaaccgatttcacaatggaaagttatggatgaaaaagacttcctgttttctctatatcctaatgatttgatttattttaagagtaagggagtgaagacattctctcgagtaaatgatgatagtagcttaagagaaaagtatgagacaaatgaaggcttagtatattatgtaaagacaggaattaatacagcctcgattactattatttctaacgaccacagttatatacttaactcttttggagttaaatctgtatcgttaatagaaaagtatgaagttgatgtattgggaaattatcataaagtgaagcgtgaaaaaaggcgtcctattgttttcaagaaaaagaaaaactgttagtgtgttgttatgccatatcgaaatattattattgcctcagaaacagtgctccataataagaatggacagctggtggtgagtgggcagaatcaccaaagggtccctttagaggatataaaatgtatcgtgttggagaatctttcatgtcaagtgagtatttctacgctccaaaaaatggttgcaaatgggacggctgtttatatctgtgatgaaaagcatttaccaagtgccgtattgctgcccttctttcagcattccagaaccggatctgttatagaggggcagtgctccttaagtattccgacggtaaaaaatgcttggaaacaaattattatcgcaaaaattaaaaaccaaggaagatgcttggctgcacttggcaaagaaaaggagggacgatatttacgcgaattagcaaagactgttgcaagcggagatcccaaaaatgtagaagcaacagcagcacgttactattttaaatatttgtttgactcgggatttacaagaggaaatgaagaggactgccgaaatcatgcccttaactatgggtatgccatcatgaggggcatgacagctcgtcttcttactggttatggttttcttctcatgaaggggctgcaccatgagaatcagtataacgcatttaatttggctgatgatttcatggaaccccttagaccacttgtggatctatatgttgcaaagactattaagactattcaagaagatacagagcttacgacctcccttaaagcagcattattagggttgatgaatgcggatgtcctatccggcgggcaacaccatagttccagttatggtatggagcggatggtacaaagttttgtccggatctgccagaagaaaggaaaggcgctgatgattccggaacttctaggaattgatcaacattgctatgagtaaatttatgcgtatcgtggtcctttttgacattcctgtcaaaacaaagagagagcgccgcatagcgacgcagtttcgaaacttccttcttaaagatgggtattatatgatccagtattctgtttacgctcgcatctgcaatggcctggacgatttgacgaaacataagctgcgcattatcaatcactgccctgaaaatggctctgttcggatgctggtgatgacagaaaaacagtatgaagcaatggatgttttggttggcagctaccatcctgaagaggaagaaagtccttcagaaagcgtatctgttttttaaaaaaagaggcactcctatgaatatagcaaatctaaatttcgaaaatcacgaagagcaaaagcccttgtgcatgattgcacaagggcttttgccggtctcgattgtaccaaaccaagactcatgagggaactacaactcctcaatgtctaaaaagagcgggtcaggaattgtaccaaaccaagactcatgagggaactacaacgcatgtagcaggaatctgcagcttttcataattgtaccaaaccaagactcatgagggaactacaacttgtaggagtaggtcagcttgaaattgttcaattgtaccaaaccaagactcatgagggaactacaactcatagctgccacactttcattctttcgccattgtaccaaaccaagactcatgagggaactacaacgagaggatagggtttagatatatgcttgttattgtaccaaaccaagactcatgagggaactacaactttctagcttcgccccttttgaatggaacgattgtaccaaaccaagactcatgagggaactacaacttagaaaaccttggggagttaaaaacacccgattgtaccaaaccaagactcatgagggaactacaacttagaaaaccttggggagttaaaaacacccgattgtaccaaaccaagactcatgagggaactacaacttagaaaaccttggggagttaaaaacacccgattgtaccaaaccaagactcatgagggaactacaacttagaaaaccttggggagttaaaaacacccgattgtaccaaaccaagactcatgagggaactacaacgaaaagaggcctacgtcatcggcaatgatgattgtaccaaaccaagactcatgagggaactacaacggagtgatgggcctcgtcaatgatgatgaaattgtaccaaaccaagactcatgagggaactacaacgtgggaacaagccacaatatacgcatttatattgtaccaaaccaagactcatgagggaactacaacgtgggaacaagccacaatatacgcatttatattgtaccaaaccaagactcatgagggaactacaacgtgggaacaagccacaatatacgcatttatattgtaccaaaccaagactcatgagggaactacaacaaaaacgaccttggcggtcatccgctcaatattgtaccaaaccaagactcatgagggaactacaacgtgggaacaagccacaatatacgcatttatattgtaccaaaccaagactcatgagggaactacaacgtgggaacaagccacaatatacgcatttatattgtaccaaaccaagactcatgagggaactacaacgtgggaacaagccacaatatacgcatttatattgtaccaaaccaagactcatgagggaactacaaccccacgatataggaggcggtgggcatagctattgtaccaaaccaagactcatgagggaa

SEQ ID NO: 2780 - DNA, 6365 bp, synthetic construct
  misc_feature 1..6365: note = Synthetic
  source 1..6365: mol_type = other DNA
ctgtctcgtgggctcggagatgtgtataagagacagtgccccaccagatcggatagccgatgaaaacggtatcataatccgcccagttatctacggtgctctgctccagcgctacatctctttcactctcgttctcatactcatgaacaacacggctgttttcatccgtccagtccagatccgcatccgtatacgggtctgccggcacaagttcaaacagatttgcgcctgttgcctcggcaatgtaatttgccgcattttcggtattgccggttgcggaaaagtacactacaagtgttttgccgccgtttgccgtattatccgccgcggtatccgtgtttggctgtgatacggttgtgttttgcgaggtgatctcggtctgttcctccgcattgccgctgcatgctgtgaatacaactgccagcaccataaccatcaaaagggatactgcttttttcatgtgtttgactcctttcaaaattttttctttcaacttaagtgtaacatgcaaaccggcaatacgcaaatacctgttttgtattgacaaatatagttttaacgcatttctaaaataagaaagatgatctgtttatctaaatgaagatctattttttttaagcgtaaaagcagcgaattgttttcaagagctattttgattgtgtccctttttcaccacatgccgcctgttattctgatattacagaagttctgttcacaccaagttcatccttttatggtataaattataataggtgattttgcgcttttatcagaaaatacgggaggtaaaactatgttatacgcaatcagtgatctgcacggctgttatgaaaaatacgtaaaaatgctggagaaaatccgctttaaagagagcgatacactgtatatcctcggcgacgtggttgaccgcggcagcggcggaatcaatattctgctggatatgatgcacaaagacaacatcactccgatcatgggtaaccatgactacaccgcctgcaccctgctgaaagcgtttgggcagagcgatgcaaaaagcagccgggaaaaactgcgggatgcttttgaactttggctctatgacgggggtgaacccacctatacggcataccgaaaattgagcgcaaaacagcagaaaaaggtgctcgcctatctccgttcctttctgctctatgatgaggcccgcgcgggcggcagaaactattttctggcgcacacggtgccggaaaaggcgcgcatgctgaattttgacactctgttttggcaggaattcatcatcggcgaaccggagtatgacaaagtgtattataaaaacaaaataattgtaacaggacacactccaacaaagctgatagacagaagctgcaacggcaggatatttaaacgtaacaatcacttagccatagactgcggcgcggtatacggcggcaccctcgcttgcgtttgtctggatacactggaggaattttatatataacaataaaaaactacataattaaaatttcattataccctgtttatttgctttttaagcattattttgttgttagtaccaaaatccagaccataatattgattttgtataaatactttacaattgcagttaattatgttagaatggatttgttcttataccataccaaagaacataaggttactacaaaaaggtagaaaaccgaaaagctctaacgactcgcttttttgcgggtcgttatcttgtatcagggggtaaaatatgaaatatgcaatcggacttgactgcggcatatcttctgttggctatgccgtgatggcgcttgatttaaaagatgagccgtgcaggatcataaaactgaactcaaggattttcaatgccgccgaaaacccaaaggacggttcttcgcttgctctgccgcggcgtgaggcgcgaggaggcaggcggcgcacaagaagacacaggcatagaatcgaaagaataaagcatttgatgcttaaaagcgggcttttgaatgaaagcgagctgagcacgcttttttcggggcaattgagcgatatttatatgcttagaacaaaagcgcttgatgaaaaagttaccaacgctgaatttgcgaggatacttattaaccttgccgagaggcgcggctttaaatccaacagaaaatcagaagctatcgacaaagaaaccggcaggctgcttaccgcggtaagcgagaatgaagcgcttatgcagaaaagcggatggcgaactgttggagaaatgctttataaggatgaaaaatttgccaaatacaaaagaaacaaaggagaaaattacacaaacacggtatcgcgaaagatgatagaaaacgaagctgagcagatattttcagcccagcgcaggcttggaaatacttttgcaactgaggaaaacgagcaattatatcttgatatactgctttctcagcggccgtttgatgttgggccgggcgaaggcaacgcaaactctcccagcccctacgccggcgaccagatattcaaaatgataggtaactgtacccttttcccaaaagaaaaacgtgcggcgaaggcaacatattcctttcaaatgtttaacatttggcaaaatataaatcacataacactttccgatgaatcgggaaacaagactacacttactgacgatgagcgtaaaaagatatatcggctttgtcggaatactgcaaatgttacatataaaagaataagaaaagaacttgagatcggtagggaatacacattcaattccatttcatacggaagtaaggacgccgaagaagttgagagcaaggcaaaattcaattatcttaacgcctaccatgacataagaaaagcgcttaataaatatgaaaagaattatattgaaaaattaacgccggacgagcttgacagcatcggcacgatatttacggtttataaaagcgacgataaaattattgaaaaccttaaaaaagcgggcattgacgaggcgctttacgatccattacttgacctgaaaggcttttcaaagcacgggcatatctctataaaagcctgcaaagagctactaccctatctacaggagggaatgacttatgacaaggcctgcgccgctgccggaatagattttaaatcccattcaagaagtgaaaagggcgctcttttgccggcaaacgccgatgagcttgatgacataaccaaccccgttgtgcgcaggtctgtttctcaaacaataaaagttataaactccatcatacgcgagatgggatcaagcccggtatacatcaatatcgagcttgcgcgcgatctttcaaaaagcaagagcgagcgcaatgagatagaggcgcaaaacaaaacaaaccgcgcggaaaacgaaagggtaaaagagcggataataaacgaattcggcataagataccccaccgggcaggatatcgttaaatttaagctgtggcttgagcaggacggaatatgcccttattcgcaaaagccgataaaagcggaaatgctgttttcagacggatatgttgatattgaccatattattccatacagcatcagctttgatgacagttacaataacaaagtgcttgttttctctgcggaaaacaggcggaaaggaaataagcttccgcttgagtatctgagcggcaaggcaagggataactttattgtttgggttgaaaacaatgttaagcgttttgccaaaaaacgcaatctgcttaaggaaaagctgagcgaggcggactttagcggatttagagagcgcaatctgaatgatacaagatatcttaaccgtgtgcttatgaattttataactgatcatcttgaatttgccccttacagcgaagggcgcaaaaggcatgtcatgtctgttaacggacgcgcaacggattatatgcgcaagcgctggggcattgcaaagattcgcgagaacggcgacctgcaccacgccgcggacgcggcggtcatagcctgtgtaacgcagtccaacattaataagatatcgctttattcccagcagaaagaaacaaaatataccgagccgggtgaaaacggctctgctgcattcaacataaacaccggtgaggtaaaggatgtttttccgctgccgtacccggagttcagaaaagagctggaatacaggctgagcgacgacccgcgccattacctgcgtatggacccccttggcaactacacttctgaagagatagaagcgacgaaaccggcgttcgtttccagaatggtaaacagaaaagttacaggcgccgcgcatgaggacacgataagatcgggcaaggaaaaaggatataagatctctaaagtaccgcttagcaaattaaagctaaaaaacggagaaatagaaaactattataatcctgaggatgaccgtctgctttatgaagcgcttaagacaaggcttgagaaattcggcggagacggcgcaaaggcatttccggcgggatttgaatttcacaagccgaaagcggacggcagcgatggaccggcagttaaaaaagttaaaataaaagaaaagaccagcagctgggtaaacgcgcaggacggcgttgccgataacggcagaatggtgcgcatcgatgtttttcacgtggaaaacgacggctattattttgtgcccatctatgttgcggacacggttaaaccggagctaccgaatcttgcgtgcgttgccggagacaagccttggaagcctatggacgacagggatttctgcttttcgctttatgcaaatgatcttatcaagatcacggcaaaaaaggatatgaaactgagcctgaaatttaaggaaagcacccttccaaaagaaaaatacggcaacgagatgctgctgtattatgttaaagcaggaataaatactgcttctataacagttgaaaatcatgacggttcatatattataagcagtttaggaattaaaacattaaacagaatagaaaaatacacagttgacgccattggcaacatacacatggtgcaccatgaaaaaagaatgaggtttaataaaaagtaagtgccatacagaaatatttttattgccaacaaggcacagcttcgcctgagccttgggcaactaattgttaataacgtcgaggagtattccttcccgatagaagacatccgcagcattgtgattgacaacccaaacacaagcataacggcaaagctggcggcttaccttggaaatgagggcgtctgcgtgattttgtgtgatgaaaaacatctgccctgctgccagcttttaccaacgggaacctactgccgtacattaaaaagaataaatcttcaacttcagcaaacaaagccaaagttgaaaaatatttggcggcagatcgttatcagaaaaatagaaaatcagacaaaatgccttgatctctgcgaaaaaagcggtaaaaaactgatacagctggcaaaagcggttcagtcaggggacagcacaaacagagaaggctatgccgcaggtatctatttcaaagagcttttggcaagggatttacaagaagtgaagacagcgcggaaaacgctgcgctcaattacggctacgctataatacgctcttttatagccagaactattgccgcatcaggcttagagccatccataggggtacaccataaaaatcagttaaacgcctttaacctggcggatgaccttattgaaccgttccgcccatcggttgatatagccgtttttaagtttatggatctaagtaatggattatctacttatgaaaaggcatttttacaaaagcttttgaacagcgcatgccgtgttgacggcaattcgtggagcattgccaaagcgatagaacttgaagtgcaaagcctgattgaatgttttgaaagcaaagaagtcaaagatttgaagttgcctgaaacgattgaaaccgcattttttgactatgaataaaaaatttatgaggatacttgtattttttgatctgccggtaaaagaaaaatctgctcaaaaggcggcaacgaaatttaggaattttcttttaaaagacggcttccatatgctgcaatattccgtatatacacgaatctgcaacggatatgataatgttaagacccatgaagacagagtcagcaaaaacctgccgccaaacggctcaatacgtatgcttactattacggaaaagcaatacgaatccatgaagatactgcttggagaacgaaaacaggcggatgaagaagttcgatacgagcagataaccctgctttaaaagaggaaaaacggagaatctgtaagtaagattctccgtttttttttattgaatattcccttcttttccgcttaactaagccaaacttatcccttacattataccataccaaagaaaataagggaactacaacaagacgaacagctcaaat

SEQ ID NO: 2781 - DNA, 5867 bp, synthetic construct
  misc_feature 1..5867: note = Synthetic
  source 1..5867: mol_type = other DNA
taaaaaagcaatttgcgcactttcgggcggagttgacagtgcagtatgtgcagcactgataagcaaagctatcggtaagaatttgacctgtattcttgtagaccacggtcttatgagaaaaaacgaagccgacgatgtaatcaaagtattcaaagaaaattacgatgttgacataataaaattagacagagaggactacttcttgtctaaacttaagggagtaacagatcccgaaaagaagagaaaaattatcggtgaagaatttatccgcgtttttgaagaagaagcaaagaaactcggaaaaatagactatcttgttcaaggaacaatatatcccgatattgttgagagcggagcagaaggacacaaggctgtaaaatctcatcacaatgtaggcggattgcctgaagacattggatttgaaggcttaattgagccactgcgcgacttgtataaggatgaagtcagacaagttggcctttctctcggattaccggaaagaatagtaagacgccaaccgttcccgggaccgggactcggagtcagagttttgggagaacttacaaaggaaaaattagatcttctaagagaagccgatttcattttcagggacgaaattgcaaaagcaggcttagcttatgaaataagccagtattttgcgattctcacaaacttaaagagtgtaggcgtatccgaagacgagagaacttacgaaaaagtcattgcactaagagcggtaaacaccgaaaactttatgaccgcaactgttgcaaaagttccttttgaagttctgcaaagagccgcaaagcgaattaccgacgaattaaaggaagtaaaccgcgttgtgtttgatataacttcaaaaccccctgcaacggtggaatgggaataaaataacagatcttgaacacgcaaaattattgacaaaatttatttttgatgataatattttatcagttcttacatcataccaagaactgttcaggttactacaataaagttttaacactgaaaagcaataacgactcgctttgcgggtcgttatctttttgcttgatttgttgaaaaaatatacaaaatttattattattactttaacaatgttaaaggagcaaaattatggcttatgcgattggattagattgtggaataacttctgttggttggtgtgttatggaagttgacgaaaatgaagagccgattaaaatcaagaaattgaattcacggatattcccggctgctgaaaatccaaaaacaggtgcttcattgtcaaaaccaagacgtgatgccagaggtattagaagagttaatagacgcaggagacacagaaaagaaagaatagattttttactccaatcacaaggagtaattaataaagatgaactaaatgatctatataaagggactcttgaagacatttatgaacttagaacagttgctttggataaacttatatccagagatcagtttgtaaaagtcttaagaaattatgcacaaagaagaggattcaaatctaacagaaaacacgaaaaaaaaggtgatgacggaaagttattattggctgtttctgctaacgaaaaattaatgcaggaaaaaggatatcgaaccgtaggggagatgttcttcaaagatgctaaatttgccgagaaaaaacgaaatacaacagattcatatatgtgcactgtctcaagagctgacatagaaaaagaagtaaaacttgtttttgacagacagagaaactttggtaataaatatgcaactcaagaattagaaaaacaatatttagaaattttactctcacaacgtagctttgcagagggcccgggtgaaccaagcccatattccggagtgcaaattgaaaatatgataggtccttgcactttttatccggaagaaaaacgtgctgtgaaagcaacatattcttttgaatattttaatcttctacaaaaagttaataacataagaatctttcatcgcggcgagaaaagaaatctcacggattcggaaagaaaacttatcatagaaaaggcacataaatcacaagctttggattattcaataataagatctatgttaaatttagatgaaacagagtatttcgctacggtaaattataattttgacaaggaaattgatgaaatcgagaaaaaagcaaaatttcaatatttatcggcatatcatgaaatgcgaaaagttttagataaaataaaaaaagattttataaaaacgcttagtatagaaaaaagagataaaatagcatatattttcacagtttatagaacagattcatcaatcaaaaaggctttgaaagaagaaaggtttgatgaaatagtaatagaagctctgctgaatttgaaaagtttttcaaagacttcccacctttctttaagggcaataaagcaaataactccatttttagaaaaaggaatgcgctatgatgaagcttgtaaaaatgcaggtatagattttagagctcacaataaaaatgaaaaatctaagtttttaccctcaaattcggaagaattaaataacattacaaatcctgtcgtaaaaagagccttttctcaaacaacaaaggtaataaacgctattataagagagcaaggagaatctccatgttatataaatgttgaacttgcaagagagctatctaaaagcctcgatgatagacgagatgttgaaaagaaaaatgaagagaataaagctaataatgagaaaataaaggatgagattattgaaaactttggtatgctgagtgtttccggtcaagatatagtaaaacttaaactttggaaaagccaagacggaatatctccatattctcaaaagcctataaaatatgaaagactctttgaagacggctatgctgaaatcgatcacataattccttatagcataagttttaatgatagttataacaataaagttttagtcttgtctgaagaaaacagacaaaagacaaatagattacctatggaatacttgagtggaaaagaacaggaaaattttgttgtttgggttgaaaataatattaaaaacctgacaaaaaagagaaatttgttgaaaacgaaaatcactgaagaagataaaaagttttttaaagaaagaaatctcaatgatactaaatatctttctaaagtcctttataattttattaatgacaatttagaatttaatgaagtcaaaaaagataagaagagaagagtcaatgcggttaacggagcagctactgcatatataaggaaaagatggggaattcataaaattcgtgaggaaggtgatcttcatcacgcagttgacgcctgtgtaatagcctgcacgacaaacgcttttattcaaaaaattagcagatatgcaaaaataaatgaaactgcggaggttaagacggaaaacggaaaaaccattctaatatcgaaaaataccggtgaagtcattaatgaagatcttgacgctaaattccctcagccatacaacaaattcagagatgaacttgtggcgcggacaagtgaggatccctcatattttctaaaaagtttagcactgcctacatatacaaaatcagaaatagaagaaataaagcaatgcttcgtttcgcgtaaaccaaataggaaggtcacaggacctgcacatgaggatactatttttggagagaaaaatggtgtaaagcttcttaaaactaaacttgtcaatttaaaattagacaaagacggagaaattaagaactattacaatccttcaagtgatattcttttatatgaggcactgaaaaaaagacttcaagattttgaaggcgatggtaaagaagctttcaaggaatctttttataagccgaaatctgacggaacgaaagggcccgtagtaaaatctgtaaagctaataaatgaaattagtaaatctgtttctgttcgagatggtataggtcaagctaaaaacgatacaatggtgcgaatagatatattctatgtttataatgacggatattatttcgttccgatatatgttgcggacacagtgaaagataaattgccaaataaagcttgtgtaagatctaaaccatgttctgaatggaaagagatggacgacaaagactttttgttttctgtatatccgaatgatttgatttatgtagaaagtaactctaaatttaaattaaagaaaattacagataagtctgtaattaaagaaaaaaaatcaacattgctttattatataaaatcaagtataaacactgcttccataactgttatcaatcatgataaaacatacaaactagaaagcttgggaattaaaaaactgtcaaagattaaaaaatgtcagattgatgttttgggaaatgttcattttgtagagaaagaaaaaaggcaagattttagtaacagaaaaagaaaatgaaatatctcaatgtttttatagcaaatgattcaaaacttttccttgaacaaaatcatattgtaatagataacggaacaattaataagctttatattgaagacattaagtcaatagtgatagagaataaattgaccactctttccgcagccttaatcagcaagcttggtaaatatgatgtcagcataattgtatgtgatgatcaacacttacctacctcaatctttttaccctgtaatcaacattctagacaaagaaaccatttaaagctacaattaaaatcaactcaaccatttaataaaaacttatggaaacaaatagttattcaaaaggttagaaatcaagcatctgctttaaagcttgccggaaaagaagaaaatgtgcataaacttttgaacctttgttccaaggttcagtccggagatgttggaaatattgaagccgtttccgccagaatttattttaagagtttattcggtgaaaattttaaaaggggtgaagaagattttcaaaatgcagctcttaattttggatattcaatcttcagagcgcagatagctaaaactcttgtaggctatgggtttgaaccgtctctcggtttgcaccacaaaagtgaacttaataattttaatttagcggatgattttatcgaaccttttagacctttagtcgatatttttgtatttaaagaactaaaatcagactcaaaacttaaaagttcagataaagcaaggttattgacacttttaagttataatttaaaagttgaagaaaaatcacaagaatctgattatgcgatacaacttttaatcgagagttatttaagatgtcttgaaaatagagctaaaattttgaaaatgccggctttagaaaaattagaattaaaaagttatgagtagatttatgagaatgattatattttttgatcttccggtaaaaacaaaaaatgaaagaaaagaagccacaaaatttcgtaacttcttaataaaaaacggattttacatggttcaattttctgtctatgtaaagacttgcaaaggatatgattcggttgaaacgcataaaaataggataagatccaatttaccaaaaaatggttgtattcgtttaatgacaataaccgaaaagcaatatcagcaaattgacattttacttgggaatttaaaatcagaagataaacatattaagcaagagcaactttcgtttttttagaaagcaaaaagcctataaccataatggttataggctttttcatccctaatattacatcataccaaaaattgttagggaactacagcaaacatttttccactccgtgtatccgtctgattacatcataccaaaaattgttagggaactacagctaataaaagtttcactacttgcggaataaattacatcataccaaaaattgttagggaactacagctttgagcttccgaaaaagtcattttcataattacatcataccaaaaatt

SEQ ID NO: 2782 - DNA, 5387 bp, synthetic construct
  source 1..5387: mol_type = other DNA
  misc_feature 1..5387: note = Synthetic
tggtatagtagagggagaaaaggttcaattaaggataaacagtctttgagtgaagaaaaaagtaaaatattcataatgttctttactttatatggtaagtgcgttataataaacttggttataccaaaccaatgatcagtgggttactatgataaggtaacacaccgaggagctctaacgccttgccattcggcaaggcgttatctctttattgggaaaaaattgaaggaaggcgggaaaggttatggcgtatggcattggactggatatcggtatcggatcggtggggtgggccgtgctggctctggatcatgaagaaaatccctggggaattatggatttgggcagccggatttttgatgcagcagaacagcctaaaaccggggcttctcttgctttgcccagaagagaagccagaagtatgcgtcgccgtctgcgccggcgcagacatcgtatggaacggatacggaatctctttatcaatgatggactgttgacggaagaacaactgaatcatctgtatgacggaaatttggaagatgtatatgctctccgtgttaaggctctggatgaacagctgacggatgaagaggtggcacgagtcctgctgcatctggcccatcgccggggatttaaaagcaatcggaaagctgaatccaaaagtgcagaagcaggggaactaaaaaaggccatcagtctgaatcaggaaaccatggaagaaaaccgctatcggacggtaggagaaatgttcttcaaagattcccgctacgcagaatataagcggaaccgaggcggaaattatctcaatacggtagaccgcagcatggtggaagaggaagcacgcaaaatcctggaaactcaggaaaagctggggaacagcaagctgaataaagattttcagaattcctatctttccatcctgctgagccagagacaatttgatgagggacctggaggaaacagccattacgggggaaatcagattctgaacaaggtagggacctgtacttttgaagatggaagcaatggggaacctgcggagaagagagctcccaaagtctgttattcttttgaatatttcaatcttctgcagaaagtgaaccatttgcgtttgagctctgctaaagacaaccggggactggatgaagaagaacgggaaaaagtcattgcgctggcaaaagacaaagcagacctgcgttttggaaaaatccgggaaacactgcagatctctccggaatatcggttccagggtgtttcttacagtaccaaagaacctcgtgaggataccgagaaaaaagccaaattcaatttcctgccgttctatcatcagatgcggaaaatcctgaaatcaaaagctcagattgatattaaggaatatactttggatgagttggacaaaattggtcagatccttgctttttataaaggggatgatgcccggcggaaggaactgggaaagctgcgaatcgaacccaaagccatagaagctctgttggaactgaacggtgccagcaagttctcccatttgtcattgaaggcgatccgaaagatcacaccttttctggaacagggtatgacctatgataaagcctgcgaagcggccggatatgattttcgggcccatcaagaggataaaacgttcctgctgccggccaatgcaccggaactggaagatataaccaatccagtggtacgccgtgccatcggccagaccatcaaagtggtcaatgccattatccggaagcagggaagcagtcccttgtatgtcaatgtggaactggctcgagaaatggccaaagattttcaggaacggaagaaaatcaaaaaaatcaacaaagaaaatcaagaaaataacgacagcctgatggataaaatcaggaaagaaaacaacagactgaatccgtccggtatggatctgatgaaattgaaattgtggaatgaacaggatggaatcagtccttattcacagagacatattgatagagaacgactgtttgaaacaggctatgtggatattgatcatatcgttccctacagcatcagctttgatgacagctataaaaacaaggtactggtgttttcttcagaaaaccgggataagggaaaccgtttgccctatcaatatcttctgaagaaatatgggcaggatgcggcagaccggttcaaagtatgggttggtccgggattatcggaaacggcaaaggctgttgaaagaaaaaatgacggaagaagaaatgtccggctttaaggaacggaatctgagtgataccaaatatatttcccggtttatgtataatttcattcgggaccatctggaatttgccccttctgaaacagggaaaaagaaacgggtattggctgtcaatggaatgattacttcctatttgcggaaacgctggggtattcgtaagattcgggccaatggggacaagcaccatgctgtggatgcggtagtcattgcctgcaccaccgacaagatgatccgtgatctgacgctttattcggaagaaagagaaaacaagtatgatgtggatgaacggggaagtcgtctggtaaatgaatctactggggaagtactgaaagaatttccgtttccctgggagggattccgccaggagttggaggctcgctgttctccgcacccggaacgggaattggctggtttgaccttttatatgaacaaagatctgaatgacattaagccgatttttgtttcccgtatgccccggagaaaggtgacaggagctgcccataaagacactattcgcagtgccagacacattgcggatggaattacggtttcgaaagtgccgctgaccagtttgaaactgggaaaggatggggaaattacggattattataatccggatagcgaccgtctgttgtatgaagctttgaaggggcgaatgcaaaagtttaatggaaaggcagatgatgcttttaaagaacctttctataagcctaaggcagatggatctcagggacctttggttaaaaaggtgaaagttcaatcgaaagcgactttggctgttcctgtggaagaaaagactggagttgcggataacgacagcatggtccgtgtggatgtgtttaaggtgaagggggaaggatactacctagtgcctgtttatgtagcggatacagtaaaagcggaattaccgcagagagcagtaacacctggtaaaccatatcaaaactggaaaattatggatgagaaagattttctcttttctttgtatcccaatgacctgattaaaattgaggccgaaaaagagatttcgtttttactagtaaatccagacagtgatttgttaaaagaaattaaaagcaatcaaatttttgcatattatgtaaagacgggcattgctaatggatcaattaaagttatcaccaacgataattgttatcagaaattgagcttgggggtgaaaacattaaaatcaatgaaaaaatatcaggtagatgtgctgggagaggttcatcctgtaaaaaaagaagtccgtcaaaagtttaccattcagcagaaagctcaatgatgaatgagaaaggttttgatcaatgggatatcgcaatattgtgattgcttccgatgctactttgtcctgcagggaaaaccagctgattattctcaatgagaataacaacaaagttcccatagaagatatcagtgccattgttttggaaaaccagcagagcaggatcagtttggcggctttgaaccaactggtatccagcaatgtggcggtttatctgtgtgacaaacagcatattcccagtgcagtggtactgcccttttatcaaaattccaccaatgctgtggttatcgagaaacaggagcagctatctgttccccagacaaaacaggtctggaagcagattgtgatggccaaaatccagaatcagagccgctgcctgaaggaaagaggggatgaagagggaacacattacctgatggaactggccaaaacggtaaccagtggggacatccacaatgtggaagcaactgctgcccggtactatttccgcagggcctttggggaaaaatttaccagaacaggagatgatggaagaaacaatggactgaattatgggtatgccattatgcgggggttgattgccaggctgcttacagggtatggattcatggttatcaagggaatccatcactgcaataagtacaacagctttaacctggcggatgattttatggagccgctacggccggttgttgatttgtttgtgttgaatcacatgacaggggatgataatctgacgccggatctgaagcacgcgctggtgaatctgttgggagtggacgtgctttcagggggtcaaatacacagcttgaattatggcgcagaacggatgatccagagttttatgcggatctgccagcaggaagggaaagaactgatgattcctgaactggttcagctgagacagcatcaatatgaataaatttatgcgtatacttgtactttttgatatcccggtaaagacaaaatatcaacggcacgtggcttcaaaattccgccacttccttttgaaagatgggtattatatgctgcagtattccgtttatgcacggatctgcaacgggccggatgccgtagaaaagcatcggcagcgcctgatgggtgcgctgccggataatgggtccgtcagaatggttgttttgacggaaaaacagtatgaagcgattgatgtgctggtgggacgatatctgcccgaagaaaaggcctatgatacagagcatgtttccgttttttgaaaaaaaccgaataaggcttcaaaaattcttttttacaggagtttttgaaaaaagtgaaaagcccttgtgccagatggcacaagggcttttgctgattacaattataccaaaccaataatcagcagggaactacaactggtcatccatgaaaccgtgagcaccactgattataccaaaccaataatcagcagggaactacaacgcgtcatccaggattttacttatcctatccattataccaaaccaataatcagcagggaactacaacggttcgtggcgtgggcatgatattcgtcaaattataccaaaccaataatcagcagggaactacaacttttcaattccattgcaaccgccccgcataattataccaaaccaataatcagcagggaactacaacgaaggtgacaactacatacggctgtcggttattataccaaaccaataatcagcagggaactacaacgcacagagactgaatggcttgcaacattaaattataccaaaccaataatcagcagggaactacaacatgtatatcttgatggtgatacttactacaattataccaaaccaataatcagcagggaactacaacgctatgactgggatgccc

SEQ ID NO: 2783 - DNA, 5027 bp, synthetic construct
  source 1..5027: mol_type = other DNA
  misc_feature 1..5027: note = Synthetic
gagctggatcgccccacagtcgccgccgccatccgggaaattcgcgtctatgaaggaaaccgcatggagatcgactatctgctcccggaatcctatcgagcactgctggagaggtaacgatatgcgctctatattaaaatgcaaaaaagaggaggagcttttgcggcggggtgtgtctgcggatcatatcatctgcaagcggtacaccgagatggatattcccgaaaatatcaccattaccccaaatatgttgtctccctgaatgacatggatgcggggattgaaaacggcattaagatcgtgcatcttcaggatttcctgctggcagaaatgtggtgagcatccattctggtttcccgactaaaatcacaaaacaaatatcggcaattgcttgtccgacaacgctttttgccataaccagctatcaaaaagcgttcacttttttgaaccaagttttgttgcagataggacgcatttatgctatcataaaagcacaataaagaagtgcgacagttctccgtgaactgccgcacttttacatcaccgtggggcaacgaggatacccagaccctcatcgacattctggagaagtaccatgtcaaaaccacattcttcgtggtgggcgactgggcggaaaagtaccctgagtcggtgaaggcgctgcacgatgcagggcacgaggtgatgagtcactccaaccaccacgaccactacaacgccctcaccgcccagcagatcgtggaggacgtcaccgccagcaatgagcgcatcgccgccgccaccggcgtgacccccaccctgatccgctgcccctacggcgagtatgatgaccacgtcattgccgccatccgtgctatgggtatggagcccatccagtgggatgtggactctctggactggaaggactacgatgcggacaccatctatcaaagggtgacgtccagggtgcagccggggagtatcgtgctgttccataatgcggcgcttcacacgccggaggcgctgccgcggatcctggagtacctcatcaacgacggctataccgtgctgcccatcagccagctgatcctgacgggggactacaccatcgaccacacgggacggcagtttgcggcggagacggtgtccgcagaatagacagaaaaatatacagagcacttgcaatttgctgaaattcgtgttatattggtcatagttctttataccataccaagaactatgcaggttactatgataaggtagtacaccgcagagctctaacgcctcgcgtaagcggggcgttatctctatccgggagtatgaggaggacatgctatgtatccatacgccatcggttttgacattggtatcgcatcggtaggctgggcggtcgtcgctctggatggagaggacaggcctttcggcatcatcaacatggcctcccgcgtttttgacgccgccgagcagcccaaaacgggcgattctctggcggcaccccggcgtgaggctagaagtgcgcgccgccgcctgcgccggcaccagcaccgcttggaacgcatccgccgccttttggcagcggaaaaggtagtatctcaagcggagctggatacccttttcgagggaaaactggaggatatttacgcgctgcgcgtcgaggcgttggatgccccagtgtccaacaccggatttgcccgtatccttctgcatatcgcgcagcggcgcggtttcaagtccaaccgcaagtccggcacatcgaaggaggacggcgagctgcttgccgccgtaacggccaaccgtgcgctcatgtccgaaaagggctaccgcacggtgggggaaatgctgctgaaagatccacaatacagcggaaataagcgcaataagggcggcaaatatcttgcgactgtgggacgggacatggtggaggaagaggtccgcgccatctttaaggcccagcgtgagcaggggcagccctttgcggcggcagagctggaggagcagtatctggaaatacttctgagtcagcgctcctttgacgaaggccccggacagggcagcccctatggcggaagccagatcgagaagatgatcggcaagtgtacgttggagacgggagagccgcgcgcagcaaaggccagctattcctttgagtattttacgctgctccagaatgtcaaccacctgcggctgatgtccggcggtgaaagcagcccgctttccagcgcacagcgggagacgcttatcgcactggcacataagacgaaggatctgaatttctcccgtattcgcaaggaactggggatccccgcgggtacgacctttaatacggtgtcctataagaacgcggaggactatgaggaggcggaaaagaaaacgaagttctgctatctcagagcctatcaccaaatgcgggcggctttcaacaagcttgccaaaaatcatttcgatggcttgtcccgtcagcagaagaatgagctgggacgcgttctctccacttataagacttccgccaacatccgtccccgcctggctgcggcagggttgtcggagatagagatcgacattgccgagacgatgagcttcagcaaattcggccacctttccgtaaaggcctgcgataagctgatccctttcctggaaaaggggatgaaatacgatgaagcctgcgccgccgcaggatatgatttcaaggggcatgacggtgaaacgcggacgcgccttctccaccctgcggaggatgatttcgcggatgtgacaagccctgttgtgcggcgtgcgatctcgcaaacggtgaaagtccttaacgccattatccgggaacgcggcggaagtccgacctttatcaacatcgagctggcgcgggagatggcccgcgattttgcggagcgcagcaagatgaaaaaggatatggatgaaaaccgcgcccgcaacgagcggatcatggagcgcatccgcacggaatacggcaaggaacgccccacgggacaggatctggtgaaattcaagctgtgggaggagcagcacggcgagtgcgcgtattcccaaaagcatatctccattgaacggctctttgagccggggtatgtggaggtggatcatatcatcccgtacagcatctcctttgacgacggctataaaaacaaggtgctggtattcacggaggagaaccgcaacaagagcaaccgcctgccgctgcaatatttgcagggcaagcggcgggaggattttaccgtctgggtggagagcagcatccgcgatttcaggaaaaagcagcgactgctgaaggagacgattaccgctgaggacgaaaagaagttcaaggaacggaatttgcaggacaccaaaaccatgtcccgcttcctattgaactatatcagcgaccatctggaatttgccgattttgccagcgggcgaaagaagcatgtgacggctgtcaacggcgctgttacctcctatatgcgcaagcgctggggcattaccaagatccgtgaaaacggggatctgcaccacgcggtagatgcacttgtggtcgcctgtacaacagacggaatgatccagcaggtgagccgttatgccgcgctgcgggaatgtgagtatgtacagacagaggcgggcagcatggcggtttctcagcacaccggcgaagtgctgaggcagttcccctatccctggccggagttccgccgggagctggaggcccgtctgggcgatgacccccgccgcgctgtgatctcccagcgattccctgtgtacgccaacggtgacattccggtgcggaagctctttgtgtcccgtatgccccgccggaaggtgacgggcgcggcccataaggagaccatcaaaagcccgaaagcactggacagtggcaacgttgtcgtgaagcgcgcgttgaccgacctgaagctcgaccccaagaccggcgagatcgccaactactatatgccgcagagcgaccgcctgctctatgaggcgctgaaggaggagctgaaaaagcacggcggcaacggggccaaggcctttgacgagttggatcgtccgccatccgggagatacgcgtctatgagggaaactgcatggagatcgactatctgtttccggaggactatcgggcgctgctggaggggtgatgatatctcaaatgcgttgttaccctgaacgacatggatgtcggtattgaaaacggcattaagaccgtgcatcttcatcattaaacacgttcagttctcccatgtacctggcttccacggtttgttccggccacagtagtggatgatcgccgaccactgccgcacgttctccggcgtcatgccgtccccgttgtgccggtggagggcaaacagcttctccgtcatgttgcagcggataggatccagcggcaaaatgcgctgaccgtacagagcgctgatgatgtcctgatccggcagcatgagccgcccctcgtgggcgataagatgaatgtcgccgcgtttgatgtggcgggcatcttttttagagcgaagtacagatcatatcacataatcatacccgtcagggtcactgtgcatcagatccgcaagcgtgatattctcaaaatattccgtaatgagcttatccagtccccgccacatggggagcgtgcgacattcagcggagcggggacaaacatcagcgccgggatcaaggcaggaaacaggagccatagaatcttctgtgacgcgcagaatgttttccacagtgtactgctcaggcgcttttgccaactgatatccgccgcccttcccccttacgccggtcagcagctttgcctttaccagcagcttgataatgttctctaaatatttttcagatatctcctgccgctgcgcaatgatcttcagcggaataaaaccgtccgactggtgctcggccagatcaatcataacgcgaagcgcatagcgtcccttggtggaaaccagcatacgatccctcctgttccagtataaacccattatacaacatggttaataggaaaacaatcctattattttagaaaaagctattgacaaaccaacaggcacggcatataatcctaa

SEQ ID NO: 2784 - DNA, 4560 bp, synthetic construct
  misc_feature 1..4560: note = Synthetic
  source 1..4560: mol_type = other DNA
cccccgggcctgcgtgccgggcatttttccccttcggcacgcataggctggacaccagaaaggacggggatcgtatgaaagagaaacgggtgcggatattcctgctgcaccggcgggtgctggcggtgctgtgtacgctggcggtggcggcgggcattttctatgtaacgctgtatcccgcctcccgcacggcggcggccgcccagcggcagctgcctatctattcggtggagcggaaggagaagctgtgcagcatctccttcgacgccgcgtggggcaacgaggatacccagcatttgatcgacattctggcgaagtataacgtgaagactacttttttcgtggtgggggactgggtggataagtatccggaatcggtgaaagcgctccacgacgcgggccatgaggtcatgagccattctgaccaccacgaccactataacagtctcagtacctcacagatcgtggcggatattcagaccagctgcgacaagatcgaggctgtcaccggcagctgtcccacgctgatccgctgtccctacggcgaatatgatgaccatgtgatctccgccgtccgctcgctgggcatggaacccatccagtgggatgtggactctctggactggaaggactatgatgcggacaccatctatcaaagggtgacgtccagggtgcagccggggagtatcgtgctgttccataatgcggcgcttcacacgccggaggcgctgccgcggatcctggaatacctcatcaacgacggctataccgtgctgcccatcagccagctgatcctgacgggggactacaccatcgaccacacgggacggcagtttgcggcggagacggtgtccgcagaatagacagaaaaatatacagagcacttgcaatttgctgaaattcgtgctatattagtcatagttctttataccataccaagaactatgcaggttactatgataaggtagtacaccgcagagctctaacgcctcgcgtaagcggggcgttatctctatccgggagtatgaggaggacatgctatgtatccatacgccatcggttttgacattggtatcgcatcggtaggctgggcggtcgtcgctctggatggagaggacaggcctttcggcatcatcaacatgggctcccgcgtttttgacgccgccgagcagcccaaaacgggcgattctctggcggcaccccggcgtgaggcgagaagtgcgcgccgccgcctgcgccggcaccagcaccgcttggaacgcatccgccgccttttggcagcggaaaaggtagtatctcaagcggagctggatacccttttcgagggaaaactggaggatatttacgcgctgcgcgtcgaggcgttggatgccccagtgtccaacaccggatttgcccgtatccttctgcatatcgcgcagcggcggggtttcaagtccaaccgcaagtccggcacatcgaaggaggacggcgagctgcttgccgccgtaacggccaaccgtgcgctcatgtccgaaaagggctaccgcacggtgggggaaatgctgctgaaagatccacaatacagcggaaataagcgcaataagggcggcaaataccttgcgacgggacatggtggaggaagaggtccgcgccatctttaaggcccagcgtgagcgggggcagccctttgcggcggcagagctggaggagcagtatctggaaatacttctgagtcagcgctcctttgacgaaggccccggacagggcagcccctatggcggaagccagatcgagaagatgatcggcaagtgcacgttggagacgggagagccgcgcgcagcaaaggcaagctattcctttgagtattttacgctgctccagaatgtcaaccacctgcggctgatgtccggcggtgaaagcagcccgctttccagcgcacagcgggagacgcttatcgcactggcacacaagacgaaggatctgaatttctcccgtattcgcaaggaactggggatctccgcgggtacgacctttaatgcggtgttctataagaacgcggaggactatgaggaggcggaaaagaaaacaaagttctgctatctcagagcctatcaccaaatgcgggcggctttcaacaagcttgccaaaaaccatttcgatggcttgtcccgtcagcagaagaatgagctgggacgcgttctctccacttataagacttccgccaacatccgtccccgcctggctgcggcagggttgtcggagatagagatcgacattgccgagacgatgagcttcagcaaattcggccacctttccgtaaaggcctgcgataagctgatccctttcctggaaaaggggatgaaatacgatgaagcctgcgccgccgcaggatatgatttcaacgggcatgacggtgaaacgcggacgcgccttctccaccctgcggaggatgatttcgcggatgtgacaagccctgttgtgcggcgtgcgatctcgcaaacggtgaaagtccttaacgccattatccgggaacgcggcggaagtccgacctttatcaacatcgagctggcgcgggagatggcccgcgattttgcggagcgcagcaagatgaaaaaggatatggatgaaaaccgcgcccgcaacgagcggatcatggagcgcatccgcacggaatacggcaaggaacgccccacgggacaggatctggtgaaatttaagctgtgggaggagcagcacggcgagtgcgcgtattcccaaaagcatatctccattgaacggctctttgagccggggtatgtggaggtggatcatatcatcccgtacagcatctcctttgacgacggctataaaaacaaggtgctggtattcacgggggagaaccgcaacaagagcaaccgcctgccgctgcaatatttgcagggcaagcggcgggagggttttaccgtctgggtggagagcagcatccgcgatttcaggaaaaagcagcgactgctgaaggagacgattaccgctgaggacgaaaagaagttcaaggaacggaatttgcaggacaccaaaaccatgtcccgcttcctattgaactatatcagcgaccatctggaatttgccgattttgccagcgggcgaaagaagcatgtgacggctgtcaacggcgctgttacctcctatatgcgcaagcgctggggcattaccaagatccgtgaaaacggggatctgcaccacgcggtagatgcacttgtggtcgcctgtacaacagacggaatgatccagcaggtgagccgttatgccgcgctgcgggaatgtgagtatgtacagacagaggcgggcagcatggcggtttctcagcacaccggcgaagtgctgaggcagttcccctatccctggccggagttccgccgggagctggaggcccgtctgggcgatgacccccgccgcgctgtgatctcccagcgattccctgtgtacgccaacggtgacattccggtgcggaagctctttgtgtcccgtatgccccgccggaaggtgacgggcgcggcgcataaggagaccatcaaaagcccgaaagcactggacagtggcaacgttgtcgtgaagcgcgcgttgaccgacctgaagctcgaccccaagaccggcgagatcgccaactactatatgccgcagagcgaccgcctgctctatgaggcgctgaaggaggagctgaaaaagcacggcggcaacggggccaaggcctttactgcgcccttccataagccgaaaagcgacggtacgcccggccctgtcgtcaataaggtcaagctgtgtgagcctacgacgctgaacgtccccgttctgaagggagccggtgtggcggacaacgacagcatggtgcgtatcgacgtgttccatgtggaaaacgatggctattacttcgtgcccatctatattgccgacacgctgaaaaaggagctgcccaacaaggcgtgtgtggcgtataagccctatgaacaatggaaggagatggccgacaaggactttatcttttccttgtaccccaacgacttgctccgtgtgacccacaaaacaaagctgaagctgacaaaggcgcagaaggaaagcacactccccgatacttatgaaacgaagcgggaaatgctgtactatatcagcgcgaatatccatactgccgcaatcggctgccggaaccatgacaacacctatgagatcggcggtatggggatcaaaaccctggagaagttggaaaagtttaccgtggatgtgttgggcgaataccacaaggtcgagaaagagccgcgcatggcgttttgcagaaagtgaggtttgagtatggcttttcggaatattatcgttgagagtcccgccgctctctccttgcggagagagcagctgatcatccgcacggacagtgaacactctgtgcccattgaggatatttctgcgcttttattggaaagccgccagaccacgatcacaacagccgcgctgtcccgtttgggacagcgcggctgcgccgtttttacctgcgatgaaaagcatctgccctgcgcggtcctgacgccgtatcagcagcatagccgggga

SEQ ID NO: 2785 - DNA, 3169 bp, synthetic construct
  source 1..3169: mol_type = other DNA
  misc_feature 1..3169: note = Synthetic
tgcggtttgagattaacggatgagcgggcttgtcagtttgtccagaaacgggcgcatcgggcgacacggctttgccggtcttgattctcctttacggcattggagccggatgatggatacaacgattttgaggaactatttttaaactgggagtttttttacatagctggtgtggtatagttgagggagaagattcaatgaagaagaataggccttcgggtgaagaaaaagccgaaatatgatacaataatcgtaatattctttactttttgtggtaagtgcgctataatatcatcggttgtaccaaaccaatgatcagtgggttactatgataaggtaacacaccgaggagttctaacgccttgccatttggcaaggcgttatctctttatagggagaaaatatggaggaaggcgggaaggttatgaaatatggcattggactggacattggtatcggatctgtggggtgggccgtactggctctggatcatgaagaaaatccctggggcatcattgatttgggcagccggatctttgatgtggcagaacagcctaaaacaggggcttcactagctcttcccagaagagaggccagaagtatgcgtcgccgtctgcgtcggcgcagacatcgtttggaacggatacggaatctttttattaacggtggactgttgacggaagaacaactggagcatctgtatgacggaaatctgaaagatgtatatggccttcgtgtcaaagcactggacgcccggctgacagatgaagagttggcacgggtcctgctgcatctggcccatcggaggggatttaaaagcaatcggaaagcagaatctctaagtacagaggcaggagaattgaagaaagccatcagtctgaatcaaaagactatggaagaaaaccaatatcggacgataggggaaatgttctttaaagattctcgctatgcagaatacaagcggaaccggggcggaaattatcttaatacggtggaccggagcatggtggaagcggaagcctgtaaaatactggaaacccaggaaaagcttggaaacagcaaactgacaaaggcattccaggatacttatctttccatcctgctgagccagagacagtttgatgaagggcctgggggaaagagccattacgggggaaatcagatcctgaacaaggtggggaactgtacttttgaggatggatcccatggagaacctgccgaaaagagagcgtccaaagtttgttattcttttgaatactttaatctcctgcagaaagtgaaccatttgcggctaacctctgcaaaagataatcgaggattggacaaaggagaacgggaaaaggtcattgcgctggcaaaagacaaagcggatctgcgttttgaaaaaatccgggaaaccctgcagatttctccggaatatcgatttcagggcgtttcttacagcaccaaagaatctcgtgaggatatcgagaaaaagataagtttaattcctgccattctatcatcagatgcggaaaatcttaaaatcaaaggcaaaaatcgatatcagagaatattctttggacaagttggacaaataggtcaaatccttgccttctataagggggacgataccagacggaaagaactggcgggactggaaattgctccgaaagccgtagaagccctgttggaactgaatggggccagtaagttctcccatttgtcattgaaagccattcggaagattactccttttctggagcagggcatgacctatgataaggcatgcgaggcagctggatatgattttcgggctcatcaggaggacaagtcctttttacttccagccaatgcatcggaactggaagatattaccaatccagtggtacgacgtgccatcggccagactatcaaagtagtcaatgccattatccggaagcagggttccagtcccttgtatgttaatgtggagctagctcgggaaatggccaaagattttcaggaacggaagaaaatcaaagatgataatgaagccaatcaaagccaaaatgacaagttgatgcaggaaattaaagagaattatcaaagattgaatccctcaggcatggatcttatgaaatggaaattatggaaggaacaggatggtaagagtccctattctcaaaaatccatagcgacagagcggctgtttgaaaccgggtatgtggatatcgatcatatagttccctacagcatcagctttgatgacagttttaaaaacaaagtattggtgttttcctgggaaaaccgggataagggaaatcatttgccctatcaatatcttctgcagaagtatggacaggatgcagtagatcggttcaaggtatgggttggcaacaatgtccgggattatcggaaacggcagagacttttgaaagaaaaaatgacggaagaagaaatatccgggtttaaagaacggaatctgaatgataccaaatacatttcccggttcatgtataatttcatccgggatcatctggaattcgctccttctgaaacagggaaaaagaaacgggtattggccgttaatgggatgattacttcctatctgcggaaacgctggggtatccgtaaaagtcgggccaatggggacaaacaccatgctgtggatgctgtagtcattgcctgtactacggataagatgatccgtgacttgactctgtattcggaagaacgggaaagtaagtatgatgtggatgagagaggaagccgcctggtaaatgagtcaaccggagaaactcctcgaagaattccgtcccttgggacggattccgacaggaactggaagcccgttgttctgaacacccgggccggggattggctggtttgaccttttatatgaataaagatttaaaatgacatcaaaccgatttttgtttcccggatgccgcggagaaaggtgactggagctgcgcataaagatactgtccgcagtgccagacatattgcagacggaattacggtttcaaaaagtttcgctggccagtttgaaaaatgggaaaggatggagaaattgccgattattataacccagacagtgaccgattgttgtatgaggcattgaaaaaaacggttaaaagattttgacggagacggaaagaaagcttttaaatgaaccattttataagcctaaaagcagatggatctc

SEQ ID NO: 2786 - DNA, 23609 bp, synthetic construct
  misc_feature 1..23609: note = Synthetic
  source 1..23609: mol_type = other DNA
aaacaatttatgcacgctttttggggagtaggacagatgagctttgtcaaacacgctatttttgtcggcgaagatgcaccccttcttgaagatcaccacgccattactcgctacatactcaatcgtctaagagtggaaaatattttgattacacaaggcattatcgatgcacttgatcactctagcaacgaaacgcttgtgggaggcaaattgggcattgatgctacccatgaaccgctcaatgaaaaagaccctcattatgtgggacttgatgatatgatacttttggcaaaaatgagagtcctagatggctctattgtagccctcaaacaatacatgaccgacacgttcaaccctattaccgtcatagcagtagagaaaaaatcctctcaaaaagaactcattgccaaactccaaccgctctcgcactctatcaaaattcttgttatcgttgatgctcataccaacttggttgaaaatgactatatgttggtatggcgtgttgcaaacaatattgatgcttcacgcgatatttactttcacccctttattgccattgatgcaaccaataaaagcgaagttgatggattctatcgagagtggcccaaagatactctatgcgacaaagatacgcttgatagacttcaagcaaaagggcttattgatattaacgaggcgtttattaaccgttttggattactatgaacaatatcctctttgccaaaaccattattgcactttgcgttgtggtttttatctatattttttggcaaagcgttacggtctctagcaaacgtcaaattggcacagaggatggtatctataccaatagagtctccacctcctcacaagagctacaccaacttacctacaaactaacggctcattgcaatacccatcgatgcaaagtccaatctttacttgattatgttacgcacattccctacaaaatcaatgcttttcataccaatttcccacaagacaccctcaatctaggctacggcgattgcgacgataagagcaatttgcttatctctatgttgcgtattgttgggattgaagcctattttgtattggtacccaaacatatctttattatcgtatcgcttgaaaagatagactacgcaaaagccctctatattgatgccaaaccctactatattttagagactaccgctaaaaattcccttatcgggtttcccttacgctatccattaaaagatattaaagccattatcgatccctttgccaatgaaaaaattgcctatcgcacattggagtatcaatagtttgatggtaaaaatatcccatcaacaacaaaagcttgtctctgcttttttaaaaaaatagagacaaaccttacattttaatgtcataatttttaagtatatgcatgaagtggttcgttgtaataggagtatataagttgtaaactattactttttgcaaggagtcttgtaagtgattgtaacgattggttggagataaatttttgtgaaagcccgtatttcagggatggtgcggatgagaggactcgaacctccacaccgttaggcaccagatcctaagtctggcgtgtctaccaatttcaccacatccgcataattcataaagtggtacgtccaaaaggattcgaacctttgaccgctcgcttagaaggcgagtgctctatccagctgagctatggacgctcaaaacctagctataagagagtttttcttttggtacgccagagaggactcgaacccctaaccctcagatccgaagtctgatgctctatccaattgagccactagcgctttaaccgctattgtaaatggggtgaccgacggggctcgaacccgcgacaactggtgccacaaaccagagctctaccgactgagctacggtcaccactcaatatttttccaattaaaacatctattatatttaacgcttttataaatggtcggagtgaaaggattcgaaccttcgaccccctgctcccaaagcaggtgcgctaccaaactgcgctacactccgtaaatacattataaaagggagtgtaagtatagtcaaaaaagaaacaaatgtcaagagttttattaactattgagtcgatttcttactttttaacgaaacatacgataaaatataggatattttaaaatttcaaggagtgttgtacgcaatggagtttattaaccacctatttcaaaatgttacaagtttttttgaacaaattttgttttttgacgttctttttggaagcgttgaaggcagcagtgtaccttttttggtagcgtggttggttttgggcggtatctaccttaccgtcaaaatgaactttgtgaatctaagaatgctaggacactccatcaagattattcaaggcaaataccatactaaaaacgacaaaggtcacattaccccttttcaatcgcttaccacggctctttcggcaaccgttggattgggcaacatcgcaggagtcgccatagctgtctctatcgggggtcctggggctactttttggatgattgtggcaggttttttgggcatgagtctcaaatttaccgaagtgaccctttcgttgcactaccgtgagtttctcaaagatgggacgattatgggagggggcatggagtatctctccaagggcttagcctccaaaggatggataaaaagcggaagagttttggctactgtttttgcggtttttatggtaggtgcggctattggtgggggcaatacctttcaagtttcacaagcccttagtgccattggtcaagaggtaccatttatccaagagcatacgattgtttttggtgtcctattggctatcgtgacaggattggtgattgtggggggtattactcgtattgcccattttacccaaaccgttgtgccgcttatggtagctatctatgtgggagcatcactatggattatccttttgcatattacagctttgccccatgcttttggattgatttttacagaggctttcgctcctagtgcggtagcgggtggaatagtgggcgtgattgtccaaggatttcaaagagctgccttttcaagcgaagcgggattgggttcggctcctattgcgcactctccctcacgtgtcaaatatcctgtacaacaaggattagtagccctttacgagccttttattgatacggttattatttgtacgatgacggcgttggtaattattctcacgggcgtttacgaccctgccaatggttatgccacacttatcgagagcaaacaaggggctgcattaacggcagtggcatacggttcagtcattagttggtttcctattattttatccatctccatttttctctttgctttttcgacgcttatagcatggttttattacggagagcgtgcatgggtctatctctttggtactaaaagctcggtttggtttaaagtgatttttttgagctttattgtaattgcttcagtggtgagtaccgatattatggtggattttagctctatgctctttttgtttatggcgttgcctaatattttgggtctttttatactttcaggagatgtcaaacgctaccttgatgagtatatccaaaagcttaaaagcggggaactcgacaaagaggttttggatcatcaacccaaacctcatcatcaccccaaaaatcaccaccatcataagcatcccaaaaaatagtcgtcaccagtactacttaaacgcctcaatatcactcctaagtgccaattcatggggataggggtgcaaaaatttttgtttggctagatactccaatctcaaagcgtttgatgtagagattaaacattttgataacggtaataagaggaataatcccctctttgtattcgtttatggcaaggagcaactcctctttttcgcccgttgtaatcgctttggagaagtagccaaagatgtgctggagaatattgtaagttttgcccttgttgcctttgatggcaatggcttctaggaatccgtgcttgtagagttctagcatttcactgagtgggcgtttttcgtggttggcgacgatagtacctagctctttgtatctattgtggcttttggcgtagatgaggtatttgtagcgtgtgtgaaattcgaccaaatcccccattttgggttgcgtttgaagaaaatcaaaccaatcttgataggcaaagatttgcataataaaattctctcgtagccacgggtcatgaagccgcccctcctcttcgataggcaaatagggataacgctcacgaaccgcttgtgcaaagagtcctactccttttttttcgctataagcgctatctttttgatagactttgacccgttcaataccgcaagtaggcgatttggatttgaaaacaaaaccgcaaagagactcattgcctacccttagtgcctctttttgggagatgtcgtagagtgttgttgtaatatcttgatgggttttgctaaattcgacgcatatagccccctctttgtcttcaaccaaacgcatggtatcacgaggagtgccaaaaacaatcgcctcggggcaaaaagagatgagattaaagtagcgtcccaactcctctcctacataatcattgtgtgcatgtcctccatcgtaacggcactgagtgcctaaaagacaactggatactcccaaattcataatgcgacctttttgatgctattttatactaaaatggtgattgtttgtactctcttaatgatattctataaataaaatacctcatccacaatgatgaacgcaacagaatctaccacacaatgggtgttttgcccaaacgttgcaacaatgcattggtttggctaaagtgacgacaacccaaaaatccacgataagccgaaaggggactagggtgaggagcagtgaggataaaatggtgcgttttgttaataaatgcacttttagctatggcgttgcttccccaaagcaaaaagataatattttcgcagtggttagagatgtgggttatgatattatcggtaaatatctcccagcctatgttgtggtgcgatttgggttgattggctttgacggttaaaatggtattgagcaacaaaacaccttgattggcccatggggttaaatctccattttgacagatagagacaatgcctaaatcgctctctatctctttgagaatattgaccattgaggggggattgggaatatctacaggggtggaaaatgccaatccttgtgcttgtccctcaccgtgataggggtcttgccccaaaatgactaccttaagagtctctaggggcgttttgctaaaggctgcaaatatcttctctttggggggatagatgcgggttgtttcgtattgatgctcaatggtacttttaagcttttgaaaatactcttgtgacttttgatgctctataatctctttccaactttgcattgtgactccatggtgtagtggaaattgtatcacgtttattctgatagagtctctcattatgaaatgaaaaattatatttttgcatagatatgttgtaattttatacaatcaaggtgcaaatcgtaggacaagtagtaggaagcgtggagcaattctaataataatctcaacaccaacccaatacactacgtccctttggtggtttgcaataatctatcagtcgtaagggttgctatcatggagacgataacgtaaatcataaaaaaatacaaccctacctctatttcggcgtgactggtgccatcgccactcgataaaaagacaagcaaagtagctaccacaaaaacatccgccatagaccatttgcccaaaagtttaaaaaagtgtacgactttgtgagcaaaagagctttggagaaagagtgagacaaatatcagcgagagatttttgagcagtggaaaaataatcgaaaagagcaacaaaaacccgcccacagcatactcgccactacccaaaagagtatcgagtgtgccgtatagactcttagattgagccgtgagggtaatatcgcccaaaatatcgacatttttgtagatactcatgatcataataggagcaaaaattcccacactcagagcaatcaacgcaataagcgtaatagaaaccgtaaaagccaccaaaccaatcaaaaaatagagcatcatcaccatcaagagtgtaaaaagaaaaaatagcgtatattgtatgcttttgtcgtggtaataggctttgatgtgcatcatctctttgtgtttttggactatctcatcgtacccatcgtagagaccgaagctaagaatctctccgacacgcttcatcttgatagaggtgagattatgaagcgtattctctttgacaatcaaaagggtaacctcttcgtattttttggagtagccataggctttgtaggcaaaaaaagaggctatgccaatcaacacaaaaagactcaaaagcacaataatttttttttgcaccatagaactccttgctctttgaggtcaattgcagcatatttaagccacaatttttacataatgttgttgagttcctcttcgggaatagccaaaagtcgtcgctccaatcgtcctatctcttcgagaagctctcgtgaaatcgcctccatatcgtcgtaaaactgtttggcatcggagtgttcttgggtggttaaatcttttttcttattgccaaaaacttttgccataaaacccttttgaggcttattgaaatagattttaaaaattttgagatagatatcgtgcagttcaaagtgaagcgtttcaattttggtcatgcaatcgagtgaattgttgggcatggcgttgagtttttgcccctctccgtagaaccatttaccaaatttgcactcggttgaatcgacgggtatagcatcctctttgataggcaaaccgctaataagcaatttggctttttgtacccatttgatatgcgcagcttttgctgctcgtaaatgctctaaaactaccaccttattcattgtatgctccttggcttatattctacaattataaccacttatagataataaatatcctaacccgtggtaggttttgtaataaaaattttaactcactataacaaagagttgatataatagcgactgataaatttcgtaatctttacaaatttttttagttcataacataaatttaaatcaggaattttttttgagaaaactatttaaaaaaagagcgaccaacaaaagcatcaatcaatttattgagaagtataggattcccaaagagtatctctccatcaaccgaaaagccattacaagaggggttggattgggactctttattgctttgattcctatgccttttcagatgtttgcagtattagcactcactccatttatacgatttaatgtccctattggtatagcaatggtatggctaaccaatcctatcactatgcctccattgtactatgtagagtatcaaacaggactctattttctcaatcaacctcccttgcccaatatcgaactcacgcttgattggtttcaaaacaatatcgatgcgattgtcgtaccgctctatttgggaacttttttttacagtgtttcggtttcgcttatagcgtttttgttgattaatattttatggattcgctctatccatgagtacaaaagattacgaaaagtaagaaaatggattggagttgccaaacgttacaagaagtttacattgcacagagatgagattgtccatctacgctaccaacacaaatctctgctcgattttagcctccttgatggtgcgatggataaagtacgaaacaaagtcaaatacaacaaaaagtttgtcaatctagcccatcaataccgaaacaaaaagatatttgtccaaagccatctcaaagatattgggttgccaaacttcaaaaatcctcttgccaaaaaacatcaagaggataagagagaaaagtaattaagatgcaagtttttaaacttgcatacgtcaaaaatctactcaaccacaggaattaaaatcattgtttcaagcttatcttgtgcgacttcattgggatcattgagataaaattcaattgattcgttaccaagcttgatttggttttgctgtgcgtgtgcatagatctctttgtagcgtttatctactttgtgatacgctccatagtgcatcgctttgagatatttttgtttggcaataaaatcggcttttagattatctttatcttccaattttttgggcgttgggattcctacgaagaagtgccactttctaaataccaaatcaaagagtttgcaaattgcccactttttcatctctttttcccagtcaaaatcaacgtatcttgcgtagggagtttggattggttctacactgttatcttcaaagtactccattatagccgtgtagtctttggggaaaattttcatcattctccacagacacgctttctcttcgatttcaactacactaccaatctctttttcgacaacttcaattgcattattcatatttaacctcctaaattttaaggaaattttatcctacaagagttacgttttagtgattttttgagctaccaagagtgtcgaaatgcccattgaaaaggatttgacatacctcatctcaaatcctgcctttttaagctcatcttcaagcatttgagtcgtcaaaaactcctcaatcgaatcgggcagatatttataggcggcgtagtttttggagacccatcctccgatagtagggagtacctttttcatataaaaatcggttacttttgaaacaaacccgcccttttgctgtttggtaaactccaatatcaccaccattccattatcttttaagacacgattaaactcttggagtgcttcgactctatcaacgacgttgcgaataccgtacgagatggagataatatccgtggagttgtcatcaatgggtagctcttgggctttggcttgaataaactgtgcaaaaccaaccttctctttggcaacattgagcattccttgcgatgggtcaatgccgataaatttatcaacttttatgccgtgttttttggctcttgcatcccaatagagcaataaatcccccgtaccgcacgccacatcgacaatccgcccaatctcttgtttgcccagtagctcatacgccttatcgcacccctttttacgccactgcttgtcaattccaaagctaagtacccgattggccaaatcgtatgtagaggcgatattatcaaacatctctacaattttttcttgtttttgatttgtgttgttcacaagacttctccaaaattctattgcaaaagagtagcataaatagttgaaaatctagccatatcatcaaatataactctcccaaaagctaaataccaccaaaaattgatataataaacgcaaaaaacaaggagttaaaagtatgaaatttgtatcgatagtcattggcagtaagagcgattatgaagtgatgaaggagtgtgctagtacactcaaaaaatttggagttccttacgagcttatcatttcatcggctcatagaagccctgagcgaaccaaaaactacatcaaagaggcagaaaaaaaaggtgcacaagtctttatagcagcagcaggtatggcagcacaccttgcgggagccttggcggctagtacgattcgacctatcattggagtgcctattgccagtggagagcttagaggacaagatgcactccttagtaccgtcatgatgccagcgggtatgcctgtaggcacagtagccattggcacggcaggagctatcaactcagcctatatggcaatccaaatcatggcacttgatgacgatgagttgcgtgtcaaacttcaagaagatagaatctcaaaagccaaaaaagtagagcttgattcaagcgaaattgaaacgttgctgtaaattcaataaaattttcgtctccaaagctcatttggaggcaacaaacaactccttgttatcactccaacctcaaaactcattggcttatgttttcaacctatttatgataaaataaataactttaagcaaaaggtagttggatgttgagtggcaatcatagaaaagtattgggtttggacataggagcaaacagtatcgggtttgcgttgctaaaacttgatgagcaaaagggtgaaacgctctttgaagagttggcaagtaatagtattgtgttttctagtcccaatggagcagaggatagacgcaaggcacgaggtaacagacgcatacatgaacgcaaaagtttacgcaatcgcaacagtagaaaaatatttgttcgatacggtttggctcaacaagcgtttatagacaatacaacgcaatatcttaatgattttaaaatgaaagatagagatgtttactctattcgccaaagagctatagagggcgagatgctcactcaagaggagtttgtactagcaacctattcaatacttaccgatagaggctatagcaatatgtttgctcctatcaagaaggatacaaaagagaaggaagaagaaaacgaagagggtgttatcaatgaagcggttaatcacaacgcaatgctctacaaacaagcggaatatcccctcccttccatggtacttactcaaaaacgacaaacgttgcaaaatgcgtttcaaaatgtagctgttcgcaataaaaaagaagattatagcaactctttggggcgtgaaatgcacaaagaggagtttaaagccgtagtagtctcgcaatcaaaaaacaaaaatctattttgtaatgaagaggagtgtttagcttttgttgatgagatactcgatgaagagactcccaatagagccttttttcaacgtccgcttaaaagctttgacaatatggtggagtattgtgccttttacgatgcctttaaccccaaaggctcacacaagcgaatgccactggctaatattgccaatattgagctgactttacgtcaaagcattgataattatgaagctatccatagcaaaacgggtgagattaggatttttagcgatgaggagaagcaaaaaattgtcgatttttggatcgagactcccgatgctgatgagattaaatccaataatatttacaaaaacgcagggtttaaagatattgttatacatctagcagaaacaaaagagtttcgtgtgcttaatatcaaagcccatagagcattgttggaggtgcttcgtgcctacagtgttgattttagaaacaaagataatgcattttacaatgaattgcttttggtactctactactacaaaaacagctcttctcgtatcaaatacatcgaggagttgatagcaaaatatgtaatggctatcgatggggcgtttgtcaaggagtgtgccaatctcaaaaatatggacggttttggctcgttttcgctcaaatttgccaatgaggtgttggagctaatgcaaaaaggggtgatacactccaaagcattggaagagttgggctacaaaagtaaatatttaaatatgccaacctatagctatttgcctcctcttgaaccaaccccaaaagatagagagtggctacaaagcaacctcccttattttcaaacccaacatctcttctatcaacccaaaatctcacccaaagtcaaacgagttattggagtattgcgaaagcttgtcaatgaattgatagccaaatacggtgcgattgatgagatacgcatagagaccgcaagagagctaaactctcaaactgaagagaaagctatcgaagagaaccaaaagaaaaacgatacacaaaacagagaagctcaaaagtttttaaaagacaaaaatttagcccaaagtcctaaaaatttagagagagtcaagctttggaaagagcaagggggcttttgtctctacagtggagaggagattgtcgaagaggagatgttggatgaaaatcaaaccgaagtggaacacttcatccctcgttcggttatttggataaactccttcaaaaataaaattttggtcaaaaagaagtacaatcaaaacaaaggttcgcaaaatcctattacctaccttaaatcaaaaggagagtgggaaaacttcaaggggcgtatcaagcttgaccccaaaagtccaaaatacaagtggctaacccatgaggagcatatcgagaatgtcatgcaaaaagagcattggcaagagagctatctaaacgatacccgtaccgctaccaaaaccatcgcaaaatatctcaatcactatctctaccccaatcaaaacctctacggcaaaggcgaaaagcgatatatcgcaagtgtcacaggcaaggcgataggggagctaaagcatatttgggggattcataaggtcatgcccaaagatgaaaacgacaaaaaagatagagatacccaataccaccatacgcttgatgcttttgcgattgctttgtgttccaatggggctatgaaaacacttaatgactctttcaaacaaaacgagaaccatttccaaaccaaagcccaaaaagccaagctaaaagagggcgtaccaaccacaaccgatggggtgagtatcgtagagtatcttaaaagtatcgtagagaagtacgaaacccatcaacgccttgtatgcccctacaacaaacgcaaaaccaacatgaaaggcttcaaagatggtaatctaaagctctatatcacccaagaccccaaagataagaacaaagagatacttgcagagatggaaaaagtagcgattgatagctctttgctaatcaaaaaagtcaatggatttgacaagccccgaagtgatgatgaggtcaaaaaagtgatacaatctatccaatcacgcctcaatccacaaaaacaagcaaatatcattgaagcgatagagatttatgccaataggcttttggagttgcgaaagggtattgatgctttggacttagagattaaaaccgagcaaaagaggctcaaaacaggcaaacagcacaaagaggataatgatagcatcaaaaagcaaactatcgcaccgcttcaagctcaaaaaaaggagctaagccttgaaatgcaaaatctaaaatgcagttttgcaacccaaaaaggcaaaaggcaaatcgtgcgaaagctcaatctctatcgagaaaaaatcgaaaagagttcagccgatagcattatctttacccaacgaaaagagcgaactattgaacgtctctctgtagataatttccgtgaagctttagagaataaagagccttttgttatcaaggagaataaaaatatattttgcgtcgagctttacgctcatcccaagcaaaatcaagtcgtaggtctcaaatactttagctccttagccaatctccatatcaagacaaaaattaatgaaaaatatggagattactttgaagataaaaagcccatgcttacactctacaaaaatgatattatcaaagtcttttataccaaagaggctagagcggagtattatgtttttaatggtggaggagatatgacagggactaacaataaagtatcaattaaaaagataaaccaccgtacatttacagctacaaataaaaaaggagtggtagaagtctccaaagagggggctattactcccaatagcacaaccgttgtatcaaaagtcacaatagatttttttggaaatattgaggaggttaagcaaaatgcaaagtcaacttggttataatattagggtatcaaatggggatttgatagctttggttaaagcaagaggcactttcccgagcctcacaagttttatacttaaatcgggattctcttatgtttaagcaaattttcattgtcaatcgagcctatttaagctaccgtaataattccatgattgtcaaaaacgatgcaggtgctacgcctatttgtcttgatgatattgatattgtcattatcgaaaaccaacaaactactctaacttcctcgctcctttcgcatttggctcttgctaatattgtggtgatttttgtagatgagcgacatatcccctctgctctatctctaggactctacaaaaacagtcgcaccgcaaaaatacaacgcagtcaaatcaacctatccaaacccaaatataacttgtagatgagttgttccacgattgattaacaacttgtgtaccgcttgaattagctacttgcagtgttattgttgatagagctttattgtctgatgcattaaggtatgcaccaatagaacttgtaccctctttgattgaaacacctgataaatatgaaacagaagctgttggtttggtggtgtcgccagatgctgatgctgtaacagtaaatggattatatcctagttcgctccaattcgtaccatctttggaaaccttaactatagcataataacttccagcatttgatgtattggtttgaataaaatcagaagaccatgttgaatttgcattaattgttacattatcaaaaattttcatatctttgacatattttttagcagaatcatgaatagacaaagcaatttttttataagtaattgctgttgaaccattattcactaacttaaattgggcatcaaatccatttgttgtattagcataaattggtgctgttttaatccaaaaatctttgagtgcaataccttgaatatgaataaaattatctattgctgtaatttttatatttcttgtagtgtatttatgatcatagtttttattatattctgaaatagttactgtaccatcattgttgacagattctacatatgcaacatgcattgtttcccaaacagcaatatcaccaacttttggagttttatctacactaagacctatggacttagcagcattatcccaattgttagcattaccaaaatgagtcgccttccaaacaccattgacttctgtacctgaatttaaaaatttaatgccattttgtgtaattttccatgcaacatacgaagtacattcgcatttataaaaattaaacttatcagctatatagactttattatctgggagaccgctagtttttccagggggacatccctccatctctgattcatatgtagcatttgccaacaaaccaactgttaaagctaaaaatataagtagctttttcatcatttttcctttatgtattttttgcaacattataaatgttgttttcatttgttagaaacttcgttgctgtttaaggtaacaataatcaagtttcaagtttttaataccatttgtttagaatttgctctctgttcctctcaatttgccccccccatttttctaattttaatttaacttttcctcattaagaaatcatagacaatttcaaatgtaaaccacttgcagtcaatcatgacttcatagcaacatttaaaactcttttcactcatttcctcattgatttaagatacttaaattttaagataataaaaatttagagattgttaaaatatatcctgtagtaaggttctagttaggttagtaaggttattgttagtattttaaaaatagatttttgttaaaatacatttataaaaacatattgtgggagccaaggatgaacgatgagagaaaaaaagccaacgaaaaagacaagatacgatctcgaaagtttgaatacattattaccaatcatataggttctatagatgccataaaagataaatttggtttcaaaaacaaatcaaaacttagctcttttcgcaatccagaatcttccgatcagctcacatctttgcatttgttgggactgcaggagtatttcaaaatccctgttgatgtttttgatccatcaatcccttacgattgcgatacaatagatgccaaaatagaagcataccaaaaacaattagaacaacaaaccaaagagcttaaattcttagagagtctcaaaaatcacaatcttattccgccaacactctacgatgatgatgtccaaacgcaatcacagattgatacgattgtcaaagagtacaaacaacaatacgccaatcaagcgtcaatgggtatttttgaaaaaaaaaatgacgagcttttgaaaaatcttctaggcacatggtatgcctatatgtatccaagttgccttactggaatatggacagaagatgggattagcatgacgaagacagaaatttatgaagatggtagcgtgatagatgagtataacaataaagggatactcaaaataggtcatgaacaaagctttatcatcaaagaatccaaaaatgctaaaaatctcaacattatacgctttaacaatcatcacgtaatctatcgtagtacatttcgtattctcatcttctccaatcaaaacggcaagcgggatgaggagatggtgaattatggtttctactctcgcaaggcgtacaagcccgatgaagccaaagcgatattgggtgatattgacaaagtccaactcaaacttgacaaggagtttgctacgagagtcaatgagagctaacttagactaagcaaccaccccacaatgtatcatctcccatccactaaagacgagtacaattcccttttgtgttccttggggggtatattgggtgagttgtttttgggcttgtgatatttgtctatcaagctcttcatggttaaatttgtttcgtgggatatatttgagctcgatgagtccctcgaatatatcatcatcaatattgggagcttttttgagatagatatcgacaaatcctttgtttctctcctcttctgtgagtactccatagtaggggcttagacccaaataggctatcaaaaatcctttgataaagctctcacctgtgataaagtctcgcactttggagcgttcttttatctcatgggcaaggtaatgaaaaagatggagtgaaccatcgtaagcaaaggcatggatagctttttgaaagcgtgttaaatcaatatcaaatatctcactctcttgcaatgctttttggatatactctcccatgatgcgttggatggtttggtttgggattttgagataatactctcctcgatagaacgtatcaatggtaataagtcctaagtagtagagcagtgagacaaagttatgtgcatctttgagttcaaaggcagagaagctatctttaatttcaagcgtagtgatgtagcctttgccaaagagttcttgaagcagtgagaagtttccgttgagtttgttgttggtatagactaaatatcgaagctttgagtaatcggtacggacatttaaatcgaccatattttcaggagctttgtgggcaaggaagagactcttgagatagtagagtatcatatcggtattgtagatagtatgctgagcatctttgctaaatctatagtgattgtaccaatcgtcaatatcaagtctctcctctatttgatagtattgggtgagtttactaaactcctctttggtaatacctacagcatcgttaaaagcgtaatcattggtgatgttcgtgccaatattgctaccactggtgacatcgtacatcgctagagggcttacgcctgtaataaacatcttttttaaagcactgctattgtcgcttgtccctgctttaagaagcttaaaaaactctttgtatatcgcttcatctttgctgcttactagcttttgataatcatcggttgagtgcataagcaagttattgataaagttgtcgtattcgtctatcatgatgtagaggtttatgtttttttgttgggcaaaatcaaaaagatttttgagatttttgtgagccgaaagattttcattgatggttgtattgagttgatatttaatgataaattttttaatatcgctattgcaataatcgctaaagttttggtcaatatcgcctttggtactcactgctgaaaaatcaaacttcaagatatgatagctactcgcctcgggagtgggatggccaaagatgtaacaatcgtgaaaaaccgcttcaaactcatctttgtaaaaaatatcataatagagtgccaacatattcaaaaaaagagatttaccaaatcgccgtgggcgaatcaaaaacaaaaagggcggttgttgctctatttttgggataaagtaggtcttatcgacataataatagttttctaatttgactcttctaaaatcacttattccataaggtatcatcttttatcctttttggattgtattatagcatataccctattgaacaatctctatctttagaggtatccttcgatagtacgtgctagttggctagggagtagccccattgactcctctaccaaagtggtgtttccatgggtgataaaattatcttcgtactcaaagcttaccacttcaacccccttgatggcgtgttgatggatagcttctaggattgcactgcccactccgcctattttggcactgtcgctaaagataaaccactttgtgtatcgttggctaagcactttgagcagtgcaacatccaaaggcttcacaaaccgcaaatccacgatagcaggttcaaaattcaaatacccagcactgtttatcgctcgtcctacaccgttgccatagcctataagagccacctcgccattgccctcttgaagtatctgcccaacgcctagttcatacggaatcgagggtgcatcacttgccataaaagctcctctaggatagcgaatggcacaagggtgttggtaagcagcagcaaactccaaagccaatgcaaacgtcgtggggttgtagggagctagcaacgtcatattgggaataggacgcaaataggagatatcaaaagccccctgatgggtttcgccatcctctccgacaattcctgctctatcaatcgcaaaaacaacgggtaaatccatcaaacagacatcgtgaatgatttgatcaaatcctctttgcaaaaaagtggaatagatagcacaaaagggtttaaatccctcttttgccaacgcacccacagaggtgacggcgtgttgttcggcgatagcaacatcccaaaaacgccgtggaaagacctccatggggatattcatacccgtcccgctaggcatagcagccgtcacacctacaatcttctcgttggttttggcaagttctaagagtttgttgccaaagatagaggttgcagagggtttggaggagcttgtgttgcttttgccactggctctatcaaaaggactcactccgtgccaatgctctttttgcccttgggctatctcataccctttgcctttggtggtttgggtgtggacaatgacgggttttttgagatttttggcgatctttagagccttgataagtgcttcaaaatcgtgtccgtcgatagggccaatatactcaatccccaactcctcaaacaaaattccaggggtaataagcttgaaagactcctcaaagcgttttgccatataggtagcaccctcggggagatgctctaggagcttttcggttttgcgtttaagcttttgataaaagggcgatgccatgtgttgcgaaaggtagcgactaatagccccaatgggtttggcgatgctcatctcattatcattgaggataataacggcgggatattttctatcgcctagttcattgagcgcttcataaaccatccccgcactcattgagccatctccgataagtactacagggactctactatcgctttcatttttgagagcaatcgccttagcagcacctacagctaatgaaatcgaagtagaactatgccctgcaacatagtaatcgtaaggcgactctttgggtttggtataaccgctaatgcctccaaattgccgtaaagtatcaaaactctcccatctatcggtgagaagtttgtgagcataggattggtgagagacatcaaaaatgaaagggtcttgcgtacaatcaaaaacatagtgcatcgccacaatcaaatccgtcgcccccaaagtagagcttaaatgccccccattgtgactcacagtatccaaaattttattgcgaatctcttgggagagcttctctagttgctctatagtataatctttaatattcatactaactctctataatctttttttaatttgtataatattctagctaaatattggtttagagtttgtttttttgcctattttattatcttttgttattttcaatgggagtttatgcgaatatttggtcattttttactcgcaccatacgctctattgagcttcacaacctcaattaaacttcaagataccaacagtacattacgaagctggagctttgcaatgagtaaaaactttaaaaataaaatccaactaatttgctccgtatagtgcatcgcaccgctgataccgtcatcacgacggagtatgtctgttattcggtttatttttgattccaattaattatccttctttttctatttcattataatacattaagtacaaatcaattaatgaaagcattctaaaatagaaataattgatatgtttattagttaattcttttttgtctgtttcgtgatgtctaattctataactatttccaagatgagttaatgttttaaattcactatcaattaaatccttatcaaaattttctgaaattttagcaactattttttgagatgaaatttttttattatcttcactataatatatttttaatctctcaaatccatcccaaagcttttccaatccaatttgtttatcatttgacaaaaatctttttttactttcttcaatcaatacatttaattcaatatcttttgtattagctttattttcaaatagtaattcaatgtttacatttaaatctaatattgatgacaaattaaaacttgtttgataattaatagaatctttaataaatgtttcaaactccaattgtgcttctttataaaaagtatccacatctattctcattgcttcatattctgtaatcgaatttagttcttcaacatactttttaaaatattttttattaaataaaccattagataatagataatgtatatctttaatcgataactctttcaatctatcttctacccagattttccttgtttcattagagtatgtaaaattaaattttaatttttgaaaaaaatctgttaaataatatgatctcctatatggaaatttgctattatctccacatatcatttctgataactctttatcaaaatctaaattattttcacgagcttttaataacttttcaatttcaatattttcttttgttttttgctttctagtattgtatttaaaatacatatctcttagaatagttttaatttgatttaattttacttcattaatagtaaagtcaaattcaaaaagttcatcttcattaattttctccaatctaaatttatagtatccatctaagtttaataaaacttttttcttccatttataaaagctatcaatatccttatttttaactatttcatcaagttcaatatttacttctttaaaaaacaatgttttattattttcagccattttctattctccctaatcactcatcacatataaaaattataccatttttctttacatatctttaaacaaatcaaaaagtttggtatggatataaaatatctctttgcctatctttttgcttgataagatgcctatgttttccaactcattgggataatgagtcgctgttggtcttgaaactttcaaatgttcttcgataaaagctctcttggtgcgatgatgtttttggtttcgttcattagattttcaatatttttgatagtttgtatcgttttgaacaatatccacccatttagcccatcgttcaagctcacatattctagctaactattggtttagagtttgtttttttgcctattttattatcttttgttattttcaatgggagtttatgcgaatatttggttggttttttcgccgtcaagcattgtgactatattttcaaagaaatcaacattgaccttttttgttccacctcgggagagagtgtgaagtaactgcaaggtgtcaatctattgcaccctgcactattttaaccattactgtttcacaaactcgcagaggtagaacgagaaaaaagcatttaccatttagccttgcaatcatggtgtaccttattttgctatcagcgtatcgctcctgtgtgaggaatgtctattttgtattgggaaaatttggataaagcagactaaggcacagctataagctgggttctgtcttggatagttatttatctaggagctatgttgccatagccctcaagcgaagtactatagtgtgtgagacttttaccgtgtacttcttgctacagacagggtttacctagctacccgtgttaccacaggcactggtaggctcttactctaccgtttcacccttacctcgccctatctgttgccaaataaggagaggcggtttgctttctgttgcacttgccctcagattactctggccatcggttagatggagtcttgtctcacgtgtagcccagactttcctctcgcagaattttctataataaaaattctaccagcaaccatccactgtaccttagggtgcaattatagcacacttttcaagctatattaatcaattctaagtaaaataccccaaattgacaaaggctaaactcccatgtttcacagactcatagaattttttgtactccatactcgactcaactacttgctctttgttcttatttttggggtgggggtctatgcctatcaaaagacacccaaagagatttttcctgtttttgatttggatcaaatcatcgttacgggggcttatagcggtgcatcgctggatgtcatggacaagatggcagtagatcctcttgaagatgaactcaaaaatattgatgatgttgaaaagatgacaagcgtgattacatcggggcgttttactatcgtcatggagcttcgtcgtggggctgatccctacaactctttggacaaagtcaaagatgccctcgccctcgcctctcgaacgctccctagcgatatggatgagcctacggtgagggtgcttagtatccaacgtgacttgctcaatatcgtcatagagtccaatgctttgagtaccgatgccctcaaaatcaaagccaatgaactcaaagatagaatttcaacgcttagaaatatctccgaagtgaccatttacggcgattccgatctctactacgatatcaaagtcgatgcccaaaaggctgaagcttatggactaagtatggatgctattaccaaagccattgccaaactctcctatatctttcctataggactcattgaagataaacaaaagggtttctatttcgtctcgacggccaatagcaaaaactcttcgcaaacatttggtgaagccttgataaacatcgcaggtaaacagctacggctcaaagatgtagccactatcaccaaacgctacgaggattcggcaacgctttttagaatcaactcccaaaatgctctcaatctactcgtcaaacaaaacgaaaacggcaatgctttggagatagccgatgatgtagcgaagttgcttacacaattcaacgctcaaaaccccaacatacaaacctttatctttgatgacaactccgaaaagattcgagaccgtcttaatattgtcatttccaatatcctctttggactcattattatcttctttttggtagcgtggctgattaattttagaatggctactattatcatcatcggtattcctacctcttttgtgataggggctttttatttctatctttcaggctatacggtcaata

SEQ ID NO: 2787 - DNA, 23288 bp, synthetic construct
  misc_feature 1..23288: note = Synthetic
  source 1..23288: mol_type = other DNA
acgtggcccgggccttcgcccagggcgtggccgacctgctgctgtatcattgggaccgcagccgcaaagggggtccggtgctgggctatttcctggatcaggtggccctggtggccggcgtccgtttcgtgctgacgcccgatcgcctgcttcccgtccaccgggccgggcgcgtctatcggctggatggcggcgccggcgcggggccggcgatgttcgtgcccatcgtgccggaaaaggccctgcccgatatcgacgcgcgtctggaccaggcggtggcggcgttgcgggcgggtgcgggacggcaggtgctggaagcgtttttccagattccgccgctggcggacgcctaaccttttgcaccggtcccggtacgcgccggttctggtacgcgccggtcctggccttcgcgccgcgctccaggcagaaaatcgacgggaacacgggggcggacgcctggttgtcgaggatttggtaatcatttggcgttaaccatggccggtgggtcgcccgccggggcgatttcttgggaagggattgcggacccggtcatgattgggcgacgctttttgcgggcggggggcgccctggcagggcggttgggggctgggctgggcctggcgctgctgcttgcctgcgccgccgcgccatcctttgccgcccaaccctccggtcccgctggcgctcctgatccctgggcccgcctctccggccccgagttcgaccattttcccgccgccctgcgcctgcccagcgatgtggtgaccagcctggcgcagacccgccacggcgtggtctggttcggcaccttcggtggcctggtgcggttcgacggctatcgcacccagatataccggggttcgcccgacgccagtgctggcggcggctcgccggctggcaagccgggggccggcgcgccgccgcccacttatgtcctgcccgatgcctatgtgcgcagcctgctgtacatcgacgacggcggcctgctgatcggcacgaacgccggcggcctggtgcgcttcgacatcgacgcgaacggtttccggcccgtacccatcgcccaccgtgccaccgccgcccgcatcatggccctggggcaggcccgcgacggcggcgcctgggtgctgtcggaccaggggctggaccattacgacccgcgtaccgccacggcatcgcccgtggccgatgcggatgccggcggtgtcagcccccgtctgttcgccgtgctggaggacagccggggcgccctgtggctgggcggccatcccgggctgttccggcgcggcgcgggtgagacggcgttcacccgcgtggccgccccggtggacgaccctatcctggcgcgtgcgctggccgacgacgtctgggccttgtatgaggacggccagggccgcgtctgggtgggcacgggcgagaatggggccttcgccctggacaccgccacaggccgcccgttcacgatcaggggccttagcggcgcggatagcctggcggcgcgccacaccgtgcgcgccatcaccgaaccggaagggcccggcggccccctgtggctggccaccgacggcgtcggcatcctgacgctggatgccgacgagcgggtgggcgttcgggtaggcgttctggcgcattccgaaatggtatcgacctcgctggctggcgacgtcgtgcgcgccttcctgcgtgaccgcagcggcaatgtctgggtgggcacccagcggggcgccgaccgcgtggaggcggggcagcgcctggtttccaccgtgcaggccgccccgccgggcggcgtcggcctggcggacgccgacgtgcatgccctgaccacggatgcgcgggggcgggtgtggctgggccttgggcgcggtctggtcgatgtggtcgaccccgccgatggcatcctgcaccacgtcgttctgccgggggtggaccaggggcgggacatctacagcctggcggtcctgcccgacggggcggtgctggccggtgggcgcggcgtcacccgcatcgatcccgccaccttggccggcacctcgtcctggataccggcgctggatggcgtcgtcgtcctgtccctggcgacggcggccacgcccgccggaaccgccgtgttgctgggcggctatgacgggctctatatccgccaacccgacggcaccctgacccacctggtccatgatccggccgatgcggaaagcctgcccgccgaccaggtgaacaagatcctggtggtaccgcccggcgccgatgctccccagggcacagcctccgggggcatggcctccgggggtacggcctccgggggcacggtatggctggccacctccggcggcctggcggtggctgatctggcgggcctgccgcgcccgcgcttccacacgctgcggcgcgcgtcgcaggggcgcgcgataggcggcctgccgcacaacgtggtcaacgatgtcgtcttggacggggccggcaatctgtgggccggcacctatggcgggggcatggccgtgctgacgccggcgcagatgcgggacgcgttggccgggcgcccgggaatcgccccgctggtggtggatgagacgcagggcctggccaacaacgccgtatccgcgctggcggtggacggcgacggcggcgtctgggccgccgccgcggccagcctggtgaagttcaacggccccggcttcccgccccgcgttctgggcgcccgcgacggtgtcatcgtccgcgccttcaacatcaaggcggcgacccgtggcgcggggggccaggtgctgttcggcggcatgggcggtctgacggtcttgcggcccggaatgctccgtccatccgtgcccgttggcgtgctggcggtcaccgctctggatgtgaaccacaaggcgcagcccccgggccgcctgcccgcgccgggcggcaccctgaccctgggcgccggtgtgaagaccatccggctggccctgtcgctgctggacttccgcgccccgcacgacacccgctacgcctattgcctgaaggggttcgacgaggattgggtggaggtgaatagcgcccagccccaggccgtctacaccaacctgccgcagggtgattacaccttccgggtgcgcgcctggaccgacctgccaggcctggccctgtccaaccggcaggaggcgacggccgggttcgatcctgacgccgaacctgtggcgcagcccggccagaacacggcggacgcgctgtccatcccgcccatggccgaactggcctttcatatcagggtcttgccccactggtacgaacaggcctggttccggctgctgatggttttcggcctggtggcgctgatggcctgcgtgctggccatccggacggaggcgcagttgcgccgcgaacgggcgctgggccgcatcgtcgccgcccgcacccgcgacctgcgcgccgccaacaccaagctggaacagctggccagcaccgatccgctgaccggcgtcctgaaccggcgccgcttcttcgaactggcgcggctggaatgcgatcgctcccgccgctacggccgcgccttctccgtcatcctgttcgacctcgaccacttcaagcgcatcaacgacaccttcggccacctcatgggggacgaggtgctgcgggcggcggtggcggtggcggccaaggcctgccgcaccgtggacctgctggcccgcttcggcggcgaggagatcatgctgctgctgcccgagacggacatcgccggcgcccaggtggtggcggaacgcatccgcaccaacctggcggagatggaggttgcctacgacgggcaggtggcccaggtgacggccagcctgggcgtggcccagtggcgcagccccgatgagacgctggaggatctgctggcgcgggcggacggcgccctctaccaggccaagaagggtggccgcaaccgcaccgtgctggcctataacgaggtggaacggggggcccgcatgggctgggccatcgtcccgtccggcgacccttcgggggatgaggccgccgcggcgctggtggccgacaccccgccgctggagccgctggcgaggctggccggcctgggtgacgccacgctggtcgacccttatgaacgcgaaacctacgaccggccggtcaccggcgcggacgaggacgtgccgcccgacggcaccctgccaaaagcagcctccaactgatccaggccggcgataccgggccattcacgattttggacgcgcccggcgcctgacggccgccgaatggctatctcgtcaccggcccgtgcaccaggccgggcagggccagccaatcctccggaccgtccagcgacaggccggggttccaggaccggtcgtggccgatggccgcaccccagcgttccaggaaggccaggcgctcctgctccacccgttcccgccggtcggacgcatagggctccagcgccgtcaggacggcgtggggcgtccacagcgtggcgtaacccgcctgttccaggcgcaggcagatgtccacgtcgttgaaggcgatagggaaggtgtcggcgtcgaagccgcccaccgcctcaaagcaactgcggcggatggccatgcaggcgctggccacggcgctgacgcggtgggcgcataggccgatgcccaggtcgcccacggtatcacccggccgcccggcgaagcgcgacccggccaggcgggcggcacccggaccgttgcccaggcccagcacgatgccgccgtgcatgatggtgccgttggtcgacagcaccttgggccccacggcgccgatgtctggacgcagggcctgcgacaccagctcgcgcagccattcggggtgctgcggttccatgtcgtcgttcaggaacaccagcacctcgccggcggcggtgacggcggcgcgattcatcatgtcggcgaagttgaaggggccgcgatgcgggatgacccgggcgccggggcggtcgcgcagcgactccagataggccagggcctccgggtcgcggctctcatggtccatgaccagcagttcgaaggcgggataacgcgtctcgcccaggatggcctcgacacaggggcgcagcaggtccacccggtcccgggtgggcatcagcaggctgaccacgggctggcgatccggcaggggccagatgacgcggcgggcggtgtggcccccgcccttggggtccttctccgtcaccggttcggccacggcacccggatggtaggtggccaggaaggactgcagggccggcagcccgcccacgggcaggggtcggcggtggcgcatcagcacgcgcggcatgtggcgcacgtgctgccgtcccgccaggtgcgtcgcctccagcaacagacggtagcggtccagccggcccggctgctggcccaccgccatggcccggcgcgccaaggcggtgcgcatcagcagcagctggccgggatagacgccgctggacccgtacagcaggtcggggtcgaaggcgggcttcagcaccgggcgcaggggatggcccaggcggtcggtccattcctcgtcggtgtagaggatctgcgtgtcagggttctgcgccatggccagcacgcacagtgccagggcgtggcggggcagcaggtcgccgggcgacagcagggcgacggtatcgccctccacctggctcaggacgggcaggccggcgccccggcgcttcacgcgcgggtcgcggaaatcggcagcggtatcggccggcagccacaggtcccaattgtcgtggatctggcgggtcaggctgtcgaccgtgcgacgcacggcgacggcccaggcggcgggcttcaggccgctgttctccggccccagcatgatcaggctgacgcgcggcggggcgggcaggcgggccagggccacggatatctcgccggcctcggtgcggcggggtccgtcgcggcgcagggtccaggcgcggtagaacgaccggggtgccagcgactgccacaggcggctggccacgtcgccgaactgaccatgggccaccatgcggctcaacgcccggaccagggccatgcccgtgggtccgcgcaggggcttcgtgggcgggggtggggccgcgtctatggccgtgccgggcacgtgcatgctgccgggggatgcgcccaggggcgccccttcaaggtcatgcgcggccaccgcgtcttgcgatccccttgccggggggtggtccgggttcttctgatccacgtgccggttgccccgcctcttggaaaacagcttcggtcccgtcggcgcccgcaggcgccccggtccccagaaacaacaaagcgccaatcccgcgcccgggttcaacccggcactgatcgacgctcccccaaccggccggtcccccatcccatcggggccgcccatgtcgttatcaggcgattcatgggggacagcgcgcccccgggtcaagcggcaatgcggggtgcctccctccggtggtgggcagcttagaaggggtgtcgccaaggccgggggcggctgctatccaagatggccatggatgtccccacccctgcctccgcagccccgtttcccggccgtatcgcggccctggtcgtcgcctaccgggccgatgacggcctcgccgcctgcctggccgccgccgccggcgcggccgaccgtgtccacttgttccagcaggagcgggggcgggacgcggccgatgacgcccgggtggacagggcggtggcggcgacgggtgcggtcctgctcacggatccggccaacatcggcctggcggcggcgcagaaccgcctgatggaccaggccctggcccagggggccgactggctgctgttcctggaccaggacagtgtgccgcgccccggcctgcgggctgcctatgccgccgccttggcagccgccccgccggacaccggcttgctggccgcgcgtaacgtggaaccggatggcgggcccgactcgccctgggtggtcagttccgatggccggcgctgggcagtggtgcgtcgactcgacggtccgctgctgcccgaccttctgttggcccccgcatccggcagtttggtcagcgccggggccgcgcgggcctgcggccccctgcgcgacgatttcttcatcgactgggtggatgtggaatacgccctgcgcctgcgccgtgccggctttcgcctggtggcggtgcgcgacgccctggtggaccaccggctgggcgccgtcacccacgtccaggcgggcggccgggcgctggcgatcacccatcacgccgcccgccgccgctggttccaggcgcgcaacgcgctgtggacctggcggctgcaccggcgcgcggtgccggcgctgaccggctggaccctgcgcatcctggccgccaccgccgtgaagatcgcgatgatggaacgcgggcggctgcccaagctggcggccttcgccggcgggctgtggcagggggtgtggcagggcctggcgcggcgtccgcacccctaaagccgggcttgccgccgccagggccgcgccgtatcagtcgtgtttcaggcgctgagagtttccttcgcatgaccaccgactggacccggggctacgcctccgacatcgactatacccggggctggtaccgggagctgtcgcccctgtggctggacaccgcgctggtgctggcgggtgtggcgccgccccaaccgggggagcgtggcccggtatggctggaactgggctgcggccacggcctctcggccctggctctggcggcggcccggccggacatgacggtcatcgccgtcgatttcaaccccacccacattcatggcgcccagcgcctggcccaggccgcaggcctggccaacatccgcctgatcgaggccgacttcgccgagctggcggccgatgggcccaacgacaccaccggcctgctgccgcccctggactacgtcgtcctgcacggcgtctatacctgggtgggggatgagagccgggggcatatcgcccggctcattgcccgccggctgaaaccaggcggggcggcctatctcagctacaactgcctgccgggatgggcggcggccatgccggtgcagttcctgctgaacgcttacggccaggccctgcccggccccaaggccgccgccggcgaccaggcgcgcgacctgctgctgcacctgctgaaccagggtgccggctatttcagcggcaacgcggccgccagcgcccgggctgaccggctgcgcggcgcgacggcgccctacctggtgcacgaatacatgcacagcggctggcagccggcctaccacgcccaggtggccgacgacctggcggccgccaagctcagctacgccggcagcgccgcctgggtggaaaacttccccgacctgatgatgacccgggcgcagcaggacatggcggcggcggcccccacccgggccctggccgagacggtgaaggactacgtcaccaaccagccgctgcgccgcgacatcttcgtgcgcggaccattggccctggacgcccgccagcgggtggcccgcctgggcgccctgcgcctggtggccctgggcgaaccgggcgccgctctgccggacttcaccctgcccttggggccgcccgatcctgaggtctcacgcctgttccacccggtgctggcggtgctggccggcgggcccgccaccctggcggacctggtggagcatctggcccgcacggtggcggattggggccccgacagcgccggctggctgttgcgggccctggccatcctggtggcgggcgatgtgctggccccctgtctggccgacgcccagatccaggcggccttgcccggcgtgcggcgcctgaaccaggccctgctggccgacagcctgatggccggcgccaccctggaccccgaaacccgcctgccggaacgcctggcctccgccgtcaccggcggtggcgtcatggcctcggtggaggagatgggcgccctggccgcccattgggcgggcgaaatggtcatgccccccgacgccctgtcccgcctggcgcgcctgggcgtgctgtgacggcaacgacatgccgctttgacgccccagcggcgcatgccgctttgacgccccagcggcgcatgccgctttgacgcccacgcggcgggggcttaagctccgccgccttgccccgttgccccaagacgcgccatccatgacccaccatcctttcctccagcccttcaccaccatgcggggccattgatgctggcgaagctggtggtcctggtcggactggtcgtcctggtgtggaaggcctatcagtggggcgccctggcgcagcggcgcaagatggctggtggggcgcccgcgccccgcgcgtccggtggcgccgccgccccccgggcgccggaacccgccgccgaggacttgcacgcctgcgccatctgcggcgcctacgtcgcccggggctccaccccctgcggcaagcccgagtgcccgcagcggcgctgagtccccctttccggtacgcaaaccccgaaacgaaagggggcggccccgaagggccgccccgcattcggtgcgcatgggacgagcccagcacgtgttaacggatggaccgcaaatccctatcggctaagactgagagcagacatcctgtctcaaaacttaatccagcccttgccacgtgacaaggcgtgttctgcgtgttcagccgcaactagtttcccgccacgcgagcatctcgtcttgacggtgaaactgccccataagctagcataaaaattctgggaactagcaaacttctttgcgttgaagaaccaaatcggttagatctggttcctgcaagaagggagggttccatggtctggctgaccagcaccagaagagcattcgccccctgacgcggcgcctaacatcccaattaagacgttaggggaaagcctacttaggccgttcgtttttcgcggaaacgaacggccttttttgtaccagcgccatcatgcgcgtgcaagaaaaagtcaatcccaggctattgcaagatgatgtgttaaaggcacaagatacaagcacaagatgtatattccgcttgctgcacggtgcttcgcctgatgcccaaaccctaccgcctcgcccttgacgtgggcgccacctccatcggctggtgcgcgctggaactcggttcggaaaagctggagccggcgggcatcctgcgcatgggggtgcgggtgttccccgatgggcgcgacccgcagtcggggaccagcctggccatggaccggcgcctggcgcggggcgcgcggcggcggcgggaccggttcctggaacgccggcggcgcctgctggccgcgctggtgcgtctgaagttggtaccggcggacggggtggggcggacggcgcaggcggccttggacccctatgccttgcgcgcggcggcgctggagcgggccttggcgcccctggaactgggccgcgtgctgttccacctgaaccagcggcgggggttccgctcctcccgcaagggtggggaggcgccggacgaggccggcaagatcgccgagggcgtgtcacggctggaggaccagatcacggcggccggtgtcgccaccctgggcgcctggctggcggtccggcgacggcggcgcacgcccgatttgcgccccggtgaggacaaggcgctgtacaccgtccgtgccaggctggagggggcgggcgccaaggcgcagtaccgtttctacccctcccgcaccctggccgagcgggaattcgaccacatccgtcaggcccaggcgctccatcacccggccatcacgccgcaggattgggaccatctgcgcggtgtcatcttccaccagcggccgctgaagccggtggaccccggccgctgcaccttcttccccgaggatatgcgcctggcctgggcccatcccgtggcccagcgcttccgcatggtgcaggaggtggcgaacctgcgggtgctggcccggggccgccccccgcgcaagttggcgccggaacagcgcaccgccctgctggaccggctggcggtgaagaaggatctgaccttcaccgccatcgccagcctgctgggcctggcggagggggaggtgctgaacctgtcggacgagcggcgcgaccggctggcgggcgacggcacctccgccgcgctgtcggccaagaaggctttcggcaagctgtggttcggcctggcgccggaggaccaggacgaggtggtgcgccgcctgctggagacggagcgggaggacgacctgctgccctggctgcgggatcggttcggcctgacggaggaccaagccaaggccgtgtcggccgcccccctgccggaggggcattgccgcctgggccgccgcgccatcaccgccctgctgccgcgcatggaggagcagggggaggattacgccaaggcggcggcggccatcggcctgcaccattccgacctgcgcggcacggggcagggtctggccaccctgccgccctatgccgaggtgccggcgctggagcgcttcctgtccttcggcacgggggaggagaaggaccaggaccccttcgtccgcatcggccgcatcgccaaccccacggtgcatatcggcctgaaccagatccgcaccctggtgaacgacctgatccgcgagtatggcaagccgcatgacatcgtggtggaactggcccgcgacctgaacgacagcgcggaggaccggcgcaagcggctgcgggagcaggcggagaaccagcgggcgaacgaccgccgccgccgccaactggccgacctggggcggccagtgaccggggacaacctgatccgcctgcgcctttatgacgaactgcccttcgacggggtgcagcggcgctgcgtctatacgggggaacccatcggcctgacgcggctgttcgacggcgatatcgacatcgaccatatcctaccctacagccgcaccttggacgacagcgtggccaaccgcatcctgtgcgtgcgccacgccaaccgggacaagcgcaaccaatccccgtgggaggcctacggcgacggtcgccgcgcgggctatgactgggccgacatcctggaccgggtgtggcggctgccgcgcaacaagcaatggcgcttccagcctgacgccatggaccgcttcgacgatcaggaccggttcctggagcggcacatgaacgacacccgctatctctcccgcctggcgcggcagtacctgggctgtctttacgacctgcgggtggagggggagcgggtccgggccatgccgggcaccctggtggggctgctgcgccgcaaatgggggctgaacgcgctgctggctctggacggggaaaagaaccgcaacgaccagcgccaccacgccgtggacgccgccgtcatcgccatcctggaccagggcaccatccaggcggtgcagcgcgcggccaaggtggcggaggacaaggacctggaccgcctgctggaggatttcgatccccgccacaattggttccgcgatcacgtgcgcgaccatctggcgcgcatcgtcgtctcggtgaagccggatcacggcgtcaccggccgcctgcatgaggacaccaactacggtatcctgcccgccgccaggccggaggatgatccggaggggaagagggcgccctatgtccgggccggccacaccctggtctatcgcaagggcttcgacaccctgaccccggcggaggtggcgcgcatccgcgacccgttgctgcggggagccctgcaaacccacatcgccagcgaggccatccagggccgcgaccatcgccaggccctgcaaaccttcgtcgaacggacggaccacgcttggcagggcctgcgccatgtgcgcctcaccaagcccgaggcgtcgttcgaggtcatccgccaccgccgcaccggcgcgccttaccgcgccatcgtccccggcgacaacctgtgcgtggacgtggtgcgcctgccggatggcaggtggatgggccaggccgtcaccctgttcgccgccgcgcgccaggccggttccggtggccgcctgcatccgccggggccggacgtggtcatgcgcgtgtacaagggcgacatgatccggctggtgcaggacggacggcttcaggtcatgcgcgtctggcggctggaggtggcgaaccagcgcctgcgcctggcccctcatcaggaggggggcgagatggacaagcgccacaacgacccggacgatcccttccgctggaccttcgccagcttcgacaccctgcggcgcaaggccgcccgcaaggtggtggtgacgccctcgggacgcctgcgcgaccccggcccgccaccggacgcggtttccggggccgatcccgccccctcggcgccggccctcttggcgcccgcctcctcagcggtggagtaggcggccatggcggggcgcgggccgggccggatgccaggacgcgtggtcgacatcgcgaccgacggccggcatctgtccgtgcatcgcggcttcctggtggtggaggaacgcggaaccgaggtcggccgcgtgcccttggatgatgtggaggcggtcatcgccagcgcccgggcgctgaccttctccgccaacctggttcaggcgctggcggaacggggcgtgggcctcgtggtgtgcggcaccaaccatcagccggtgtccgttctgatgccggtggtggggcaccatgcccaggccgggcgcgtgcgcgaccagatcgaggcgggcaagcccctgaccaagcggttgtggcagggcctggtccgggccaaggtggaaaaccagggggcggtgttggcccatgtgggcgctccccatggagccttcgccaccctggcgcgggcggtccggtccggcgacccggacaatatcgaggcccaggcggcccgtcgctactggcccttgctgatgggcgccgacttccggcgcgacgcggacgcggagggcgtcaacgctctgttgaactatggctatgccgtcctgcgcgccgccgccgcccggtcggtgctggcggcgggccttcacccctccatcggcgtgcaccatgccaaccgcggcaacccgctgtgcctggtggacgatgtcatggaacccttccgaccgctggtggacgcggtggtggtggatctcgcgcgccggggcgtgggccaggtgacgccggaagccaagcgcgacctggccgccgtgctgcttatggacatgaccaccgcgcgtggcaccacgcccctgtccacctgcatcgtgcgtctggcggcgtcactggccctggcgtttgaaaccggacggccggatctggacctgccgctatcgccgctgcccctcgatctggtcgccggtggcccggatcgatcccaaggcgccacccagggggatgaggatggctttgaatgggtacaggatcatgtggatgatggtgctgtttgatctgccagtgctgaccaagccccagcggcgcgccgcctcgcgcttccgcctgttcctgctggaccagggctttcacatggcgcaattctccgtctatctgcgctggtgcgtcggcaaggagcaggttgaggcgctgtcgcgtaaggtggccgccaacatcccatccaagggcagcgtgcagatcgtcaccatcactgacaaacagtaccagaacatcggcacctatgatggaaaacgccgcaaggccaaccaaaaccccgcccaactcgccctgttttagggcgacgcggacggtttctaccaaggatgagggccggatattgccctttctttcaaagggttatctccggtccgagtttagccgatagggatttgcggtccagccgcaacgcccctcctccattggcactggccgcagcgagtttagccgatagggatttgcggtccagccgcaacagcatgggccgtggggttgtagctgcccgtagtttagccgatagggatttgcggtccagccgcaactaatttctccacctctcactttgctttttcagtttagccgatagggatttgcggtccagccgcaacgggccagttgggcttgttcagctcacagggagtttagccgatagggatttgcggtccagccgcaacagtgtggggtccaaatactgctggcgaaacagtttagccgatagggatttgcggtccagccgcaacatggttacgcgacgtgaggacgttggttataagtttagccgatagggatttgcggtccagccgcaaccgtgataagtggtggggccacggagattcaagtttagccgatagggatttgcggtccagccgcaacctatgtcgtttctggatgtacggagacgctagtttagccgatagggatttgcggtccagccgcaacaaaacacgcgatggcgtagcctaagcaggtagtttagccgatagggatttgcggtccagccgcaaccgcgccgtcaaccgcacttggcgcgagttcagtttagccgatagggatttgcggtccagccgcaaccatctgccggacatagagcgcgttgacctgagtttagccgatagggatttgcggtccagccgcaactgcagcctctgcaacgagcggctgaaccccagtttagccgatagggatttgcggtccagccgcaaccctggccgacgccggcaacttcggtcatgaagtttagccgatagggatttgcggtccagccgcaactaagggcgcgcgacatatgtttctcgccatagtttagccgatagggatttgcggtccagccgcaacccgcccaagcgacaacatcaccgacctgcaagtttagccgatagggatttgcggtccagccgcaacgccgtcttcggcaaggacgtggcggcggcgagtttagccgatagggatttgcggtccagccgcaacttccaggtccgtgtcccgccacattcgcatagtttagccgatagggatttgcggtccagccgcaacaagggatctcagctcgtcttcatcggaccaagtttagccgatagggatttgcggtccagccgcaactagacgttctggtagtggtgcaccagctcgagtttagccgatagggatttgcggtccagccgcaacctggggagggcagggggatgggatgagggtagtttagccgatagggatttgcggtccagccgcaactgaatctcctcgtactcttcacccctagaaagtttagccgatagggatttgcggtccagccgcaacccggccgatcgtcgtattggcgaaggacccagtttagccgatagggatttgcggtccagccgcaacgacgccgtcgatgttcatgtagccggtgccagtttagccgatagggatttgcggtccagccgcaacgcgcacgcgcgcaggggccgcccttacaccagtttagccgatagggatttgcggtccagccgcaactgcgacaccggcaacggcggtggacatcttagtttagccgatagggatttgcggtccagccgcaactctggcgcgctccgtccatcaacatctcggagtttagccgatagggatttgcggtccagccgcaacgcacctggaacaggtgatcgcggacgcgctagtttagccgatagggatttgcggtccagctacaacctggcgcagacggtggagccgaagagcttagccgattggggctgccactcagcaacccctcggcttagatgtgaatgatcacagcgtcacgaccacgcggccgttgacggtgccggcgcgcaggcggtcgaagatggtgttgatggcgtccagcggctggacctccacctccgccttcaccttgccctcgccggcgaaggccagggcctcggccaggtcggcgcgggtgccgacgatgctgccgcgcacggtgatgcggttcagcacgacgtcgaagatgggcaggccgaattcgcccggcggcaggccgatcagggccacggtgccgtggcggcggctcatgcccacggcctgggtgaaggcggggcgggagacggcggtgaccagcacgccatgggcgccgccgatgtcgctgtgcaggcgcttggccggatcttccttcagggcgttcaccgtcaggtcggcgcccagcttccgggccaggtccagcttgtcgtcggcgacatcgatggcggccacgtgcaggcccatggccttggcgtactgcacggccacgtggcccagaccgccgatgccggagatggcgacccactggccgggccgggcctccgtctccttcaggcctttatagacggtgacgccggcgcacaggatgggggcgatctcctcgaaccccacgctgtcgggcaggtggccgacgaagttggggtcggccagcacatagtcggcatagccgccgttgacggaatagccggtgttctgctgggcggtgcacagcgtctcccaccccgtcaggcaatgctcgcaatggccgcaggcggtgtagagccagggcacgcccacgcggtcgccttccttcacattggtgacgccggcgcccacggcggcgacgtagcccacgccctcgtgaccgggaatgaagggcggttgcggcttcaccggccagtcgccgtcggcggcgtgcaggtcggtgtggcagacgccgctggcctggatgcgcaccaggatctggccggggccgacctccggcaccgccacttcgcggatgtccaggggcttacccagggtgtggacgacggcggccttcatggtccggggcaaagacatggggaacggtccttcctgtcgggggcgaacggcggtggccgttcgttcgccgacagaagataccggcgggccgctcgcagctttgagatgggtcaaggaccggacggatctacctctttcgtgacggccagcaccgtttggcgcacctcgggcggcaggctgtccagcacgccggccacgccgcgcagggcggcgcgcaggctgtagacctggtcgatcagcgccagcaccaggggcagggtgtcgtcggccacacccatgtcgcggcgcaaatcgcggatcaggcccacgcgggccacatccacggggtggaagcgccagtcggccgcatgctccggcgccggggtgccgtctggccgcacccagccttgcgtcacccaccagtggatgtcctgctcgcccacgtcggggaaacgggcgcacacggcctccagcgtcaacagggtcagcgtgcccatggctcaagctccctcatgatgcagatcggccaggccggcgcgcggatcggcgtcatgccggggtttccagccttccaggaaggtcgccagctccggctcctcccccggcggcaacaccaccttcagctccaccacctggtggccctcgcggatgccccggcccttgaggcgcaggcgggtgccgctgctggagcggggcgggatggccaacatgacgctgccgtggatggtgggcaccttgaccttggcgcccagcaccgcctccttcagcgtcaccggcagttcgatgatgatgtcgtcgccgtcgcggcggtacagcgggtggggcgagaccgccacctccacgaaggcatcgccgggggggccgccgttcatgcccggcccacccttgcccgccaggcgcagtgcctggccgtctttcaggccggcggggatggtgacgtccagcacctgaccgtcgggcagggtcagccggcgggtggcgccccgggcggcggtcaggaaatccaccgtcagggaataacgggcgtcctggcctttcagcgggaagccgccggcgcgggcgcccccggtgccgccgccctggttgaaggcgcgacgcagcaggctttccaggtcatcatggtcgaagccgccgaggtcctcggcgccggcggagtagcggccgtgcccgctggcgaagggcccgctggcgaagggatcgcccgcgtactggcggtaatagccgcccccgccggcggggccgcgcggggccgtctccgccccggtggcgtcgatctccccccggtcgaagcgggcgcgcttgtccgcgtcggacaacagggcgtaggcggcggcgatctccttgaacttggcctcggcctctggcttgcccgggttcaggtccgggtggtgcttcttggccagggcgcgataggcgctgcggatggtcttctcatcggcgtcgcgggcgacgcccagcaaggcgtagggatccaccgtaggctacctcattccagggaagggaccaggggatgcgatcatgcggccggccttggggcgacccgttgggcttcccgcggtgggacggccggcctcccccgccgggggcagcagcagggcttccgcctggcgcagcaccgtggccggggtggggccggcgtccaggatagcccagcgcacctcgccggcgcccttgcgcatctggcttagcaagacgggcatatccgcgtccgacgcgtcccgggccgtcgcctggccccgccggctcaaccggtccgccagcacggcctccggcgcctgcaaccacaggccggtgaaacgcgcatgggcctgggccgccacttccgccgtcagggcccgctcggcggggtcggcgaacaccgcgtccaggatgacgctgcgcccggcggccaggcaggcggcggcctgggtgcgcaggcggtcgtagacggcggcgctcaccgccgggctgtaggcctcatgggtcagcgcctgctccggcgccacgccgaacagctgcttgcggatgacgtcggtgcgcagcacgcgggcgcccggggccgtgcccagcaggggggccagggcccgggccagcgtggacttgcccgtgccgctgaagccgccaaccgccacgacgcgcggccggtcgcggcgcaggaaatccagcgccagctgcaggtaacggtcggcctccaccgccccggcggtcttctgcgtgggcgtggtctggcgccgggcggctgcggccgtcacctgggcccgcaccgccgcccgcaccgacaggaacaggggcagggccgacagcccgcccagggcctggccctcccgtcccgccatatcctctcccgtcaggtccaggtagcggtttagcaccaggctcgccagatccacgcggtcgcggaaacaaagatccatcagcaggaaggccagatcgtacagcacgtccgtgcaggccagggcggggtcgaactcgatggcgtcgaagggtgtgggcgtgccgtccaccaggcagacgttgcccagatgcaggtcgccgtggcagtcgcgcacccggcccgcgccgcgccgcgcgtccagcaaggccgcctgcgccgacaatgcggcctgcaccttggtgttccaggcgcggatgtcggcggccgagaaggcgtcgcccggcttcaggttggcgcgggtgatggcgatggcctcgcccagcccctcggccccgccgccctccgtgcgcccgggctgcgcccggtgcaggcgggccaggcggtcggccaggtccagcatcagctgcggcgtcagccggccttgcgtcgccatgcggtccagcagggcgtcctggtcgaagcggcgcatgaccagcaaccagtccacgacctgggcaccgggcaggggcggttcatcctcccccgccgcccattccggtcccagggtcaggccgtctggcgtgcgcaggacggggcgcaggcccaggtacaggttgggggcgaagcggcggttgaccgccagctccgccaggcagaagtgccgccgccgttccaccgtggaatagtccagataggaatagcgcacggcgcgcttcagcttgtaggcgcggtcgccggccaggaagacgtgggaaatgtgggtgtcgatacgctccacccggccacgggccccgaaggattccggatgggtcaggaaggcgagcgtctcggtctggtcgtccatggcggtagactccctgattgcggaaaggcggaacccgggcgacggcgtgccgcgggctctgttgagagaaaagcataggccacccggcggttccgccgccttgagcgggatcaagcggcggtgcgctcattccatcgcggaacccgcacagcgagattcacacccgccccgttgcggaacacgcgtgccacacccgcgtcaaaacggggcgcgcatgcgggaaacgcgccggtcgccgccttgatttggggttcgcccgccttgtaaggtgcgccgcaacgcaacaaagggccggggaggacgggttttcgaaccccaaaagttccttttccgcccttccagggtgaagacggtcaggcaatggcggcctcaggcgcggcgaagctcagtttccagggacttatcctgacgctccaccagttctggtcggagcagggggccctgatcctccagccttatgatatggagatgggggccggcaccttccatccctccacgaccttgcgcgccctgggcgccacgccgtggaaggccgccttcgtgcagccgtcgcgccggcccaaggacggccgctatggcgagaaccccaaccgcctgcaccagcatcaccagtaccaggtgatcctgaagccctcgccggccaacgtgcaggagatctacctggaaagcctgcgccgcgtgggcatcgacccggcgcggcacgacatccgcttcgtcgaggatgactgggaaagccccacgctgggcgcctggggcctgggctgggaagtgtggtgcgacggcatggaggtgacgcagttcacctatttccagcaggtgggcggcatcgagtgcgaggtcgtggcggcggagctgacctatggcctggaacgcctggccatgtacatccagaacgtcgagaacgtctacgacctggacttcaacggccagggcgtgaagtacggcgacgtctatcaccgcaatgagcgtgagcagagcgcctataacttcgaggtcgccgacaccgccatgctgctgcgccatttcgaggacgcggagcatgagtgcgccgagctgctgaagcgcggcctggcctggccggcctatgagcagtgcgtcaaggcctcgcacaacttcaacctgctggacgcgcgcggcgtgatttcggtggtggagcggcagagctacatcctgcgcgtccgcaacctggccaaggcctgctgcgaggcctgggtggcgggggacaagaaagtggactggaccctgcctgggcccgtttccggtaagggggcctgaaccatggccgagctgctgatcgaactgttttccgaggaaatccccgcccgcatgcaggtgcgcgcggccgatgacctcaagcgcctggtgaccatcaagctggccgaggccggcttggcgttccaggacgccatcgcccattccaccccgcgccgcctgaccctggccgtcactggactgccggtgcgccaggccgacgtgcgggatgagcgcaagggcccgcgcgtgggatcccctgacgcggcggtgcagggcttcctgcgcggtgccggcctcaccagcctggatcagtgcgaacagcgcgacaccggcaagggcgtgttctggttcgctgtggtggaaaggccgggcggggccacggtcgatgccctgccgggcatcatcgacgctgccatccgcgagctgccctggcccaaatccatgcgctggggcaacaacaccttccgctgggtgcggccgctgcagtccatcctggcgctgttcgacggcgccgtggtcccgggcaccctgaccctgaggacggccgaaccggcgcccgaggcgtcggagggcaacgtttgcttagggggagagcccaccgccgtcaccctgccctacggcaacaccacgcgcggccaccgcttcctggcgcccgacgcgctgaccatcaccgacttcgccgactatcagcaaaagctggctggcgccttcgtcgtgctggaccgcgaggcgcgcaaggcccgcatcctggaacaggccaacaggctggccgccgccgagggcctgaccctgcgcgacgacccgggcctgctggaagaggtggcgggcctggtggaatggccggtgggcctgatcggcaccatcgaccaggccttcatggacgtgcccgccgaggtgctgaccacctccatgcgcacgcaccagcgttatttcgccctggaaaccgctgacggcaatctggcgccccgcttcatcctgatggccaaccgcaccaccgaggacgaaggccgggccgtggtggcgggtaacgagcgcgtgctgcgcgcccgcctgtcggacgccaagttcttctgggacctggaccgcaaggtgccgctggaagaccaggccaagaagctggccgacatcaccttccatgccaagctgggcaccacggcggccaaggtccaccgggtggaaggcctggcggcggtcatcgcccgggccatccacgccgacgtggacgccacccgccgtgccgcccgcctggccaaggccgacctggtgaccggcctggtgggggagttccccgaggtgcagggcgtcg

SEQ ID NO: 2788 - DNA, 15636 bp, synthetic construct
  source 1..15636: mol_type = other DNA
  misc_feature 1..15636: note = Synthetic
tcctgcccctcctggccgcttccatcacggcggcggtgccgggtggccgcctgcacgtccacatctgcgacccggcgccgggcgatgtcgatttcctggccgaagtcgccgccaccctgcgcctgggctggtcgacggaagcgctggacccgggcttggatgcgcaatcccgcctgacctacctgacggccgcgcgcttcctgcgcctgccgcagctgcgggaccgctatggggcgccgttggtggtggccgacatcgatgccgccttcctgaccgatcccgcccgcttcgccgccgcgctgacgccggaccggccggtggccaccacctgggggccggacaacttggcggcgccgtatgacgccgccggcggtgggctggtggcggtgggggcgggcccgcaggccgacggcttcgtccggggggtcgcggacttcctgctgtaccatctggaccgtgcccgccgggggctgtcgccgctgggctattacctggaccaggtggcgctggtggcgggcatccaatgggcgttgacgcccggccgtctggtgcccatcggcatggaggggcgtgttcatcgcctgggcggcggcgccttcgtgcagattctgccggagaagaccctgcctgatattggggaacggctggcccgggtggtcgcggccctgcatgccggcgacgggcgccgcgcactggatgatttcttccagctgccaccgctcagggacggtgcctaaccttttgcgcgggcgggccccctggcgttcgccgttccgccggggcagaacggccgggggaaatcggtggctggccgatcgttggcgaggatttggtaatcatttggcgttaaccatgcctgtcgctgccgttcgcgcgcggctgcaattgcttggaacatgcgtgggaagggcgacgggcactcgggccatcatgatcggacggcgcttcttgcgggcgggtatcggggggatggcgttggcgcggcggctggcgcttgcgctcctgctggcgtgcgcgtccttgcccgccccggccgccgattccgtggcgcccgctccggcgacacccgacccctgggcccgcttcaccggccccgccttcgaccatttccccggttcgctgcgcctgcccagcgacgtggtgaccagcctggcgcagacccggcagggcatcatctggttcggaaccctggggggcctggtgcgcttcgacggctatcgcgctcaggtctatcggggggcgcccgatatgcaggtcgccggtccgaccggtggccccctgggcggcctgtcgcgcaccttgcccgacggctatgtgcgcgccctgctgttcacgggtgacgaaagcctgctggtggggaccaacgccggcggcctggtgcggttcgacttcgaggccaacggcttccgtcccgtgccgatcacgcgcggggacgccgccagccgcatcatggccttggcgcaggcccgcgacggtggcgcctgggtcgtgtcggatctgggcctggaccattaccagcccggcagccatgccgccacgccggtgatcgattccggcccggccggcctctgcccccgccttttttcggtgctggaggacagccgcggcaccctctggctgggcgggcacccgggactgtaccgcagggccgcgggcgaaacggtgttcacccgggtggtggcgtccaccgccaccgccgcaatcgacgccttggccgacgacgtctggtcgctttatgaggatgaccggggtgacgtgtgggtgggaaccggggaacggggcgccctggtcatcgacgggaaaacaggtgccgttcgcgccatccacggcctgaccggggctgatggggcggccgcgcgccacaccatacgcgccattgtcgaacccgacggggcggacggtcccttgtggctggccaccgacggggccggcatcctggtcgtggatcgcgacagtggcgttctgaccggcttgacccattccgaaggggtgggcagttccctggctggggacgtggtgcgcggcctgctgcgtgaccatagcggcaacctgtgggtggggaccgagcgcggcttggaccgggtggaaccggaccagcgcgccatcgcgacggtgtggccggcggcgaccggccggccgggcctgggcgccccggacgtgcatgcgctgaccgtcgatgggcacggacggatctggctgggcctggcccgcgggctggtcgacgtcatcgacctgtcggccggcacgctgcgccacctgcgattgccgggagctgagcggggatgggacgtccacagcatggcatccctgcctgatggcggcgtgctggcaggggggcgggggctggcgcgcgtcgatccccacaccctggccgtcaccccgtcctggatcccggcgctggacgacacactgatcctgtccctggccgccgtgggcgacagcgtgctggtgggcggatatgacggactgtacgtccggcggccggacggcggccttgtccacctcgcgcatgatccttcgcatccggaaagcctgccggccgatcaggtgaacagcatcctggtgcgggacggcgccatatggctggcaaccataggcggcgtggcggtggccgacgtgacagacctgccgcgcctgcgcttccacaccttgcgcaagtcatcccaggcgggcgccggcgggtcattgccccacaacgtggtcaacgacctggccgtggatggcgtgggcaatttgtggatcggcacctatggcggcggcgtggccgtgctgaccccttcccagatgcgcgacctgcgggcgggcagggcgggggtggtggtgccccgggtgatcaatgagatggacggcttggccaacaacgccgtcagttcgttagccgtggatgggtcgggcaccatctgggcggccaccgccgccagcgtggtcaagttcgagggcccgggctttcccccccgcgtcctgggggcgcgggacggggtgcaggtccgcgcgttcaatatcaaggcggcgggccaaggcccagggggcgaggtgctgttcgggggcctgggtggcctgaccgtggtgcggcccggcctgctgccgtcctcgtcgcctgtgggcgtcctggccattacggcggcggacgtgaaccataaggcgctgccgcccggccgcttgccatcgccggggggaacgctgaccctgggcgcgggcgtgaagaccatccgcctggccctgtcgctgctggacttccgcgccccgcacgacacccgctacgcctatcgcctggatggcttcgatgagaattgggtggaggtggcgggcgccctgccccaggccgtctacaccaacctgccgcggggcgactatactttccgcttgcgcgcctggaccgatctgccggggctggctttgtccaaccggcaggaggtgacggccgggttcgacccggacacccagccggtggccgaccccggcccggcagcgccggtccgcacggcggacgacctgtccatcgcccccatggcggaactggccttccatctgaaggtgctgccccactggtacgaacaggcctggttccgcctgatgctcgtcttctgcgccgtggccgtgctggcctgcgtgctggcggtgcggaccgaggcgcagctgcggcgggaacgggccctgagccggatcgtcgccgcccgcacccgggacctgcgcgccgccaacaccaagctggaacagctggccagcaccgaccccctgaccggcgtcctgaaccgccgccgcttcttcgaactggcgcggctggagtgcgaccgctcgcgccggtatggccgctccttctccgtcatcctgttcgacctggaccatttcaagcgcatcaacgacaccttcggccacctgatgggggatgaggtgctgcgcgccgccgtgggcgtggcggtcaaggcctgccgcgccgtggatctcctggcccgcttcggtggggaggagatcatgctgctgctgccggaaaccgacatcgccggcgcccaggtggtggccgagcgcatccgcaccagcctggcggagatggaggtcgcctatgatggccaggtggcccaggtcaccgccagcctgggcgtggcccagtggcgctccccggatgagacgctggaggatttgctggcccgggccgacggcgcgctgtaccaggccaagaagggcggccgcaaccgcacggtgctggcctataacgaggtggaacggtccgcacgcatgggctgggccatcgtcccgtcggcggagggcgccgcggcgcccatccccgtcgcggacgccccgccgctggagccgctggcccggctggccggcctggaggacgccaccctggtcgatccctatgagcgcgcggcctatgacttgactccgcccgccgcggcggaggagccggcggccgccccggatctgcccggcgtcgcctccaaatgatatcggccaaatgatatcggcggcgcttcagcgggtgaccggcccgtgcaccagcccgggcagggccagccagtcctccggcccgtccagcgacaagccggggttccaggtgcggtcatggccgatggcggcgccccagcgctccaggaaggccaggcgttcatgctccacacgctcccgccggtcggaggcgtagggttccagcgccgtcagcacggcatggggtgtccacagggtggcgtaaccggcttgttccaggcgcaggcagatgtccacgtcgttgaaggcgacagggaaggtctcggcgtcgaaaccgcccaccgcctcgaaacagctgcggcggatggccatgcaggcgctggccacggcgctgacccggtgggcgcacaggccgatgcccaggtcgcccacggtgtcgcccggccgcccggcgaagcgtgatcccgccaggcgggcggcgcccggcccgctgcccaggcccaggacgatgccgccatgcatgatggcgccgttggtcgacaggaccttggggcccaccgcgccgatgtccgggcgcacggcctgggacaccagttcccgcagccagtcgggatcctgtggttccatgtcgtcgttcaggaacaccagcacctcgccggcggcggtgacggcggcgcggttcatcatgtcggcgaagttgaaggggccgcggtggggaatgacccggacgcccggccgctgacgcaacgcctccagatactccagcgtctccgggtcgcgcgactcgtggtccatcaccaccagctcgaaggcgggatagcgggtctcaagcaggatggcttcgacgcaggggcgcagcatctccacccggtcgcgggtgggcatcaacaggctgaccaccggtgggcgttccggcagcggccagatgacgcgccgcgcgttatggccgtcgcccttggcgtccttctccgtcaccggctcagccaccgcgccgggatggtaggtcgccaggaaggactgcagggcggccagtccgcccaccggcagggggcggcggcggcgcagcagcacgcgcggcatgtgccggacgtgtgtacgcccggccaggtgcgccgcctccagcagcaggcggtagcggtccagccggccgggcgtctggcccacggccatggcgcgacgcgccaggctggtgcgcatcagcagcagctgcccgggatagacgccgccggacccgtacagcaggtccgggtcgaaggcgggcttcagcaccgggcgcaggggatggcccaggcgatcggtccattcctcatcggtgtacaggatctgcgtatccgggttctgcgccatggcaagcacgcacagcgccagggcgtggcgtggcagcaggtcgccgggcgacagcagcgccaccgtgtcgccctccacctgggacagggcgggcaggccggcgccacggcgcttgacgcgcggatcgcggaaatcggccggcgcgtcggcgggcagccacaattcccaattgtcgtggatctgccgcgccaggctgtccaccgtgcggcgcacggccacggtccagaccgccggcttcaggccgctgctttccggtcccagcatgatcaggctcaggcgcgggggggccggcaggcgggccagggccacggaaatctctcccgcctcggtgcggcgcgggccgtcgcggcgcaaggtccaggcgcggtagaaggaccgcggggccagggattgccacagccggctggccacgtcggcgaattggccttgggcgaccatgcggctcaaggcccggaccagcgccatgcccgtggggccgcgcagggggcgcgtgggcggtggcggcgccgcgtcgatggcggtgccgggcacgtgcacgctgcccggatgagcgcccagcggcgcgccctccaaatgggaagaggccaaatcgggtgatgccaggtcgggcgaggccacggcgtcctgggggccccgcgcggggggatggtccgggttcttcttgtccacgtgccggtcgccccgtctcctggaaaaacggcttcggtgccggtgacgccacggcatcgccggtccccagaaacaacaaagcgccaatcccgcaccggtctgccccggcgccgatcggcgctcccccaaaacaggcggtccccttccacatgggtccgccctcgtcgttcttaagcgattcatgggggagagtgccccaccgggtcaagcggcaaagcgggggccggggccgctccaccctgggtagcgggctggccggccaagcggtcgggctcaaagggatatcgccaaggccggggccggctgctatccagacgaccatggatgtttccgccccccccttccctggcaccatcgccgccctggtcgtggcctaccggcccgacgatgggctggccgcctgcgtggccgccgccgccggcgcggcggaccgcgtctacctgttccagcaggaacggggacgggacgccgccgacgacgcgcgggtggatcgggcgcgggtggacggggcgctggcggacggggcggccggcggcggcgccatcctgttgtccgacgccgcgaacatcggcctggcggcggcgcagaaccggctgatggcccgtgccctggcggacggccatgactggctgttgctgctggaccaggacagcgtggcgcgtccgggtttgcgcgccgccttcgccgccgccctggccctggcgccggcggacaccggccttttggccgcccgcaatgtggaagccgacggcgggcccgactccccctggcccgactccccccggcccgaatccccctgggtggtcagcgccgacggtcgccgctgggccgtcaggacggggtttgacggacccctgctgcccgacctgctgctggcccccgcctcgggcagcctggtcgccgcccgggccgcccgcgcctgcggccccctgcgggatgatttcttcatcgactgggtggatgtggattacgccctgcgcctgcgccgcgccggcttccgcctggtggcggtgcgcgacgcgctggtggaccaccggctgggcgccgccacccatgtcaaggcggccggccgggcggtggccgttacccatcacgccgcctcccgccgctggttccaggcgcgcaacgcgatatggacctggcggctgcacggccgcgccgtgccggcgctcaccggctggaccctgcgcatcctggcctccaccgccatcaagatcgcgctgctcgaacgggggcgggtggccaagctcgcggccttcgccggcgggctgtggcgggggctggtccgccggccggcggactgacggcgcccgccaccccccaagccgggcttgtcgccggccggcgcgcgcactatcagtcgcttttcgaaacagggacaccgcccatgaccgccgactggacccggggctacgcctccgacatcgactacacccggggctggtaccgcgaactgtcgccgctgtggctggacacggccctggcgctggccggcgtggcgccgccgcaggaaccggggcgcgggcagggggatgacggggcgcaagggccggtctggctggaactgggctgcggccacggcctgtcggccctggcgctggcggcggcgcggccggacgtgaccgtcatcgccgtcgacttcaaccccacccacatccacggcgcccagcgcctggcgcgcgccgccggcctgtccaacatccgcctgatggaggccgacttcgccgagctggcggaggatgccgccggcctgttgccgccggtggactatgtcgccctgcacggcgtgtacacctgggtgggggaggaaagccggggccacatcgcccgcctcatcgcccggcggctgaagccgggcggggccgcctatctcagctacaactgcctgccgggctgggctgcggccatgccggtgcagttcctgctgaacgcctacggccaggcgctgcccgggcccaaggccgccgccggcgaccaggcgcgcgacctgctgctgcacctgctgaaccagggggccggctatttcaccggcaacgccgccgccagcgcccgggccgaccggctgcgcggcgccaccgccccctacctggtgcatgaatacatgcacagcggctggcgcccggcctatcacgcccaggtggcggacgacctggcggccgccaagctcagctacgccggcagcgccgcttgggtggagaacttccccgacctgatgatgacccgaacgcagcaggacatggccgccgcggcccccacccgggccctggccgagacggtgaaggactatgtcaccaaccagccgctgcgccgcgacatcttcgtgcgcgggccgctggcgctggacgcccgccagcgcgtggccaggctgggcgcgctgcgcctggtggcgctgggcgaaccgggggcggcattgccggacttcaccctgcccctgggcccaccggatcccgaggtctcgcgcctgttccaccccgtgctggcggtgctggccggcggtcccgccaccctggccgacctggtggagcatctggcgcgcacggtggcggactggggaccggacagcgctggctgtctgttgcgcgccgtcgccatcctggtggcgggcgacgtgctggccccctgcctggccgacgcgcaaatccaggcggccctgcccggcgtgcgccgcctgaaccaggccctgctggccgacagcctggtggccggcgcccccttggacgcggaggcgcgcctgcccgaacgcctggcctcggccgtcaccggcggcggcgtcctggcctcggtggaggagatgcgggccctggccgcccattgggcgggtgaggtggtgatgcccccggacgccctgtcccgcctggcgcggctgggcgtggtgtgacgggacgtggtgtgatcagccgctttgacggcggcaccccggcgggcttaagctccgccgcccctcccgttcgccagacgacccgccccatgatcctccgccccttccgttcccgttccgccgtgtcgcggggcctgtgatgctggcgaaactggtggttctggtcgggctggtcgtcctggtgtggaaggcctatcagtggggggcggccgcccagcggcgccgcatggccacgcaagccacaggccccacccccacccacaacacccgcaacgccggcccccgcgcccccgagccggtgaccgaggatctgcgcgcctgccccatctgcggggcctacattgcccgcgcctccgccccctgcggcaagcccgagtgcccgcagcggcgctgagcggattttccgtccggcttccgaagcccaaaaacgaagggggcggccccgaaggaccgccccgcattcggtgcgcatgggacgagcccagcacgtgttaacggatggaccgcaaatccctatcggctaagacttggaagcagacatcctgagttcattaaaagcccctccgagcgaggggtcaaatacaaacacgccagcgacgaactatctttggcatatttgcaacgtgtggtaaggcatgcaaatcttgcgggcactgataaaaatatgctcgcggaaagcccatgcccaagccctaccgcctctcccttgacgtcggcgccacctccatcggctggtgcgcccttgaactgagcgcggagaaattcgagcccgtgggcattctgcgcatgggggtgcgcgtgttccccgatgggcgggatccgcaatcgggcaccagcctggccatggaccggcgcctggcgcgcggggcgcggcggcggcgggaccggttcctgcagcgtcagcggcgcctgctggcgaccctggcgcggctgggcctggtgcctggggacccggccgggcggacggcgcaggcggcggtcgacccctaccccttgcgcgcggcggcgctggaccgggcgctggcccccctggagctggggcgggtgctgttccacctgaaccagcggcggggtttccgctcctcccgcaagggcggggaggacgcgaacgaggccggcaagatcgccttgggcgtcaaccagttgcaggaggagatcacggcggcgggcgccgccaccttcggcgcctggctggcggcgcggcgggccctgcgcgcgccaggcgtggacaagcatctgtacaccgtgcgcacgcggatggagggggcgggcgcccaggcgcgctatcccttctatccctcccgccctttgctggaacgggagttcgacgccatccgggcggcgcaggcgccccaccaccccggcatcgcgccggaggattgggagcatctgcggggcgtcatcttccaccagcgcccgctgaagccgctggaccccggccgctgcaccttttacccacaggaccagcgcctggcctgggcctatcccgccgcccagcgcttccgcatggcgcaggaggtggcgaacctgcgggtgctggcgcgcggtcagaacccgcgcaagctgaccttggcgcagcgcaccgccctgctggaccggctggcggtcaagggggacgtcaccttcaccgccatcgccaccctgctggacctggcggagggggaggtgctgaacctgtccgatgagcgccgggaccggctgaagggcgacggcaccgccgccgtgctgaagcaaccgaagcgcttcggcaagctgtggctggccctgccggaggaggaacaggacgaggtcgtccaccgcctgctggagacggagcgggaggaggacctgctgccctggctgcgcgaccgcttcggcctgacggaggaacaggctagggcggtgtcctccgccaccctgccggaggggcactgccgcctggggcgccgggcgatcaccgaactgctgccgcccatggaacagcagggactggactacaccaaggcggcggcggagatcggcctgcaccattccgacctgcgcggcgtgggcgaggggctgcccaccctgccgccctatgccgaggtgccggcgctggaacgcttcctgtccttcggcacgggtgatgagaaggaccgggatcccttcgtgcgcattggccgcatcgccaaccccacggtgcatatcggcctgaaccagatccgcaccctggtgaacgacctgatccgtgagtacggcaagccccatgagatcgtggtggaactggcccgtgacctgaacgacagcgccgaggagcgccgcaagaaactgcgcaagcaggcggagaaccagcgggacaatgaccggcggcgccggcagctggctgacctgggccaggccgtgacgggggacaacctcatccgcctgcgcctttacgatgagttgccgttcgacggggtgcagcgccgctgcgtctacacgggggagcccattgggctgaagcgcctgttcgacggcgacatcgacatcgaccatatcctgccctacagccgcaccctggacgacagcgtcgccaaccgcatcctgtgcgtgcgccacgccaaccgggacaagcgcaaccaatccccgtgggaggcgttcggcgacaaccggcggcccgggtacgactgggcggacatcctggaccgggtgtggcgcctgccgcgcaacaagcaatggcgcttccagcccgacgccatggaccgcttcgacaaccaggacgccttcctggagcggcacatgaacgacacccgctacctctcccgcctggcgcggcagtatctcagctgcctctatgacctgcggaaccagggggaccgggtgcgggccatgccgggcaccctggtggggctgctgcggcgcaagtggggcctgaacgacttcctggccattgatggcgagaagaaccgcaatgaccagcgccatcacgccgtggacgccgccgtcatcgccatcctggaccagcgcaccatccaggcggtgcagacggcggcgcgcgcggcggaggccaaggacctggaccgcctgctggaggatttccacccccgccacaactggttccatgaccaggtgcgcgaccatctggcccgcatcgtcgtgtcggtgaagccggaccacggcgtcaccggccgcctgcatgaggacaccagctacggcatcctgcccgccgtcggggctggggcggatggcaagagcgcgccctacgttcccgccggccataccttggtccaccgcaagggcttcgacaccctgacgccgaaggaggtcttgcgcatccgcgacccgctgttgcgcgaaaccctgctgacccatatcgcggccgaggccatccagggccgcgatcatcgccaggcgctggaaagcttcgcgcgacggaaagaccataaatggccgggtctgcgccacgtgcgcctgaccaagccggaagcctccttcgaaatcatccgtcgccggcacaccggcgcgccttatcgcgccgtggttcccggcgacaatctgtgcgtggacgtggtgcgcctgcctgatggcaagtggatggggcgggccgtcaccctgttcgccgccgccaagcaggcgggggccggtggccggctgccggagccggggccggacgtggtcatgcgtctgtacaagggcgacatgatccggctggaacaggacggcaagttgcaggtcatgcgggtgtggggtctggatgtggccaaccagcgcctgcgcctggcgccgcaccaggaggggggcgagatggacaagcgccacgccgatccggccgatcccttccgatggaccttcgccagcttcaacgtcctgcgccgcaaggccgcgcgcaaggtagtggtgacaccctcgggtcggctgcgcgaccccggcccgccggcggacgccgcgtcccctgccgtggcggagtaggcgaccatggcgggacgggggcccgggcgggtgcctggacgggtggtcgatatcgcgaccgacggccggcacctgtccgtccaccggggcttcctggtggttgaggaacggggggacgaggtcggccgcgtgcccctggacgatgtggaggcggtgatcgccagcgcccgggcgctgaccttctccgccaacctgttgcaggccctggcggagcggggcgttggcctggtggtctgcggcaccaaccaccagccggtgtcggtgctgatgccggtggtggggcaccatgcccaggccggccgggtgcgcgatcagatcgaggccggcaagcccctgaccaagcggctgtggcaggggctggtgcgggccaaggtggaaaaccagggcgcggtgctggcgcgcatgggcctgccgcacggggccttcgccaccctggcgcgggccgtgcgctccggcgacccggacaatatcgaagcgcaggcggcccggcgctactggcccctgctgatgggcgcggagttccggcgcgacgccgacgcgggcggcgtcaacgcgctgctgaactacggctacgccgtgctgcgcggggcggtggcccgcgcggtgctggccgccggcctgcatccttccatcggcgtgcaccacgccaaccggggcaacccgctgtgcctggtggacgacgtcatggaaccgttccggcccctggtggacgccgtggtggtggacctggtccgccaaggcatggatcaggtgacgccggaggccaagcgccagctggccgccctgctggtcatggacatggccaccagccggggcaccacgcccctgtccacctgcgtcatccgcctggcggcctcactggcgcaggcgttcgaaacggggcggccggacctggatctgcccctcacccccttgccgctggacctggtggccggcgatacgggccgtgaccggggagcgacggagggggcggacgatggctttgaatgggtacaggatcatgtggatgatggtactgtttgacctgccggtcctgaccaagccacagcggcgggcggccacccggttccgcctgttcctgttggaccagggtttccacatggcccagttttccgtctatctgcgctggtgcgtgggcaaggaacaggtggaggcgctgtcccgcaaggtggccaccaacatcccgtccaagggcagcgtccagatcgtcaccatcaccgaccggcagtatcagaacatcggcacctatgatggcaaacgccgcaagaccaatcaaaaccccgcccagctggccttgttctgaggcccgtgtggggatttttgctgggactggaaccggaaacagcccttcttttcaaggggttgtttccggtccgagtttagccgatagggatttgcggtccagccgcaaccaccctcggcctcggccgccatcttccattagtttagccgatagggatttgcggtccagccgcaacggccagaagaccggctactgcgccttcaacagtttagccgatagggatttgcggtccagccgcaacggcgtcttgtgcgtagtcgatttggacatcagtttagccgatagggatttgcggtccagccgcaacggcgtcttgtgcgtagtcgatttggacatcagtttagccgatagggatttgcggtccagccgcaacggcaccgccggtggtagcctggcaatctccagtttagagcgagatgattttaggttcgcacataccctgcattggcgaggtagtttgaacactctgcgggagtgacggtttggagagttttgccgatggcggcacagaggccatcggcagatcgctcttgagcttgacgcagatgatgcttgagtttggcgaagaactgctcgatggggttcaggtcgggtgagtattttggaaggaagatcaccctagccccggccgcccgtatggcatcccggacggccttgcctttatgtgagccgagattgtccatgatgacgatgtcgttgggcttcaatgtcgggacaaggacctgctcggtatagatcctgaagcgctcgccgttgatcggccccttgatcagccacggcgcatccacgcgatcttggcgcaacgcggcgatgaaggtcatggtattccaatggccgaagggggccggaccaggtaaccgttgcccacgcggggcccagcctcgcaacggcgccatgttagtcttggtccacgtctcgtcgatgaacaccaatcgagacgggtcgatccccggtcgcagtctcagccatcgctcacggtggcgggcgatgtccggccggcttctttccgtggcgaccaacgtctttttttataactcagtttctcagcatgcacgaactcccaggacgagcggtagtccaccttcaaattcgggtccgccagctcgcg

SEQ ID NO: 2789 - DNA, 23504 bp, synthetic construct
  source 1..23504: mol_type = other DNA
  misc_feature 1..23504: note = Synthetic
taagtttacaaaaagatctaatacttgtaacacttggagatatgataaaagttccaggaagtaaagggagtttacaaaaagcaagaagtgaaggtgctgatgtaagatttgtctattctcctatggattgtttaaaaatagcagatgagaacaaagataaaatagtagtcttttttgcaataggatttgaaacaacaactccaatgacttgtactttaatggagcaagtaataaaacaagatattaaaaatattctgtttcatataaatcatataacagttccagaagtaatgcaagttttagtacaagatgaaaactgtaaaatcgatgcttttttaggaccatcacatgttagcgttataagtggaagtaaaatatatgaagagtttcctttgagctataataaaccagttgttgtaagtggctttgaaccagttgatgttatgcaaagtatttcaatgatagtaaaacagttcaaagaaaaaagagccaatttagaaatagagtataaaagagttgtatcttatgagggaaatctaaaagctcaagaacttataaacagatacttcaaaaaagttccttttaaatttagaggaattggagaagttgaaaatagtggttatgagttaaaagatgagtttgataaatataatgcaaaaatagtttataaagatatattaccaacacaagaagtaaaagagaataaagcttgtaaatgtcctgagattttaaaaggtattgcaaaaccaactgattgcaaaatctttggaactgtatgtactccaacaaatcctattggttcttgtatggtaagtagtgagggtgcttgtagtgcttattataaatatgggaatttgttgtaaaatagtaaatgcaaaatacaatatatgaatatgaagagataaaagaagaaaacaataaagaattaagaacatatattatagataattcttctcttcatcaatattttaaacttgattggaaaactctaaaagctagacaatattgtgggattttaaattttaataatcaagatttttatatcttgcctaaaattgcaaatcacaatgatgaaaaagatgctaaacaaaatctaaatatatttatttatatgttgatgtatgcttatgatgtaaaactatcaaatgagcaaatagcaaattgtgcaaatcaagaacatactattttagaagtatttgtacaaatgtttgcaataaatcttttaaatgaattaaagaaaggtttatataaagagtatttaactaaacaagataatcttccagttctaaaaggaaaatatctaataaatgaaaatctaaaatataattttacaaaaaacaaaatctattgcgaatatgatgaatttagtgaaaataatagtttaaatcaattttttttatatgctataaaatatcttcaaaagtttgtaaatgataagaaacttctaaaacagtgtgaattaatttttgatgagattgaatataagtcagtagatataaatagagttgaaactataaattttaatagactaaacgtgcgttttaaaacaagttttgaaatagctcttttacttttgagacaatctatcccactatttcataaagataaaaaatcatttgcatttttatttgatatgaatgtgttgtttgagaagtttatggctagaattgtaaaaagcttagattatgatgcaaaaatacaaaatcaagataattttggagctttaactttaaagccagatataatactaaaaaatcaaataatagatacaaaatataaaagaattaaatcaatagaagatataaaacaaagtgataaacttcaagcttttgcttatggaataaattatggagttaaaaatgtaatgcttttatatccaaaagatgaaaaagatgtcatatatgatttagttttaggaaaagataataataaagtagagttaaaaatacgaacaatagatttaaattatgataaagatagttttaatgaatatatttatgaaattagaaatcgaataggagaaattgtatgaatagaaatatgttactaaatgatgaaatgataaaaaaaattattgaaagtaaagaatttttttatcaaaagctcaaagattattttcaaagttacatgagatttgatatatcagatagggaattaaatgaactattaaatattgtagaaaataagagacctttctcttttaaagaattaatagaacaagattataaatataaagatatattgcaattaattggaaaaatgatttcaatttttgatgcaaatggatataacaaaaatatttggaatccttatgatgataagagagttattgcaaaagctaatgtaagacaaaatatttggactaaaaaccttatcgtctacaagttgacaaaggatattactaaattatcttcagatagtgtaaaaaatgcaattttatatattcaaaatccaaaaatgaatttaacacaattatcagaagaacatcgaagggagacatcaaagaaattattaaaaaatgaatataatccagataaatattttgaagatataaaaaattattttaaggatatttttaaagatataaagttaaataatgatgataatatgggtttattattgtcatacataatatattcggataaattcaaagatatttggaatgaagaaaaaaaagaagattttaatattgatacgaataaagtaataactatgaaaacaaaaaatataatgctttatggtgctccaggtgttggtaaaactcataattataaaagattaattactatgattgaaaatggtgaaagtgaaagaactatttttcacactatttctaaaaatgaaactacaaatgattttgataattcaatttttgaaacgattaaaaatgaaaaaagaatagagtttgtaacttttcatcaaagttattcttatgaagattttattgaaggatttagaccaaatgaaaatggagatattgaattagataaaaaaggtggtgtttttaaaagaattgcagataaagcaagagaaaatttagaagaatcacaaaaagaaaaaattcaagtaaaagaagaaataacatttaggcaaaaattggatagtttcatagaaaagcttgaaatagaactagaaaaaaaaggttattatgaaataacagatgcagcttatataagtagcattgatagtgatgcctttagatataacataagaaaagaaaatcccacatataaatatgatttacgaatgaaatttgaagatttatttgagtttgaaaaaaataaagtttcttcaagacaagatataaaaaaacttgaaactatcaattctttagcaaatcaacatgcaacttattattataaagtttttagcgaaataattttaaattcaaaagatataaaaataaatgataaagaaataaacaatgtagaacaaaaaaatttctatattgtaatagatgaaataaatagaggaaatatctctaaaatctttggagaattgattactcttatagaagaagacaaaagagatgcttatgaagttacacttccatattcaaaagagaagtttaaaattccatctaatttatatatcatagctactatgaatagtacagataaatctattgcaactattgatatagctttaagacgaagatttacatttttaaagatgaaaccaaatattgatttagttccagatattgcaaaagagttgtttataactttaaatgaatttataggaaaaaatctaggagaagattataaacttgggcatagttattttatgcaaaacatggatttagagtttgtaaaagagtataaaataaaaccactacttgaagagtatttttatggagatgaagaaaattataaaaaagctttaaaaattttaggatttgaaaatgaagctaacaaacaataatatttatcaagaaatcaaagaattactttatagtgcaaaaaatagagtttatcaaactataaatactactatgacacaaacttattttcaaataggtaaaagaatcgtagaggaagaacaaggtggagaaactagggcagaatatggaaaatcactattaaagcttctatctgtacaacttattaatgaatttggtaaaggtttttctgttgataatttggaaaatatgagacgattttatttagcatttcaaaaatcggagacagtgtctcggaaatttgagttaagttggtcacactatattttcttaacaagaattgaaaatataaatgaaagaaatttttatgaaatagaatcaatagaaaacagttggagtttaagagagcttaaaaggcagttcgatagtggactatttgaaagacttaagctaagtagtgataaacaaaaagtaaaagagctatctttgaatggtcaagttattcaaacagcacaagatttaataaaagacccatatattttagagtttgtgggacttcctgaattgtcaagttacagtgaaaatgaattagaacaaaaacttattgataaattagaaaattttttactagaactaggaaaaggttttacttttgttgcacgccaaaaaagaattacaatagatgaaaaacattttaaagttgatttagttttttataatagattattaaagtcatttgtagttattgatttaaaaataggtgagttaaaacatcaagatattgggcaaatgatgatgtatgtaaattattttgatagatttgaaaaaacagatgatgaaaattcaactattgggattattctttgcaaagataaaagtaaggcattagttgaattaacgcttccaaaagataataatcaaatatatgcaagtaaatatttaactattttaccgaacaaagaagagtttaaaaagttattggaagatgaataaaatgaacatagaaaaaataaaacaaagaatacaaaagtttagtgatgatagaaattgggatgaatttcacaatcctaaaaatctagttatggcattaaatggcgaagtaggtgagctaaatgagattttccaatggctaaattttgaagagtgtatgaacttaccagatgatgtaaaagagcatacaaaagaggagattgcagatattgctatttatcttatacgaatttgtatgaagcttgatatagacctcgaaaagacgatattaaataagatgactaaaaatgaagctaaatatccagttgagacatctcaaggtggaagtaaaaagtatagtaaaagtagggaaaacagataaatgacaaaaacaataacactagcacacggaaatggtggagctgaaaacaatgagttaataaaagaggttttttatgaagcttttaaaaatgagattttagaaaagagtgaagatgcagcagttatagaaaatggaacattagcttttagtacagatagttttacagttactcctcttttttttaatggagcaaatataggaaaacttgccatttgtggaacttgcaacgatttagcaatgatgggagcaaaaccaaaatatcttacatgttcagttattatagaagagggttttgaagtagaacagcttgaaatcatcgtaaactctatgaaagaggagttagcaaaaaatgaagcaatcattgtaagtggtgatacaaaggtagtgccaaaaggtgcggttgataaaatttttataaatacaactggtattggagaaattttttatagtggaattagctcaaatagtatcacagaagatgacttgattcttgtaagccgtgacataggagctcatggagctactatatttactgcacgagaaggtatggatatgcactcaaatttaaaaagtgattgtaactctttatatcctcaagtaaaagctttgatagatagtggtgttaaaataacagctttaagagatgcgacaagaggtggagtgagtgctgtattaaacgaatgggcgaagcaatcaaatatttgtatagaggtggaagaagagaatattccagttagtgatgaggtaaaaggaatttgtgaaatgcttggatttgaagctacaaatctagcaaatgaaggaacttttgttcttgctatatcaaaagaagatgcagccaaagcgatagaagttttacataaatttgaagaggcttcaaacgcttgtattattggaaaagtaactgctcaatacccacaaaaagttattttaaatagttcttggggaacaaaaagatttttagatacaccaactggtgaattgcttcccagaatatgttgataaactaagtgcaactcgttgcactctttagagtttttgcttctttttagcagaatttatttctgtgttaaaaaagaagacttaatattgaaaatgtccctttttgaatgggacatttaaaaaggagactattatgcatgagtattcaattgttcaatcactactagagagttgtgaagaacacgcaaagtcaaatgatgcaaaaaaagttacaaaagtagttgtaaaaattggagttttaagcggagttgagccagagcttcttcaaacagcatttgatacatttaaagaacaaacagtttgtaatgatgcacaatttatagtaaatgttcaacaaatagagattttttgtaataaatgtaatagtagttcaactttgcaaaaaaatgagtttgcttgcccaaaatgtgaaagtgttgatttaaaagtaacagatggtgaagatatgtatcttatgagtttagaatttgaataatatggttctaaatttatataagaaatagtaaattttattttacataaactaaagataattataatttcacaaaataaaacaaggaatttttatgaaaaaagtaatttcagctttagcattaacagctctttttgcaaatgcacattttttaactcttcttccaactagtgataatattgaagataaaaaagatgcaaatatcaaaatagaggctatgtttattcacccttttgaacaaagtggtatgaatatggagaaaccaaaaggtatttttgtaaataagagtaaaaactctctacctttaaaagagagaaaaaagtttgaacacaaagcttgggaaacttcatattcaatagataaaccagcagtttataagttttttgtacaacctgagccttattttgaagagtcagaaggtttatttataagccatgttccaaaagtgatagttagtgcttttggtgttgaagatggatgggatgagccaattggtttaaaatatgagatagttccacttacaaaaccttttgggctttatgctggaaatatttttcaaggtatagttttaaaagatggaaagccacaagcaaatgttgaggtagaagttgaactttataacgagtttgatttaaaagctccaacatcttcacatattactcaaagtattaaaacagataaaaatggagttttctcttttgtgatgaatcataaaggttggtggggatttgcagcactaattcttgagggagaaaaagagttgaatggtaaaaaataccctattgaaaatggtgcattactttggttaaaagcttactaaaatgcatattagtgatggtattttaagtttagaagttacagtagtttcgactattgtagcttttgctttttttgtttactcttttagaagtttaaataatgaaaagatagttttagcttctgcttttagtgctcttttttttgtagcttcatttattcatataccttttggaccaacacaaattcatctcatgcttttaggatttattggagtatttttaggaagtgttgcaatattttctatatctttagcacttattttacaagctttacttttaggatttggcggaattagctctattggagtaaatgttttgattatgggattagcttcttatttagtatatattatttttaaattaaattttttaaaagctttaaatgaaaaagtgaagttttttttaatcggatttagtggagtttttatatctacttttattttatttttacatcttataatttcaaaagatgagtatgaaaaactctcttatactattatttttgcaaatatacctactatgattttagaaggtttagttacactatttttatttttatatattaaaaaaacgatgcctagtttattaaaaggattaaatatatgagattttttttaattttagttttaccaatattcttatttgctcataaagtaaatctatttttagacttaaaagatgataatctttatatcaactcatatttttcaaatgctaaaccatgcgttaattgtaaatttaaaatagaatcaaatgaaaaattagtttttgaggatattttagatgaaaaaggtgagtacaactataaaacatctttaaatgatttaaaagttattgtagatgctggaagtggtcacacagtaatgaaaaaaataaaacttcaagagcaaaaaaatgaagaaaaaacagtacaaacagaaaaaattgacaaagagatagagctattattagaagaaaatagagtacttaaaaatcaaataaatgttttagaagagcagttaaactatttcgaaatttttaaaatagtttttggcttacttttaattgttttaatttttataattttaaaaagagtaaaaagagttaaaagttgagtttaaatccagctatttctcttttaagtgctattgtttttagtttacttttaagcttttcaaacttagagataatcttttttattcctgtgatttttttgatatttttaaatctaaaatatattttaaaaattttgaaaaaactactattattaaacttttttatagtttttttagtactttttttctattttgaaacagattttaatcaagcttttaatctattttttaagataaatttgattattttatttaatcttttattgttctcttcttcaaatggttttgatattgtaaagggatttatgatactaagatttccacaaaaatttatatcggctttatattttacagtaaaacttatttttgaactaaatttagaattaaagaatattaaattatctttgaaagctagaaattttaaaccaaaaacagatatatttacttataaaacatatggaaatatatttggaatactatttttgaagatgattttaaaatcaaatagtttaaaagagactcttttgcttcgaggttttaaaaatcaaatatttttaaattatgattctaaaatatatttatatgatattgttttgctatttttgatcttctttatttttgtcttaaaggtttttttatgagttgctcactaaatttaaaaaatatttcttatgtaaaagaagagaaactattattcaaagatataaatattgatttaggacataaagaaaaaattgcgattgttggagcaaatggtgttggaaaatcaacacttcttaaaattatggcaggattaattgaaccttcatttggtgaaattgagctatttcataatttgataaaaaacaaaaaagattttgaaaaatatagagatgatataggatatttaccacaagatgtgagtagtttttttctttgtattactgtgattgaagatataatgttttctttgcaaactttaggaattggaaaaaaagaagcatacgataaaagtaaagagatattgaaaaatcttaatatattacatttagaaagcagggttatttatgagcttagtggtggtgaacaaaaaattgtagcacttgcttcaattttagtaaaagagccaaaaatcttgcttttagatgaaccaacaaatgctttagatgaagagagtgaaaatagaattttagatattttaagcaaaatagataagtctatgataattgtttctcatcacaaatctttcattgaaaaaatagtttctaagatttataatttaagttctatataaaattataaaaattattacaaatttattattccttgactaagctgcaatattgtaaacttaaaattatttaaaattttacaaaggcaaggaaaatggaaaaagttttaggtttggatttagggattacatcagttggttcagctttaatagatttggattatgaaaatttgaaaaatacaaatattttgcatagcaatattaggatttttgaagcaccaataacaccaaaagagaaaacttcactacagctaataagaggtgaaaatagaagagctagaaatagtaaagaaaataattcaataagaagaaaaaaaatagttaatatcttacttaaatacaaatttattgacaaaaatgagataaaaaatataaacacaaatcttccaaaatcaaaagtaaaaagagaaattattgtaaaagttgcaaactatctttttgaagataagaaaaatgcaaataacattttagaactaagatacaaagctttaaatgaaaagctttcaactatacaacttgcaagacttttatatagtatgaataatcatagaggagtatcttatgaagatacaagaagttctaaaaatattccagaaaaaaaacttgaagagttttctaaaaaagatataaatgagtatgctgacggaagttcagataaattgctgtatggacttttaaattttaaaaatgcttttataaattcaagtaaatatcaaactgtcggagaatttttatataaagaatacaaagaaaagtttagaaacagtccaaaaagatttaaagatacaaaacaatcagattttatgtttgttattcctagaaaaaatatagtagatgaattaaattttatttttaaaaaacaaaaagagtttaaaaacgaagttataaatgatgattttatcaaggagtatctagaagcttttgagtgggaagaagatagtccagcttatgatgaattagttgcaaattgttctataaaagagaatgaaaaagcagcttcaaaatatttagtagaatcacaattttatatctatttagaaaaactatacaatttaagttataaaacaaaagatgagtatagatataaaaatttagatatagaaacgatagttaagataataaaacatataaatacaaaaactataaaatactcaaaactaagagagcttatagaaaaagagctaaatattcaagatgttatgtttaagggcgttagtgactatagtaaatattttatagatttaactatctttgtaaatttagcatctattttatcctttccaataaatattttagaactttttaaagatatagaagcaaaagagttgtttaataaagttgtaaatattttagcttatgagccaaaaatatctcaaaaagagaaaaaattagaagagctaaaaatagttgatgaaaaaatagttgacaagcttcttgaaataaaaataaaaggaaatttatcatattgtaaagaggttttagagcagatatgcaatggaatgttaagtggattaataccacattatgcaaaagaagaagttcaaaaagcatatccaaaaaaacctatcataaaaggacatcttcttccgccacttttggatacagattttcctatcaaaaataatcaagttgttgtaagagctttaagtcaaatgagactagtgataaatgatactttaaaacactatagaaaagtatatgaaaatccaaactggttttttgataaagttgttatagaaacagcaagagaatttttaaataaagagcaagtaaaaaaatatgatgatagagcaaaagaaaatgagaaattaaacaaacaagccatagagttttgtgaaaagtatggtaaagcttatcctgcaaaagaggagattttaaaagcaagattatttttacagcaagatggattagaattgtatcctagcgaatataatatatctacaaatagtgcaaattttaataaaatagatgcacaaagacttttcgatgaagcatattgtgaaatagaccatactttaccaataagcagaagtttagatgatagtttttcaaacaaaactttggttttatcttctacaaaccaaaataaaggaaataaaactccttatgagtttttaaataaagagttatttgaaatcatggaagatagcttaaataaaaagataaatattttgggatataaaaaagtttcaaatcttacaaacaaagagttcaaagagttagatggttttatagcaagagatttaaatgatactagaatgattacaaaatatgctggactttatattcaaaattatttagcatttccaaaaaatgataagataaaaagaagagtttttgcaaacaatggaaaaattacatcacttcttagaaaatcttggggtattggggcaaaaaatagaaataaccatctacaccacggagaagatgctatattaatcgctcttagcgataactctttaattaagaatatatctacatattatggtatccaaacagagttggaaaagttagatttttcaaaagatggttttgataaattatttaaaaataacaaaaatataaaagaatacatagtaactgaattaaaaaaagaagatatcgatattgaaaatatcgatttttctaaaattagtaaaaaagagattagttcaaaaatatttagaataatcgcacaaaaatcttatcctagagaggattttttagatatttttagaaaagccatacatagtgctattgtaactcatcaagaaagagttaaaataaatggacaaatacataaagatacattagaaaaattatctaaaaaaacaaatgatgatgtagttttagtaagaggtggatttgctacaaatggagaattcataagatatgatgtttttaaaaatagtaagaatcgatttgaatttataaaaataactgcaaaacatcatggagtatcacttgataaattaccacttccacaagatataaattcaaattttttattttcaatctatccaaaaacttgtttgaattttataattgaagagcaaaaagaatttaaagaactaaagggtttatttagaaagatttctagttcattatacattgactctataaaaagcatagaggatgagttttttaaatttaaattagagtctttaagtatagattatttactctctgatgatttaccaaactttgaaaaagaacatcttaaaaaaatacaagaacttttaaatattggtaaattagataaaaaaaataaaatagaaacattggcaaattttgtagaagaatcattagtaaaaataagaaaatatattgaagaatattttagctcttataaaatattttttacttttgataaaacaacatcaaatgagacatttttactaaaaagaaaattaaaagatttaggaagcattgaagaattgaatgatatattaatttcaacaaatacaataatttttaaaattagcgagaaaaaattaattagtccttatttcgttttagctagtacaaaaataaaatctataaaaaagattaaatcagacatttttggaaatgaagaaataatagaaaatgaaaaaagagagcctttgctagaaaaataataaaaatttaggaggaagttatgaattttagagttgtatatattgcaaatccttgctctttaaattttaaaaataactcacttgtagttaaaaatgaacaaggagaaacaaatgttccactaaacgatatatctactattttaatagataatcttcaagtaaatatatctgcatttttgttatcaaaaatatcagagtcaaaaatagttttaataattgtagatgaaaggcatctgccttgtggagttttacttccatttagtggaaaagtaagaatgatggaagcatataactatcaaatgagtttaaaagatgattttataggagatttatggaaaaagatagtaaaaaataaaatagaaaatcaagcaaaagtactagaatttggaaatcagctaagctttataaaattaaaaaactatactttagaactcaaaccacacgatagtacaaatattgaaggaagttctgcattattatattggaaaatgattttttcaaactctttagactattttactagaaacaaagatgatataagaaatagttctttaaactatggttatgctattttaagaagtattattgccaactctctaacatgtaaaggttttatcttacatcaaggaatacaccataagaatcaacaaaatcagtttaatctagcagatgatattatagaaccctttagaccttttgttgatttggaagtttacaatatgtttgagttagagggaattgatgaagaaaacctaacaaaagatataaaaaagagattgttgtctattgtagatgctacagttttgataaacaatgaaaaatttactatgctaaatgcaatagacaaatacacagattctctttttaattcatttaaaaaacaaaatataaatgagctaatagaagtctcaatatggatttaaagtttatgtatgttttagtaatgtttgatttaccaacactatcaaaaaaagatataaaacgatatacaaaatttagaaatagtttgctaaaagatggttttactatgtttcaatacagttgctatttaagaatttgtaaaagtgcatactcagcaaaagctcatatagattttgtaacaaaaaagataccaaaaaatggagaagtaagaattttaaaacttacaaataatatttacaatagcatggagattattaaaaaaggaaataaagataaaggtacaaatgaagaaaaactaatgactcaaacagtcatagaattttaaaaaagtaggtatagaaaacaagttcctataccaaagttttcttctacatattgtagaattgttaaaccacctaccccaaagcaaaacacgatttagcattttatttagattatacttaaatctaaataaaatttttaaactaattaaaaccctattgtatcgtattttgctttagagtaggggtctaattaaaggcttctttaaatgttgtgtagccgtattgtatcgtattttgctttagagtaggggtctaatttttttaatcttttctagttgagttttttgattgtatcgtattttgctttagagtaggggtctaattatcgctatcaatataaaagagaataatatattgtatcgtattttgctttagagtaggggtctaatgtttgatgatattttgatggtgctgtaataattgtatcgtattttgctttagagtaggggtctaattgaacattaaaatgtacattcattaagaaaattgtatcgtattttgctttagagtaggggtctaattatctcatatcaatcatttagctacctaaaattgtatcgtattttgctttagagtaggggtctaatataacttacaactctcataattagctttgtattgtatcgtattttgctttagagtaggggtctaatgcaactccaaaagaaccaaaagatagtaaaattgtatcgtattttgctttagagtaggggtctaatagttgtgacttagctaaactaccctctaaaattgtatcgtattttgctttagagtaggggtctaattttgcctagtgttaaatctttaaagtttttattgtatcgtattttgctttagagtaggggtctaatttaatcatagtttcataagttacccaactaattgtatcgtattttgctttagagtaggggtctaatatgatggaggagatactgcaaaatggagatattgtatcgtattttgctttagagtaggggtctaatatcttttctaggctcttttttaatgactcaattgtatcgtattttgctttagagtaggggtctaattagcttccgtttgagtcttttgctctatttattgtatcgtattttgctttagagtaggggtctaataaccatcaccagtccaacttgtaacagtttattgtatcgtattttgctttagagtaggggtctaattatttgctgtaaatatccaacacgctgaaaattgtatcgtattttgctttagagtaggggtctaataaaaattatgtattagaagtaaaaaataaaattgtatcgtattttgctttagagtaggggtctaattaagccaaataatataactatgaatttaatattgtatcgtattttgctttagagtaggggtctaataaaatatccacactcatctataaagctaacattgtatcgtattttgctttagagtaggggtctaatacaatattgtaaatctgttcagcatcaaagattgtatcgtattttgctttagagtaggggtctaattggactagctccaacagttattgatctaatattgtatcgtattttgctttagagtaggggtctaatctgagaaagataatttaaattctacaaaagattgtatcgtattttgctttagagtaggggtctaattaagattgatactatatcctctaagcttgtattgtatcgtattttgctttagagtaggggtctaataaatctgcctaaagtatatccccctccaaaattgtatcgtattttgctttatagtaggggtctaataatattaaatcagcacttgtccaagaagtaattgtatcgtattttgctttagagtaggggtctaatagagtttgtaggttcacctcttacacagtcattgtatcgtattttgctttagagtaggggtctaatatattagtttctggattaacacctgtacttattgtatcgtattttgctttagagtagggggtctgattaaagtgttcatggttcatgggactaaaagtccaatttctaaaaataatgcaaatcctattataaagtaaattaaaatgtatgaaattaaagttttgttttcaataattaaaaaatatgataaaatctacacaataatataacaaaagttattttataaaaatatacaaatatgcttattgtagctattaattaaaaataaagaagaaaaatgaatataataaaaaaactatttacggatttagaaagtttattaaacttattggtagattttgattatagtaaactaatattattagcaataatcttatcaataatatatttaattaacaatattatcttaaataaatactataaaccaggcataaataaaactaaaatagagttaaaaaaaatcaatttagaagcagctttatataaaaaaaggaaatatttattaaaaacatatttgatattatttataatcatctctttttttgttatctcaaaaaataatttatcaataataattcctatattatctgcatttattttaatatctttattctcaatgaaagagcaattaaataatatgtttttaggtttttcttataaatcagcaatttcaacaacaatttatgaaggtatggagttctattttaaaaacaaaccaaatgaaatttgtagagtaacaaaagttaatttatttaaaacaatatataaaaatgagatgagtggacaactattttcacttgaaaataaagcattaaatgagctagaaataatacataaagtagttaaagatttggattatgtggagttcaaatatatagtaaaaagtgattacccatttgaagaatatgtaaaagagacaaaagagaaattaaacaactatataaatataatagaagtagattttaaaacattaagagaaactattctatcactaaaatcaaaatataactcaacaccttttttaaagccattttataaaatagatattgagtttgatacaaaagaagatgtaataataaaattaaaattaactacatacaaatataattacaacaactatttagatgattttttaaagtttagaccaaaagtaattaatcaaataaataatgatttaaataatatctataaagaggtttagttctctaaatcctcttgaatagaggaaattccaaattcataatttaagttctttataattaaatttatttaatcttgattatataccccaaatctttaattgtagcaatagtatctgtatcaattttttctaagtctataaaccatatttctaagagtattttcatctacactagctttaaaaacactattttctattatattttttgaaattaaatgatttgctttttctaaaagaagttataaaaatagaacctcattttttgtaagagtaattttttcaccattttttataatatttttatcaacaaatgagtagtagatattttcatctagttttatttgtagtaaattattttcttccatatatttaattatattttcaaaaacttttattaaatcatcatataaaataggcttttcaatatatttgataagatttaattcaatagcattaagaagtttctctttatctgtatatgttgattatgatgaattgtatggtattttactttagagtagtagtctaatattaaaatctaagaaataaaaacattgtttattgtatcgtattttgcttgagagattttagtttcctaaagcctctttaatagcaaaaatctcatccatagttttataaagttgttcaatactaagcatatttggtccatcgctttttgctgtttttgggtcaatatgtgtttcaaagaaaaatccatcaactccaacactagcagccgctcttgccatatatggtacaaatgagctatttccaccagtagtacctccagtgcttggaatttgtacactatgagttgcatcgaaaatcacaggagcatattgtcttaaaagtagcagatttctcatatctacaaccaaagcaccatatccaaaagtatttcctctctcacaaagccaaacaccagcttttttgctattttcatatgaaacttcacttattcctcttgtgtttaatactttttcaacagggtgtttcatagcatcagctgccaaaaactgcccttttttaatatttatttttgcttttgtttttgcagcagctactagcaaatctgtttgacgacacaaaaaagcaggtatttgaagtatatccataacctctccagcaggagctgcttgatatgattcgtgaatatcagtaaccactttgtacccaaactcttttttgattttttcaaaaatttttaaaccctcatcaagtcctggacctctaaatgagcttaggcttgttctgtttgccttgtcaaaactagctttaaaataaaaatcaactcttttatcttcacttaaaggtcttaatttttctgctatttttaaaactgtatccatatcttctaaaacacaaggtcctgtcataactgtcaacataatatattttccttttatttaattagttcccaaattttttaatttattattttttactaaccattattccactaattacaatcaaaattatacccaaaagcactataaaagatggaaaagcatcacctataaaaagtcctaaaattattgaaaatgcaatattgctataagagatagtccctacaattccagctttagcaagagaatatgattttgtcatatatatttgtgcataagtagaaaaaactcccaataaagctataaaaatccagtcttttgacttgggcattacaaaagttcctagcataaaatcaagatttggatttgtgtaaaactcacttactatcataaaaatcaaaggcaaaattgtaccaactgccataaaagatagaactatggctcttccatcataaaatcttctaagttctcgtattgaagtatatgcaagtgctgctccaacacctgataaaattcctaaataatctgttttttctaagctacttccatcaaactcggctataaataaaattccaataaatccaataaatacaccaatccaacctttaaatccaatatgttcttttagaaaaaaatatgccaaaagtgctgtaaatattgtagatgttttagaaaaagtcatagcttcacctaagggtatatttgcaatattataaaagaaaaaaagcaaagcagaaaaaccagcaactcctctaaaaataagtaaccaaaattttccacctagttgattaagtgggcttttatatatagaaaatagtataaaaaatactccaaaaacatttctaaaaaatacaatttcaatagtgcttaatttatcgctaagttcctttgcagcaactcccattaaagcaaataaaaaagaggcaataatcatatattttatagctttatttacattttcttccaatccaaaatccttttaaaagcaaaagtattgcaaaatttgggttaaagcaatatttcgataaaatcttaaccattttaaacattatttaggaaatttatggattatttaaaaatcataggaaatcaaaaactaagtggagaaatatatatttctggagcaaaaaatgctgcacttcctctaatagcagctacaattttagcaaaaaatgaaactatcataaacaatcttccaaatgtggctgatataaatacttttttaaagttaataaaaatgctaggtggaagttttactcaagataaaaatagggtagttatagacacaagcactattacaaatacaacagcgacttatgatattgtaaaaactatgagagcttctattttggttttaggtccactattggctagatttgggcattgtgaagtttcacttccaggtggttgtgcaataggtcagcgacctgttgatttacacttaaaagctatggaagctatgggagcaaaaattgaaatttgccaaggatatataaaagcaactgcaccaaatggattaaaaggtgcaaaaattgtatttgataaagttacagttggtggaactgaaaatacagttatggcagctgctttagcttctggagttacaactataataaacgcagcaaaagagccagagattgttcaattatgtgaagtaatagcaagtgctggagtaaaaatagagggaattggaacttctaaaattattattgaaggaacaggtggagaactacttgatattaaaccttttagtgtaattcctgatagaatagaagctggaacttatatgtgtgctgctgctattacaaaccaaaaattaactataaaaaatattgttcctgctcatcttgaagctattatttcaaagctagaagagatgaattttgaaatagatgtaaaagaagatgaacttacaatttttccaacatcaaagataaaaccagtaaatattataacaacagaatacccaggatttccaacagatatgcaagctcagtttatggcacttgcaactcaagctgaagggactagcacaatagatgagagactttttgaaaatagatttatgcatgttagtgaacttttaagaatgggtgcagatattcagttgaatggaaatatagcaacaattattggagaaaaaggaaacttaagtggaacagatgttatggcaacagatttaagagcatcttctgctttagttcttgcagcacttgttgctcaaggagagacaaatattcatagaatttatcatcttgatagaggatatgaagatttagaaggaaaatttttgaaaattggtgcaaatattcaaaggtgcaaagaaaagtaatttatgcttcataatattaaaaaactatttgaatctaaagaagaagagaaaaaagagttgaaatttaataaatttcagctctttttagatttggttaatagttatttaaaaagagagtatccaaatattacttttgatttatctttatatgaaaataatgaagaacaagataatttaaaaattcaaaaagctatgcttattcatgaagttataagacaatttacagatttcaaatgggaaaagataacccaaaaaagtgtaaaaaaagagattctttggagtggttatggggtaaattctcaaccaagcaaaaaaattccacaagattttctaagaaggaaagagttagttttttttagagatgatggaatttgcaatagatgtgggaatattatggataaaatacaaaaaagttctataattttggctcaggaaagtgatgaaaatggagggtataatgttgaaaatcttatactactttgttcaagttgttataatcttacacaaaatcaagataagagtttttcagaaattcctcttagaataagagatgatttatacgacttgatttaagtatctcatatttaatttgtgacaaatttttataccataaagatatattatccacgaaatataaatccataaaatagagaaaagtaaagttgaaagtgaaccataaattgttgtatatgttttgttgtaaacaacataatatataaaaagattttttgtaatactcaaagttgccaaagtcaaaaaagatgatataaaagctgcctttgttgagataaatttgtttacactcactttaaatagagcaaaaaagataagccaagtaaataagaataatagaatgttcttaaacaaattactatcataaaaactaagaagtaaatttaaaacaataaaaatagcaggaaaaactataaaaaagattgtgtatataaaaaatgatttatatattgctcttcttgttgtttgatgtattttatttacaatatagtcataatctttgaaaaacataatatatacaaaaagcatataaaatattcctacaaatcctaatttatcagagtttgatataaagttttttagagtatttacaatttcatcagagtgtgtagggtttagaaaatttagtaaaaaatttgtaaacatatcaagatatgagttaaactcttgaaattgtgaaataatagcaattccaagagcaattattggtagtattgaaaatatagtaaagaaactaagacttgcagcatagtagcttgtgtcatcattaaaaaatgtttcaacagctacaaatagctttttggaaatagtatttttactattttccaatttataatcccattttaaatggatttaaaatattgtttggatcaaaagcttttttgatacttctaaataaattcatctcagcctctgtaaaagcaatattcataaatggtgcttttgataatccaataccgtgttcaccacttaaagttccacccatatctacaactagttggaaaatctcttcaatagctttatgaccatcagccatctctttttcatttgttttatcttttaccataacatttacgtgaatatttccatctccagcatgtccaaaacaaggtacttggaaaccatatttctcaccaattttataaatctcatctaaagcctctggaagcttacttcttggaacacttatatcttcatttaatttttttgttccataaaccatagttgctggacttgcatttcgtcttgcaaaccatagttttttaccttcttcttcatcaagagcaactataaaatcaattgagccattctctttaaatgactcttttaaaatatttagttgatcttctatttcagcttcactacttgcatctacatctccaattaaaatcccaccagcattttctggcaatgaaacttgaggaaacttttgctttagtgcttttattacaagtgag

SEQ ID NO: 2790 - DNA, 6708 bp, synthetic construct
  misc_feature 1..6708: note = Synthetic
  source 1..6708: mol_type = other DNA
aatttcaatacttaaaaaaagttaattttagaaaaaatatattttaaatattttagagccacttgcaaattcaaatccttccaagtaactaattttctattttagctattctaggctttaaaaaaattatactgctcatttatcaagcaagatttttactttttacccataatttatctaaaaatcatatttttactccattctttatggtttgagtctaaaagcattggttttttgattgtaatttttgtaaacatcaagtaacaagcttcaaactttgatgaatacagatggataaaatcccaaatgctaaaactgaagctacttttgttgcaccttgataatagattgtattgcatccaaagtcatctttgagatatttatttactctctcaaccatacttctttggttataatgatgagtgtctgaattttgagggagaagtagcatttcaaatttccttttttcttctttttgaagttctattttggcttttaactcttttgagttttttggattgatatcaatgattggacaatggcctaactttttggaaaaatctcttatgatattactatcataacctgcatcttgtagatcataaagatagtttacccttttgcttgtctcatttataagtggcaaagcaacagagctatcatgcacattagctccactataaaatgcagctactggtatatctccatcaactgctgatatgtgaagtttccctcctatccatacttcacgattacctttagagttctgctttataccaacaccacaatgggttgaaacaagagacaacatctctttggttgtggtcatagtttgttgctgttgtagaatggttggctgtttaggttcttttacttcactctttttaggtcgtccaactttatttttaggattttcttctttctcaacttttacaggtttaactctaagtggtatttttgtggcatcaattgcgttatacataaacaccgtattggataaatactctttaacaaactgctcatgagtctttgcagctatctgtaaatcactaagttctttaaataccctactaaatttagactcacttggaatatcgcttttatatctccatccacaaatgattctaagggttctatcatggtgtagtctatcgattaaatctcttgttgtttgaaagttataaacactcttagctatgaaagctctagcaatctcttctctatctttaggggtgtttgtaatagagatgacggttatatttttctctatttgtgcaaaatctaaaatcttgataagtttttgctctttataggataactcttcaagccgtaactcttcttttaaagctgaaaataaagagctttcaaggtttaaaatctttgtccagatttttgataatcctgaagtgttgtttttaaaagaaatttttggtaagatactcattgtaaagcctatttgattggtgtttttggttgtttttgtgataagaaattataccatttacacgatgtcaaaaggctttttaaaattcaaaattacttaaattatgggttttttgtgggaatctgcaagtggttcttctatataaaattataaaaattattacaaatttattattccttgactaagctgcaatattgtaaacttaaaattatttaaaattttacaaaggcaaggaaaatggaaaaagttttaggtttggatttagggattacatcagttggttcagctttaatagatttggattatgaaaatttgaaaaatacaaatattttgcatagcaatattaggatttttgaagcaccaataacaccaaaagagaaaacttcactacagctaataagaggtgaaaatagaagagctagaaatagtaaagaaaataattcaataagaagaaaaaaaatagttaatatcttacttaaatacaaatttattgacaaaaatgagataaaaaatataaacacaaatcttccaaaatcaaaagtaaaaagagaaattattgtaaaagttgcaaactatctttttgaagataagaaaaatgcaaataacattttagaactaagatacaaagctttaaatgaaaagctttcaactatacaacttgcaagacttttatatagtatgaataatcatagaggagtatcttatgaagatacaagaagttctaaaaatattccagaaaaaaaacttgaagagttttctaaaaaagatataaatgagtatgctgacggaagttcagataaattgctgtatggacttttaaattttaaaaatgcttttataaattcaaataaatatcaaactgttggggattttttatataaagagcatagagagaaatttagaaatagcccaaaaagattaaaagatacaaaacaatcagattttatgtttgttattcctagaaaaaatattgtagatgagttgaattttatttttgaaaaacaaaaagagtttaaaaatgaagctataaatgatgattttatcaaggagtatttagaagcttttctttgggaagaagatagtccagcttatgatttattggttgcaaattgttctataaaagagagcaaaaaggcagcttcaaaatatttagtagaatcacaattttatatctacttagaaaaactatacaatttaagctataaaacaaaagatgagtatagatataaaaatttagatatagaaagcatagttaaaataataaaaaatctaaatacaaaaactataaaatactcaaaactaaaggagtttgtagaaaaagagctaaatcttcaagatgttatgtttaaaggagtgagtgattataaaaaggattttatagatttatctatctttgtaaatcttgcttctattttatctctttctacaaatattttagaactttttcaaaatatagaagcaaaaaacttgtttaatcaagtagtaaatattttggcttatgaaccaaaagtttcacaaaaagaggaaaagttaaaagagttaaatatagttgatgaaaaaatagttgatgaaaaaatagttgataatcttctggaagtaaaaataaaagggaatttatcttactgtggtgaagttctagaacagatttgcaatggtatgctaagtggattaattccacactatgcaaaagaagaggtacaaaaagcatatccaaaaaaacctatcataaaagggcatcttcttccaccacttttagatactgattttcctattaaaaacaatcaagtagttgtaagagcattaagccaaatgagactggtgataaatgatactttaaaacactatagaaaactatacaataacccaaactggttttttgataaaatagttatagaaacaggaaaagagtttttgaataaagagcaagtgaaaaaatataatgatagagcaaaagagaatgagaaatcaaataaagaagctatggagttttgtgagaaatatggcaaagcttatcctagtcgtgaagagattttaaaagcaagattgtatttgcaacaaaatggagaggagctatatcctagcaactatgacatatctacaaatagtgcaaaatttcaacaaatagatgcacaaagacttttcgacgaagcatattgtgaaatagaccatactttgccaataagtagaagcttagatgatagttttgcaaataaaactttagttttatcaactaccaatcaaaataaaggagataaaactccttatgaatttttgagtaaagagctatttgagattatggaagataaactaaataaaaatattaatagcttaggatacaaaaaagtttcaaatcttacaaacaaagagtttaaagagttagatggctttatttcaagagatttaaatgatactagaattatcacaaaatatgcaggactttatatagaaaaatatttagcatttccaaaaagtgagaaaacaaaaagaagagtttttgcaaataatggaaaaattacatctttacttagaaaatcttggggtattgggaaaaaaaatagaaacaaccacttacaccacggagaagatgctatcttaatagctcttagcgataactctttgattaaaaatatatctacatattatggtattcaaactcaattagaaaatatagatttttcaaaagatggttttgataaactatttaaaaataataagtcaataaaagaatatataataaatgaattaaaaaaagatggtatagatatagaaaatatagatttttataaatataacaaaaaagaaataagctctaaaatctttagaataatcgcacaaaaatcatatcctagagaggattttttagatatttttagaaatagtatagaaaatgctattgtaactcatcaagaaagagttaaaataaatggacaaatacataaagacacattagaaaaattatctaaaagaacaaatgatgatgtggtgcttgtaagaggtggatttgctacaaatggagaattcataagatatgatgtgtttaagtctgataataaaatagagtttaaaagaatagctccaaagtattgtaataaaaaggtagagttgttaccacaagcaaatgataattctgctaaatttatgttttctatatataaaaatggattattaaaagttgattttataaaagatgatgaattatttaacataaaaggaattttttcaaaaatagatgcagatgcaaaaggaattttaacttatatctatttgaattcagtaagaaataccgaagataatcttttcatatcttttgtttctggatttttaaattctacaatatacgatgatgcaattattggtgatgatagaaaaaaaattgaggaattgcttaaaaaaaataaaatcaaaattacagattctgttagagataaagatactattaagtcaaaaatagttgattttatgaatatagtaaaaagcaatactgaattggtaataggatttaacataataagaaataataatattttaaattctatacataatgatttatctgaatatttatataaaaaagatttaaaatatgatgttataataaatatagatggaaaaccagctacacctattttaaaaattaaattaccaatagatgataaaaagacaaatcttcctaaaatggtaaatataattaaattaaaaacagatacctttggaaatgaagagataatagaaaatgaaaaaagagagcctttaataaaaaaataaaattctaggggaaaatatgaattttagagttgtatatatcgtaaatccttgttctttaaattttaaaaataactctcttgtagttaaaaatgaacaaggtgaaacaaatgtaccattaaacgatatatctactatcttaatagacaatcttcaagtaaatatatctgcttttttactatcaaaaatatcagagtccaaaattgtactaattgttgtagatgagaggcatttgccttgtggagttttgcttccatatagtggaaaggtaagaatgttggaagcatatagctatcaaatgaatttaaaggatgaatttgtaggaaatttatggaaaaaaatagtaaaaaataaaatagaaaatcaagcaagagttctagaattcggaaatcagctcagttttataaaactaaaaaactatactttggagctcaaaccacacgatagcacaaatattgaaggaagtgctgccttgctatattggaagatgattttttcaaactctttagactattttactagaaataaagatgatataagaaatagttctttaaactatggttatgctattttgagaagtattatagccaactctctaacatgtaaaggctttattttacatcaaggaatacaccataaaaatcaacaaaatcagtttaatttagcagatgatattatagaaccttttagaccatttgttgatttagaagtttataatatgtttgagctagaagggattgatgaagagaacttaacaaaagatataaaaaagagattgttgtctattgtagatgctacagttttgataaacaatgaaaaatttactatgctaaatgcaatagacaaatacacagactctctttttaactcatttaaaaaacaaaatatagatgagttaatagaagtttcaatatggatttaaaatttatgtatgttttagtaatgtttgatttgccaacacaatcaaaaaaagatataaaaagatatacaaaatttagaaatagtttactaaaagatggctttactatgtttcaatacagttgctatgtaagaatttgtaaaagtgcatattcagcaaaagctcatatagattttataataaaaaacataccaaaaaatggggaagtaaggattttaaaactcacgaataatatttataatagtatggaaattattaaaaagggaaacaaagataaaggtacaaatgaagaaaaactaatgactcaaacagtcatagagttttaaaaaaaagtaggtatagaaaacaagttcctataccaaagttttcttctacatattgtagaattgttaaaccacctaccccaaagcaaaacacgatttagcattttatttagattatacttaaatctaaataaaatttttaaactaattaaaaccccattgtatcgtattttgctttagagtaggggtctaatcacactcaatacaacctatttgtactaccaattgtatcgtattttgctttagagtaggggtctaatacc

SEQ ID NO: 2791 - DNA, 14883 bp, synthetic construct
  source 1..14883: mol_type = other DNA
  misc_feature 1..14883: note = Synthetic
gccgaagggcgcgaaaagggactctttggcgaatactgccaggatatgatccctgtccgcgaacagacggaaatcgtcgggcacgccgtccgcgccatgtacctctactgcggcgcgaccgacgtggcgggctacttcaacgacgcggagctcatggccgcgatgcgccgcatctttacgaacctgacgcgcaataagatgtacattacgggcggcattggctcctcgcgctccaacgaaggttttgaagaaaacttcaagctcccgaatatggacgcgtactgcgagacgtgcgcctcgatcggcatggtcttctggacgcaccggctcaatctcgccacgggcgaagcgaccttcgccgactacatggaacgttcggcgtataacggatttatgtccggatacgggctcaacggcgactcctacttctacgtcaatccgctcgaatcgaagggcgatcatcaccgccagccgttcttcggctgcgcgtgctgcccgtcgaacgtgattcgcgcgctcccgtccatgcccggctacgtctacgcgacggccgaatcgaagcctggcgcgggggacgacgtcctcgtcgtcaatctgttcgcgaccggcaaggcgaccgtcgagctcgccgacaagacggtcgaaatcgagcagcagacgcgctatccctacgacggcaaagtctttattaaagcggtcgctaagatgaaggacgcgaacgccaagttcacgccttacacgattaagacgcgcgttcccgaatggaccggcctcgaccggcccgccgacggatacgccgttcacgcgatctcgaagccgtccgacgtcttcgcgctcgatttcccgaccccggtcgtccgcatggtcgccaatccgaacgttcaggccgaccgcagccgcgtcgcgctccagcgcggtccgctcgtctattgcttcgagcagtgcgacaatccgggcgttcgcgtcgaccgcattatcctcgcgaaagatccggaattcaaagtcgtaacgcgccagaacttcattcgttccgactccgataacgacgcgacgaaaggcgccgcgtcgcgcaccgtcgacgtgattacctgcaaggacgtcaacgggaacacgctgaccgccgttccgtactgcgtctgggacaaccgctcggcgggccgcatgaacgtctgggtctatcaggcgggcttggacagcgaagccgaagactacgcgaaggcggagaactggaccgacgccgcgggcgctccgatcctctataagccgctcgacgcaagcgttctgaccgacgccgttccggaactcgcgttcgtcgatatcgaattcgacggctccaatacgagcgaccagctctcgacgctcgacgccgtcaatcaggcggccaagccgaagaattcgagcgacacgcagagtccgcgcgccacctggtggtctcacaaagggactcgcgagtggttcgaatattcgttcgcgaaaccgcgcaagcttacgtccacgaccgtctactggttcgacgacgagccgatcggcggcggatgccgtattccggcctcatggcgcgtgctctatcaggaaccgaattccaaagaatggaaggaagtcaagacgaacgacaagtacgcggtcgatcgcgataaggacattaccgtcaacttcgaagagatcgaggcggccaagatccgcattgaagttaagctgcgggagaatttctccggcggtattcttcgctgggtcgtaaagtgagtttggaatccggcggcatgccttagcgcgccgccgaccttattccgggcgttcgggcgcgctgccgctcgagcgcccttttttattctcgttcagagaacgcgcggcccgtacgcggtcgaacgcgataaggataacggcgtcggcttcgaggaaatcgaagcgaaggaaacgcaaattgaagttcagctgcaaggtagtttctccgactgtgttcttcgttggattgtgaaatgagtttggaatccggcggcatgccttagcgcgcgccgccgcccgaacgcgtcctttttgggcataattttagttgaccggtagttgactcaaaccgaaatcgcgtcatgaaaacgccgttatttatgagtttttatacgtgtttatttagttgacccatggttgatttattggggcgtcattcaaaattcgcttagcggttaggcggcagatctcaaaacgcgccccttttcgtcgcggcgcggggaagggcgcggcctcccccggttcgcttgacccgcggcggcgcgcgcggtataataacggcgcatatgaaacgccgataaaacggttaacgtgaaaagaacgcgttcccggagaagggagcgcccgatactcgataagaaggaagtgagtttagttttcggttatggcttctaacgtcgattggtctgaatttgtcgcggcgctttcgggcgcgcatacggtcgttatcgcgggccacgtccgcccggacggcgacacggtcggttccgcgctcgcgctcaagcgcgcgctcgtctcgctcggaaaagaggttctgctcgtgaacgggcacaacgttccgccgagccttgcctttatcgatccgaaccgcgaaatccgcaagattgagacgctgaccgacgccgagcgcgcgttcgcggcgaacgccgacgcgaccgtctcggtcgacgtgagctcctgggctcagcttggcccggacgcgagcgcgttctttcagccgggcgcgggcggcgttaaaatcgtcgtcgatcatcacgcggtcgccgacgccattggcgacgttcgctgcgtcgacgcgtccgccgacagcgcgggcagtctcgtcttcgacgcgattcacgcgcttggcgtcccgctgacaaaagagatcgccgagccgctctttatcgcgatttccagcgacaccggatggttccggttcgcgtccacgaattccggcacgctgcgccgcgccgcggagctcgtcgacgccggcgccgaccccgccgatatgtaccggctcctcaacgagcaggagtcgtacggccgattcaaacttcttgggccgctcgccggaaacagcgaacggttcctcggtggcaaaggcgtctttatggcgctgagcctgcgcgacttcgagaccgcgggcgcgattcccgccgacagcgaagatctcgtcaatctgcccctgaacgtcgccggcacggtcgtttccgtaatcgccgtcgagcagaaagacggaaccgtcaaggcgagtttccggagccggtgcgcgctcgactgcgcgaaactggcgcgcgaattcgggggcggaggccatatgcgcgcggcaggcgcctcgctccagctcccgctcgcggacgcctgcgacgccctcagaaagaagacggaagaatattacgccgcgctcgaataaagagcggcccgagcgacctcaaaggagaatctgccatgactgaaatcgacgtcgttatcgccgacattacgacctttcccgccgacgccattgtgaacgcggcgaacgtctcgctcaagggcggcgggggcgtcgacggcgcgatccaccgagccgccggcgaggcgctcgatatcgcgtgctcgctcttcggaggctgtccgaccggcgagacccgaactacgatcgcgttcaatataaagaccgcgaagtttattattcacacgcccggcccgcgattttccgaagcgcgcgccgaagaatgcgacgcgctcctcgaagcgtgctaccgcaattcgctccgagcggccgaagagcacgactgcaagtcggtcgcgttcccttcgatttcgacgggaatctaccgttttccgctcgaccgcgccgccgcgatcgtcgcgcgcgtcttcgacgaataccgaacgcagcccggcgcgctcgaacgcgttacgatgtgctgtttcgacgacgcgtccgctcaggcgtaccgcgccgcctttgctcagcggaaacttatttgaattttgctttaaaattcgcaatacgttaaaatagaagagccgaaagaacttttagagaactgactgtttttgaggagaacctgttatggacggagagaaacggctgttggcggcgaaggaatacgacgccctctttggcgaattggaatttttgcgcgagcggaacgttttggagcccgaaacggtcgccgccgcgcgcgaactgtacgagcggagcgaaccgaagaacgtctttcataggacggtcgttctggtcagcgtgctgctcggcgtcgccgcgctcggattcggaatctgggttctcgtcgacgaatactggcaagatctcagcgactttttgcagctgtattcggttctggtcccgttcgccgcgtcgtgcgtcggatatctcgccgcgaggattatgaagaaggagcttgcgtcgcagatcgcgctcttctccgtgtgcgggttcttctttctgtcgtgcctcgttttgcggacgttcgatcagcgcctctggcccgacgtaacggtcgtttggcttgcgggcgcgctcgccgccgcgcttgccgcgttcttctccgacgggatcgcgctccatctgttcgcggcgattctgtgcgcggtcagaattatcaccggctgcgtcgaagacttctatccgctctgggccggcgggccgtacgcgctcgacgcgctcgttattgtcgcaatgggattctactggagctatcggcgcgtcaatacgcgcgtcggcgggttctatctcctgctccttggcgtttgggcgtttgcgaccgcgctcgacgccagacccttctcggggatgacgagcgtccttttagtctcggccggatccgcgatcgcgcttatctccatgtggggacgcgaacgccaattcctcgataagacgtccttttggcccccctatctcctcgtggcggcggcgctgctctacacgtcctttcggaatcctctgggttattattaccgcgacgattttgcggcgaacgtctcctccaatccttatcttctctatctggcctggacggcggccgtcgcggcgcttgccttctgcttggcacggcggaaacgcgctctgaacggcgaggcgcgcgacgtcgcgctgcgcgttctgtcgttcctcttctcgccggaaggcgtcgccctgctgaccgttcccatggcgatcgcgatcgccgccgccacgaccggcgagtacaagtacaagcgggacgcgccgctcgcgtacgctctgtctttttacggaaccgcgctcgtctttggcgtcgcggcccggttcgtcgtcgtaggcgcgaacggccggtcctcgattctgaccgcgggcgtcgcctacttcattgtctggtttatcttccggctctttgagtttaccggctctgggcgcggactgatcggcgtctggatctttctcgcgatcgcggtcggatgctttgtgctggcgtactttaccgtgcgcatgaagaagctcgcggccgttcgcgaacctgacccggaaccggtcctgacgcgcgagccgcggccggtcgttccgaaaatcgtcggcgacgtcgccgcctggctgaccgtcgccgccatgatcgcggccgtaatcgccgtcctgtgctatctctgaccgaacctgggccgttagaagggcgaccgcatatggcggtagactcggtcctgcgccgcgcggctcttctctaaactgcgttcgagaaccgcgcggtagaaatactgggcgttgtgcgtgcggtgcggataccggcccggcagaacggcggcgagcgccgtgtcgaccggaacgtgcttccagtttccgccgtaatattccccgatcgactccccgctcgcgagtcggtcgtaacgtttatattcgccccgatagtggaattcccggtgatagacgtgcccgaaattcgccgttgggacgtggtcccgtctggcgatgagcgcgagctcttcctgacgctcgcgatagagccgctccatttcgatccggcggcgcgctttgcggatctcgttcgccgtgaactgcttctggatcgcctcgcgccgcagtttaatatcgcgctcctgatcttccgggagcgcgccgaccgaccgccgcggctctgcgctcggcggctcggcgggcgccgcgtccgattcggcgggttcctcttcttgccgcgcttcttcctcctcttcgagcgcttcctgttcgtcgagcgcctcctgcgcttttctttcggcgaattccgattcgagccgcttgagccactcttccggcgtttccgcctcggacggatcctgttccgacccgccggacaacgcgccggagtaggggaacgtctgcggcgcgctcggttcggacgcgcgaacggacgacggcgcgctcacggcaaacgcgagcgataacgtcaggcaaaatagaacgcgatgaaatcgggctgaggtcacggcaggggtcctttgaaatgcgttgaaaactgcggcgtcgaacgcattaacgccgaattcgattgtagcaaattggcgccgacgcgcaagacggatttccgcgccgcgcttgtcttgcccagcccgctccggtacaatgggaaaaaacccgctagcaaaggagaccggtatgggactgtgggtcattaagcgcggcgatccgcgcgtggcgtacctcgaaaagaaggacaaacggctttcgaccgtcttcgacgccgtcggcgatattgtgcacgaggatttctccgacggctattcgttcgtcgttcaggagatcgtcgggcaaatgatttccgggcatgtcgcggagatcctctgcaaccgtctcgtcaatctttgcgggggcgaaataacgcccaagacaatctcgcggttccccgcctcggagctgcgcaatatcgggctgtcgcgccccaaatgccagtacattctcggattcaccgaagcggtgctctccggcgaactcgtactcgccgatctcgagcccctctccgacgccgacgccaaaaagcggctccttgccgttaaaggaatcgggaactggaccgcccagatgtatctcctgtgcgtcttaaagcgcgacgatatcctgccgaccggcgacaaggcgtttctcgccgcgtcttaaagcgcgacgatatcctgccgaccggcgacaaggcgtttctcgccgcgtataagtggctctacgaaacggaggacgtctcccgcgccgccgtcgaaaagaggtgcgcgaaatggtccccgtactcgtccgtcgcgacgctctatatgtaccacgccaacgcctacgggctgctcgcccggccgtggcgcgaactgaaaaaggagctcgcgaaaaagcgcgcggcacgctgaccgaggcgtcggcgttcgcgcgttccgcacggcgggaagcgttcgtcttttaccgtataagcgctcccggcgtccaaagcggcgccgggctcttttttattcaggcggatcgcccgttcggtatttttcgggcaagatcggaataggagaaaaagggggcgtcgccgccccccggagtaaacgcgcctgagaggaggtaacgagactcagacgcgcttattcgacaaatacccctttcggtatatatcatacggcgcggcggcgcccggcttgcggaaaatcctgttttttaccccgttttttccgaatttttttcatataaagccggccgtctttcttgccgccctttcgcgcgcgttccgccgcgccgcccttatcgccgcgcccagagttaagtttttaaccgtctcgtttgtagcgccacgttccgtcttctgccgcggtgatctttcccagctctcttgcttttctaacgacttcgttgtagtattccgtcacgtcggttctcttacattgcgattgaaggtagccttcctgatataagagcaattctacttttgatccgatttctcttgccgaccttggggtcaaatctccccactgattatattccggtttgggcagccatacttttctaatcggtttacccgcgtccgggtttcccatgtttatggaagcctctctttcaatttgacaatccgacagtcgccgtattagctctgttattttctgtcgtttctcttttaggtaattcaatcttccttcatcgtcttctttgattttttccaaccaagccaggaattcgtcttttaggtaaatcaatcttccttgatcgtcctttctaatttttcccaacccgattaaccccgatatggtactctcataatgataagttagattaaaaatatctggtttccattttgcctgtatccgaccctcttcaaacatgaggtcttcgactaccgccccgatttctcttgaatcgtcgctgttagcgtatccatatttatcaaaccggaacgttcctagtatcgtgtaatcgtcaaacaatctaagccctttaaggtcgatatattttgcgttatcgacaactcgtttttgcagtaacatatctatctttctttttcaatattggccccgctttcgcgggacctgctaagccaaacttttcataatcagagcgtctttccaaggcgtcgcagccggacaagcctctgctgtgaaagagcccgcgcgccggcgcctcctcggaacaagagaaggcggcgcttccgaccccgaaagcgctcggccctgccggcggcggacccccgaacgcggagcccggccgaaaccggtccccgcgtcctcggcgccgccgaaaggagacggcgccttttactaacgaaacggacctcaaaaaccctcggagggggggcgcccgttttctgactttggccccaaaatttattttgccccgccgaatgggcctattttgatactaacgaaacggacctcaaaaacactcggaggggggtgaccgtttttgggcttttttgccccttttcgggcaaaacgacccccgtccgccgccctcgccgataagcgaagactcggagaatacgggctgaactccgaaattttctgcccgaaaaaattttttcgaaaaaatttttttcgccgctccccgcgccgccaaaaggagacggttttaatcccaacgtaccaggccgcgaaactgctcagtttactttgccgaatttggcgaaattttagcggattttgcccgatcggcccggccgcggtttcgcaatggttcgggaaaatacgggctgaacgccgatttttttgtccgaaaaaattttttgaaaaaattttttcagagcgttttgccggcccgtttcggccaaaaaccgcgcggggaattcggcgcgatatttagtacaacgtttttggaggccgaatcactcggcaggggggtagatttttctttttgggattggacggggaaattgggcgcaaaattagtacaacgtttttggatgagaaagcgcgcaagtatttccaaaagaagttcaatagtattttggggacaacaacaagacgtcaagaaataaaaaaggcgcgcccgagaggcgcgccgagggtctacgtttgagcgcagagagcctcgcaacgaaactcctgcttttcagcaaaatacgttttactaaaacaagacaggaaaatctcgttatggtacaatcctcattgtatgtcgattaggctgaaggtcaagctttttatagaaaaatttttaaaaaacgcgccaatacggttgttggaaccctcagaataaggctaggagcgtatgccatttttgcagtcagacttttttagcggaaaaagaatgcgaacccttttccataaccgtcgagaaaagaattcgcgtcggctctttcttcttgaattatcgacgtcagactgtattagatgttaaaactgatataatcggcataaacgatacttttttgaaaagagtccgaaaaacgggcttttgcagtcctcttccctcttttgatttcgatattggcgtattacaatggacagatagagacggccttgtttatataggctccgtttccctgattcggcatagcgtgtagcgttttgccctcaaacctttgttgactccgtttttcaacgattcccatgcgggatttttggcgattcttaaacttcgtgagattagagacgagctatgaagtacattctaggattggatcttggcgtcgcgtccgtcggttgggctcttgttccctgcaaccctgaagacatttctcccgagactttgataatgggctcgcgcgtctttgaagctgggaccgacgaaagcgatgggaagcgtgaagaaggtaaagacaaatcgcgaagcgcaatccgccgaaagaatcgcggagcgcgccgcaacatttggcgccgccgtcgtcgagcggtcaagctctttaatatcctgcagaacgcggggctccttccgaacgccggttgccatacgcccaaggcgcggcaggacatgtttaacgcactcgacggcagacttttccaagaatatttcccgaacgcgacgcgcaaagaggcgcagacgtatatctacgccctacgagccaaggcgcttgacgaacggctgtcgctcgaagcgatcggccgcgtcttctacgcgtttggtcagcgccgcggcttcctgagcaataagaagacggatttcgacgaaacggacgaagaactcggcaaggtcagaggcggaatctccgaactcgaaaagctcattgccgaaagcggatcgcggacgcttggcgagtttttctccacgctcgacccggaagagaagcggattcgcaaacgctggaccgcccgtaagatgtttatcgacgaatttaacgcgatctgggacgcgcagaaaggattttatccggatattttgactgacgcgttgcgagacgacgtctttaaggcaattttcctgcagaggccgcttaagagccagaaagggcttgtctcgcgctgtaaacttgaaccgggctgtcgttgcgctccgaagggcgatcctatttttcaggaataccgatattggcaaaagattattgatctcagagtcagcgatcctgcaaacgaaggccggtatcgatttttgacgcgggaagagcaggacgtcctcgcggaattgttcgaatataacgaaaagctttcctttgccgagatgcgcaaaaagcttgggtttaaagcgccgaagaataataaaacagcctatagatttaactttgaacttgaagatggagacaaggatatcaaggggaacgttacgcgcgcacgaattcgcaaggcgcttacggagaccggcgcgggcgacctgccgaccgaggacgtcgataagatagcgtgcgaaatcctttattacgacagagtcaaggctctggccgccaaactagcgagactctttcctgatttcagccctgaaaccgtcgccaagctgtcggaagcgacagttgagcccgattactgttctctatcgcgtaaggcgttgtcgaaagtacttcccgttatgaaggaaaaacggatttcgtttgagactgctcgcaggttactctatggaaagggatctcagacgtatgattttcttgaacccgtcacggccgtgcttggatctgttcgcaacccgacggttacgcgtacgctaaccgaaatgcggaaggttgttaatgagatcattcgccgtttcggcaaaccggaaatcattcgcgtcgagctcgcgcgcgatctcaagcgcgaccggaaggaacgcgaacgtatattcaggagtaataaggaacgcgaaaacgaacgtgtcaggctggaaaaagagattcgagaaaagcttaacggatacgaaccgaataaacgcgacgtcctgaagtatcagctttggaaagagtgccgggaaacctgtccttataccgggcaggggatcgacttgcgcacgctcttttcagacgcctcgcccgtcgatatcgagcatattattccattcagcgtctcgcttgacgattcgtttgggaacaagacgctctgttacgctgaagcaaaccgtaatgaaaagaggaaccgcacgccgttccaagcttacggcgataccgataaatggagcggaattctggaacgcgtgaagagttttcaggggccttttgccagacataaattggaactcttccgaaaggaagacgtttcgaccgaagacgccgtgagccggctcttgaacgattcccggtatatctcgcggcttgcgcttaagtatctcgatacgctctacggcgctactgacgggaacgacgccgaggggaagaagcgcgttcaggtcgcgactgggaatacgaccgcttggctccgcgacgcgtggaatcttaacacaattctcctatctcctgacgaaaagcaaaagcatgacgttcagcggggcgccgtcgacgtcgtggaaaagaatcgcggcgaccaccgccatcacgcgatcgacgccgccgtgattgccctgactggtcccgaagttgttaaaaaacttagcgaaaatgcggaggaattttacaaactaaagggacgcggttggtttgctttaagactgttcgctccaccttgtccgggcttcagagaaattttgcaaactgttgtcgacaggattgtcgtctcacggcgagtcgatcgcaaagtttccggttccatgcacaaagagacaaactataaagttctagaagacgggacagaaagacgagcggttcgcaaaccggttgccgaaatgaagaaaaatgagattgacaacatttgcgatcccgtgattcgcaaaatagttcaagagaagttcctcgaagtcggaggaaaaacgaaaaaatttgaagagaatccgccgtgcattgttactaaaactaatccaaaacgtaagattccgattaaaagcgcgcggtattgggcgagcgttacaactgatcctgtgggaaaacccgggcatgcgcgcaatgtccaaatcttcctaaaccatcacatggaagtttacgccgaacttgacgaatctggaaatgagttaaagaagtggaaggtagacgtcgtctcccttatggaggcatatcaacgggtgcgaatgaagaagccggttgtacagcgagattttggaccgaacaagcgttttaagttttctcttgctattggcgaagcttttgtttttgagaatgacgaaaaaaaggctatatatgtcgttcgaaaaatgacgaaaagcggacaattgttttttaagcttcacacagacgcaagagctgctggagaaataggcgaaaaagggcttagcagcagacccggtaagtttaaggagaggggaatgcgaaaaggatatattgacgttttgggaaatatagacctttggaaaaaccttgacgtttgcaaaaaggtatatccttcaaacgactaacagcttgagtatgtatgcctcgtcatgaagctatcgtttcagggtatacgtctatgtaccttttcgttttttttgatcttccggtcaaaagaaaaagcgatcgcaaggcgtacgatcggtttcgcaaagcgttactgaaagacggttttacgatgctgcagtattcggtgtacgcgcgttactgcgtcgacaaccgagttctggagcagcatcgggttgccgtgcgcgaagcgcttcctccgaaggggggcgttcgcatggtcgcgattacgtcgaaaatgtttgagaaaatggagcattacgtcggtcgcaaagcgcaggactcggaaagagagccggatgtctgcacgttctactgatcagggcgtcggtcgcgttataaagtcgttttatgtcaagcaagagaatccttgatttttcgctcacgcccgcgcggctccgagtccgcgacagtcaactcaaaatcttcgacgaggagacgcttcgcgattccgttccgatcgaagacgtcgcggtcgttatactggcgcatcctcagctcaccgtgtcggcggaactgctgcgtcagcttctcgacgcgaacgtcgtgatcgtcgtgtgcgacgaccgttcgattccgaacggaatctgctttcccctttacggccaccacgcgggcgcgcagcgcgttcagcttcaggtcgaagcgagttccgaccggcctctcatgaagcggctctggaagcagatcgtcaggcagaagattaagaaccagagccggctgttgcaggagctttttcagacggacggcggactgaccgaatattttaaaggggtcaagagcggcgacacggacaaccgggaagggatcgccgcgaaaaaatattgggcgaagctctttgagggcgagaagttccggcgcgattacgacggaaaagatcctgtcaacgccgcgctcaactacggctattctctatcgcgcgcgatcgtcgcgcgcgccgtcgtgagcgtcggattctgccccacaatcggaatctgccatcataacaagtacaacggttacgcgctcgccgacgatctcctcgaaccgttccgacccgtcgtcgactgctgcgtctacgggctttgggcggacgacctactcggcgaaggacttaccgtcgacgttaaggtacggatcattcgccagattaccgggcgctatcttatcgacggagagcaggtcaacgtctttgagacgaccgtcaaaacggcggaatcgctcgtctggatctatcgcggcgagtccgaccagctcgcctatccggcgcggctcccgttcgagccggtcgacgcgctcaatctcaccgtaaagaagccggtcaagccgaaagaaaaacgaaaggtcggcaagccgaaaacgcccccgttctgacggcaaatttcgacccatttttgaaaaaaaatgaaaaaaacggcgtttccgagagttcgaaaacgccgttttttttggctttttaacgccgcccgcgggaaggcctctgttgcgctcaccccgtatttctacgagtcaaacgcctgccgaaggcccccttttgccccctccggagagggaacgttgtaccataacgagatttccccgcaagccatagccgcgtctctcgtcgtctccggttgcttcaagttgtaccataacgagattt

SEQ ID NO: 2792 - DNA, 23258 bp, synthetic construct
  misc_feature 1..23258: note = Synthetic
  source 1..23258: mol_type = other DNA
  variation 14606..15150: note = n is a, c, g, or t
tggccttttcttcttatatccattcccttagctacggctattaatatgactaatgtatccgggaagataaaaggtcttatggggaagaggcctcttatttctattataatggctactttgttgggagcattaagtcctctgtgttcctgttcggttattcctgtcatcttttctttattgacagcaggtgttcctatcggaccggttatgtccttctggatagcctctccctctatggatccggaaatcttctttctctctgtgacaaccttaggttggaacctcgcaatctggcgtttagctgctacctttgttcttagtttgggagcaggtttcctggcccattatgcttttactaagggctggtttaaagagggaatactccgaagcaaacctgtctttgaacagtccagcatttcctctctattaaagaagctgcgaccttctaaggcagaacctctattaaaggaagctactattgttaatgttagtcccttaaaatccagttctccattaatggctcaaagtgaaggggggagctcttgtggttgtaacagccttaaaatcgagactccagctgaaagttcttgtggctgtaattctactaaaacagacaaggctaaggattcttcttcctgcggttgtggttcacaaaagaaagatagcttaaccataagaatcatcaaggaatctcttaagtcttttatctttgtgggtaagttccttgtcattgcttatgtcattgaagccttaatcgttctttatattccgggagcttggattcagacagctcttggaacaaatggctccttatctgttgtgatatccaccctattcgggttgcctttctatacaaataacttagccgccttaggtttgttagggggattattggaaaaaggaatggttcccgctggtgccttagccttccttattagtggacctactactactttaccagctatgtctgcggtatacgggatatgtaagtcacgagtctttgctatgtacctaagtatctcctttgtgggggccttagtggctggctttatttacctccttgtcggctgattccaagctttgatgcccttggcatcatcctcctgttatctataaaatagggactctaaaaggagtccctatgccattattaccacaaaatcctttacttaaagattatcagttatacgtcagccaattagaagaagaacggggttttgcccatcaaaacacacgtgataaatgtctcctcatgggagaagaagtgggggaattgtttaaagctgtccgcaagagtgaaggcttggctattgatcctgaatcttctgtaggtgaggtaaaggatgaattaaccgatatctttatttatttgtgtgctattgctaatcgctatgatattgatttgcaaaaagcttttctggagaaggaagagaagaataagaagcggacttgggtgtagtaagtttcttttgtgagaatcgttttgaggtttatcaaaaacccaatggaaaagccaagaagagaaaatgtaatgtctatataacatccaagttaatagctgaaaataaaaactgaacaaataccacttccttgtgtcttgatagtagaaaagtagttcggccggagttactattaaggagtgtgaaatgcctaatgacaatggatctcttattattttagataccaaaagtgtaagaactaatgctagtaagaccctaacttttctgaataatactataccaaaacttcttagccataccgttaatattgtatttcttggggaagaacatgacaatgaaattgataaaaatgttgcaacaggtgttctgactaatcctcccagtattatccctggtgcgactagagctatactagaaagaggtttagcatatcctatcaatggtggaatgactgttcgtcaagaagctatggatcaaggtctaaatagacaagctagaagtaagaaactagctgatatgattatagacgccatcactaatcatggaattacccttatctacatagcctgtggtagtaatcatggccaggaaatatatgattctttgcagaagagattaacagtaaattggggttatattattaagcctgcaagtaccgattaaattttcttccctttcctaacagccaataccgagataatggcgttaacaagaaagagatagaatataaaggctacattctcaaagctataagtctggatagccaaaacacttataccaaatcctatggtgctaatcgcataggctatccagctttccgattcaggatgtttatacgctttgataatggtgggtaatcctgccaaaaagtctgcaaccaaggaaaacataatcgccatattaggatctttagtaactccccataatagaatacctataaatgcggctcccatgaggaggtaatcttttatatttgtcttccaataggatttcttattaataaaagaggacatcactattaataagggcgtaaagccggcagtaaaggaagcccaagacaaaccagataccccctgggctctttgggctaagaatataatgagggggaatataccccataatagccaagtcactctgttcggttgagtcttcccttgaaccgtttctattaaataatatatcccaccgagtgatccaacgaaggccccgatgatggcaaagtattctggaatcatggtgaggactatatcagagaggggctttgtgattcaacttaaaatgattccctaaaatattttattggcacctcttcgaatcaagaacctatactgaaataatcgtatagcaactatttgcttaagaaaggcaaatactagtcaaagaaacttgtcatcgaggtagtcatgacattaagcaaaatcatcattagaattaatgattactgaatgcaaagccaccaaaagtgcctaagaatggaaagaaaatagtctggagcagacaaaacattatagtgtcaatggaaaccaactaaatctagatggaagattatttacgagacaataaataatacctgtgtgatagatctataaggtaggttatgtcattagtcatttagccagtccatgtttcatgaactcaacaaaatcttttaagtattttaatgcattatcaagattgtattcttcatccttaaaaactatctcatcaaaagaatagaatagaaaggacattgtcttgatgagaaagtctttggagaactcctctttaaacaagccttgctggaaagcgttttctatcatatcattcaatcccgattcatctgaagtttttaaatcctctaatacttttttatataagggagaacctttttctttagaaaatcttttacctaattggtgataagcaggatgtcttttggcgaattcaatacccttttccgcttgaatcaggaagatatcaaataaatcgggatccctatctgctactgttgtaccagaagatgacttaacaaagtcccattttttattattcccttcctttattaagtggagatagagttcatatttattcgcaaatcggtaatagaaagaacctttgggtatccctgccttttcaattattctgttcaaagaggcttcatcgtagctttgaagggagaactcttctaaagctttctgcatcagtacttgatcatcaatttgttttctagccattaaaaatccttccattctggtatataacttttcgttaaccccatgacatcctgaatgttttcttccttttctatatatttattgcctttgacataattatttttctcatcaaaatatttaccattgggcttgttatcccattgatgagaggcccaatagacataattgtttgcaatacttgttggtgaagccgccgcttttgccttttgtttgtagacccatttcataaaagaagataaatcaggataacggtcaatatcaaccttaacagcgggaactctaaaacagtttacacttatattggttgtacttaattgcttagataaccaataggtatacattatttgagctattttggattggtagtatgcattgactacattaaaagctctattctcaaattccggatctttgaggtcaaccttgagaaatggtttcgccagtaaaccttttgatgctatgttgagaatccttccctcttttgattgcattaagctctccaaaagtaaggtggttagcaagaccgggcctagatggtttgttgcccatattgtttctaatccttctgaagttagatttctttgcttttgggttatatcaaatagggcggcattattgataagaacatcaagatgatcataggccgtcttaaatttatttaccattgttcttatggcgttcaattctgccatatcggctatgaaaagatctaatgatgcttctggatagctgttttttatatctttaatggctgtttgggctctcttttcgttccgacacaccatcactacatgaaaaccttccctcgctagctgtagagtggcttcctttcctatacctgaattggcccctgttataagggcaattttgttattatctgtgatcatttttcctctccttttcttttttgcaggaacacatagcctgcatataaaaagccaatacaaacggccaatcctatgatggcaggtataatgatagatagacctgattctccgccttctaaaagactccagatgatcttaataaaggccataaaaattaatacacatattccgccaaatatgtcccgcttccaaatgacataagctaatccagtgagagttacaggtatgaccaatgtgaagagaaaacgggttaagtcccagttgccctgaaggtactccatttccatttgtaagaatgaactaaccatgggggatacattctgaggtacgggaaaccaaaacatactggtaaatagtaaaaagattgtggctcctattcctgtaagactttttttataagcaaagaaacagtagggaatcagaaacaaaggacgaatataccaactgagttggttctgatgacgagcaaacacccaatggaaaaaggaagaattattgagagctataataataaatagggctgtaaaaatcataaacagggaacctaatatcaagtctatatgtttatttttcatagaaaatctccttattagaccatgtggtctaaacactctaaaacaaaactaatcaatattatttggtctgtcaatacaaagttattctgcttaatagggatgattaattagaggtttgaaaccttaatcctcccatagagactaggggaggatagtaaatgaagagaaaggaattaattaataatttgccaattcagggggaagcttaccataatagttttccacaaagcttttgagatcttccttctttaataattggaaaacactattggatttgacttcatagtctcctgtaaagacattagcctgctcaggatagtttgtggatatataattttttatatgttcctgattatctacaataatgatgatgtacttattattttgttcaggattgaatagtagaaatatatgtcccagattagttatttctcctggagtcacataaaagttaatccttatgggataatcggaatttgtcgtgcttattgaattaatctcaaagctaccttcgggataggcaaaattaatataaccttcttcatttgagatcctttttatattgggctcatgctccatatttttagcttctccaaaaataaaaggcctgccatcactgaaattgctgacaaaaaattcacccttatgaccgaatctatgatcttcactaatagtggttatctggcctacaacatttccatagagctggggatcagctgttgccacaagatcgttttggagtggtgccggacgagagacacagccgcccaatatcatgaagaccagcaaaacaataaaacctgttgatactctttttatcatctaaaatctcctatatttcgaatattgactaaatcaatagaaatgtaaagtaattttgtcaccttaaaaaaagagatcaacaggtcattaacaggagtacaatattattctaaatcaaggacttccttagcacagtattcgcctccaagtcgccctgatgtaaacgaataagctatacctacaccgttaccaacataagtatcattgaataagactccttctgattctaaacctacagcgtataagcctttaataggaattctcttgtcgtttagaaccttgaattctgtgttgacaagtaatccacccacagatcctaagttattgatttgggctacgatagcatagtaggggccttcattacccattggttcaaggtatctagaatccttaccgaattccctatcaacaccatcgctgatggccttttgatatttggaataactatttaggaatgtttctttatctattcccgcattaaaagctaattcttctattgtatttcctttgtatccatctccattagccaccattttgtcaaatacagtttgaacatctgtccatggagtatctaatttatacttatcccgaaaatcgctatagaattccggtggcataccagggagttttggagcatgaatccctctcatcccttttgactctaatgctttgagctgggattgggatacgataaccatgtgataagggccgttaaaggcgctggtattggcggcggctactgccactaaggtggctccttcatcccggaatctggccccatcaggtccaacgttcataaagttggggagataagtaagcataacagggtagctggctttaaaggattcaaattcttttttgagagccttagtggctggtgccaatgtctgatgaagcatctgtcccccaaagttatcaggaactttggctcccacagcccaggccattttaagtccttctccgacattctgaccaagaccaccatttatgccttcaaaaccaaaagcttcttttaccatctctttgttagctgcataaccaccagtcgcaataataacggctgaagcttttaactcaatccgattaccttcttcgtctgttgctacggcaccgatcactttgccttccgaatctgtaataagttctttagctgtggtgttggtaaggatcaatcctcccttagcctcaacagtatcatgcaggattcctctgagcagtccttctctttgatcataagggggaagggggtgaagctgttcaccggcaaaattaacaaatcctaatttataccctttgctattaagccaggtataagtgtcctttgattttgttacatactgtcggatggctgctgcattcacacgccagtgattgttttgaatccagtccttaatggtcgcttcttcgtctactttaagacctttttgaagagcgactgaggaattatagaatttaccagcccaggaaaggttactggcaccaccaatggtggaggttttctctacaagaatgaccttagctcctagatcagcagcagatatagccgcagaacttccggaagctcctgcaccaataacaatgatatccgcactgtaattgatgttttttgtttctcccttatccacgccaacaaccatatcatcaggattagcacctgcttgtttgattgccgaactcactgcttccagcatagcctgactagacatggtagccccggatacggtatcaacatccaccgattgggcttttagaatacgttttttcattgtttccaatgctttttggccaatgacttttgtctcactttgtgaaaccacattgatatcagttatcttgtcattggaaaaagtgacatcaaaatcaactttaccttctcgtccctcaccctgtgcctgataggtaccaggttcgaattggacggcatttttctttccacaactgttcaataaaaggctaatggataaaagagccaatactaaaatagccgttttcttgaaaagtcctaaaaacttcatattaatcctccagaagtaaacttagacctgcagattacaccttggtgtaagcctaaggtcaagtattgataaaaaaaaatcgaattatcttaaatcaacgggaacactgatcttgatatgagtatgatattgtcctgaaggtcttctatctgacattagcatctttccaatcaaatccccctttagagataggtcctggttcttaaggtattccttaagtgggaccaataaatgagaattgaggggcacctcattattggtttcaatgagcatgttcacacaggagaagggaggaatatattccatatcattcgttagctgcaaaccaaaatattcaaagtctgattctgttaaggctaatccccaattgtggttcattgaaggctctggcctgttaagttcttcactagggattttgagactgtaaaaggagaagggaagtaattccatccactgactcacagtcttttgaatgtgatcctgatggatgagtgtattctgtgaggtttggacaatacgatagattcctggactttgggatcttgtaaataaggtagacccctcttttaagtcatgaatgtccctggacacttcttccaatcgacgtaataagcgtttgttacggtcgattactttttgtacatgatctgattggttctcaatggaagcctgtatgtcatcaagtgaagcatttgtcgttaattggctggcttgcttaagggtaaaatcaaaacttctgaaccaccggctcataagtacattacgacaatctaaatcattgaaataacgataattattatgtatatccttttgaggtgtaataatcccctgacgttcatagtaccttatagtgtcagtggtcacgcccaatagttgagcaaattctccaatggtgtatctcatagtagtaacaatatacactatgtaaaaattattggccaagcaattcaagcccatgctagacttatggccatatgacattaaatacaaaatttattgaaaaagaagccttaaaactgtatgaccagtatctaaaaaatccccgaataccagatgacttatgtagtgatatctatctcgagtttgtcagaagaatgaaaaagtataaagagtcccagacgatccctccaaggtctctcaatgatatagggcctatcatagggaatttgattaagctagctactcttcatattttccatagatatactaaggaaaagcgagaagaagctcagctcatggatgtggttaaaaagaatattagccagttctgggctaagggaaagagtcaggaagaggtccagttctttgaacgaatcgctttttttctcaagaaatggtcgtcgaaaaggaaaacttatccccagtacttacatatttttatcctctatcattcctatcatctgtcccctgcctttattgaatccctatgtccttacacggggatagatcccctcctgttagaatcccaggtggggataataaaagaagccatacacctaaggattaatcaggaggtggatagaaggtttaattccttaggcatccattattatcatctggtcaaggagcagtatcgagtgggaggactgaagcttaatgtggaatcaggcagctcccgggagatcgcccagaggaagcaaaaacgtaagcaggccctgaatgtgattcaccaactaaagcctgttccccagttccaggagatcgccgctattgtcgggattccttcccacgccgtgtcctatgggtacagggttattaataaggctatcttagaggcttttaaagatgatacgtattggggggaggggtaaagaatgtaccggacagcatttggtccagggattagaataaaaaaaaggaggctagccgtagcgtcctccattttgtggtccttaaagaccttgttaacggaaacccataaagggcaacccctaagggcagtatcccgttttcaaatgtgttatgaacatgataaggctggaaagttcttatgtcaatattatttaaaatacaaaggggtgtaaaaatatgggcaaggcaagattaggaatcgatctaggaaccaattccttaggatgggctctattcgatatggaagaagaccatccttttcaattaaaagatgctggtgtacgaatctttccagatggacgggaaagtgctgctcctaacaaagtaggagagtctaaagccgtacagagaagagtggctcgttctatgagaaggagacgggatagaaaactttcacagaaatcaaagctggttcaagtattgattgataatgagttattaccacaaaatcaatttgaccgtaagaatctagctcgtaaggatcctcttcgattaagagcagaagccttggatcgaaagttagctaggtgggagttaggtcgtgttctgttttccttagttctaagaagaggatttaaaagcaatcgactagaacaacagaaagatcctgatagtgtgaactacaaaatgatggatgccttaagcaaggccattgaggattcagggaagaggactttgggagagttcctctatgataggcataaaagacgtcagcctattcgttttcgtcctgaatcaggtttctatccccagcgggacatgtatgaaaaggaatttgatctcattcgtgaagtacaagaaccctattacgcaaatgttaactgggattatattaatcgaatcatcttcttccaacgtcctttgaagcctcaaccacgtggtgtttgtgaatacatgagtgataagctacgggcttataaagctcttccctcaagtcagcaattccgcatctggcaagatatagagaatcttcgtttccttaattctgatggctcttctattcccttggctaatgatcaaaaaaattccttataccatatccttagtaatcagaaatctgtcacttttaaaaagcttcatactttgttttttcccaatatagaaggaaagtttaattttgatatagctaaaaaaacgggaatgaagggcaatgaattagaagtcttccttagaaaatctactaacttcggtcctttatgggatagcttatctcttgtagaaaaagatgcatatgtagaaagaatccttagcctttatacggatgaagaggaagtaaagttaacagaagatctcctcaaaatcggtgtcccagaagctaatattgatgagatcctggggcatcactatccagagggaaccacttccttatgtaaagagatccagcaggaattatgctctgtaatagcagaacaacatattccttatgacaaagcggttgttgtccttggttatcaccattctgtcagagatataaaagggggcctagatactcttccttattatggagaagtcttaacaacttcctgtatcggtggtagtaaaaaggaagaagataaaggtaatccagagaagtattatggcaaaatcggtaatcccactgttcatgtagccttaaatcagcttcgtgctgtggttaatgacctaatacgcaaacaaggaaagccaactcagattgtagtagagctatcacgtgacttaaaaaactctcgacaaaaggtggaagaatatagacgtcttcaagctaataatgagaaggaaaacgaagccattactaaggagattgttgagaatcctaactatggaattaggcaagcttctagatcagatattagaaagtacaagctctataaggaacaaatgatagctggtgacggcttaggctctaaatgtccttactgtggtaaggtgatcggagcttctgagatcttcactcccaatatcgaaatcgaacatatcttaccctattcccgaacccttgatgactccatgatgaataaagttgtggctcatagaacctgtaatcagatcaaaagaaacagtactccctatgaagctttctcccatgatccagaggggtatagctatagcgatatcttgagaatcacaggtcattacccaaaggcaaaggctagaagattcagacaagatgctatggagcgttacttagaagaagggggagagggattctatgcgagtcaattaacggataacgcctatatagcacgagtagccatccaatatctacgatctatatgtcctgacgtttggtcctctacagggaaagccactgccttattaagggcaaaatggggattaaataccatattaagcaagtccaaactcaaatcaagagccgaccatcggcatcatgctgttgatgccgctgtcattgctcatgtggatagaagtcttattaagaagatggctgatctcaataggaataacttattaggatctattacagtgccctctaatccagagttaagacaacaattggaagcccgcattgataggatgattccctctataaaacctgatcatggtgttgagggtaaactcttccaggagacagcctatggtaaagtcacattgaatctccctctagctgtatccctcttaaaagaagatcatatcaggcttatttctggtcataagttacgttcagaatatgaatcccgtataaaagagatgagtttcaagaagttcaaagcccaactgatacaagaaggggtgacagacgtatacctaagaaaggaagtatgggtaacaacagttcccgtagatgaggatcacattaaatataaggatctggcagaaatgacctgggatggcaaacttcaaggtatatgtgatcctcacatgcgtaaaaaactagcctcctattgttcaaaagacggggacttaagcaagaatgatcttaagaaatttgttcaggattcaggcattaagcgtgtacgctatataccaaaatctcaagagataacaccaatcgcttccatgcctcaaaagggatatcaggtgaatgactatgtgtatgttgatatttgggaagtcccttcgaagaagaaagggggggctgttagttataaaggagtctttgtctctcgctatgatgctaatcaaaaaggatatcactacactaaacctcatcccgcagctaagagactaatgcggctctataagaatgatgtgatcaaagtcagtcatgaacaggatgtctggtattatcgaattgcggggtattctactacaacaaattgcctcgatattagaagtgtatgggcgagtgaggataataaaaattggatagagtgtactagttcaaaaaggataaaagctgaatatcctgatgcttctggacaagtttttaagactttaacttttatatttaaacagggaaaagtagaaaaagtaaaaataactccagttatgtaaagactttgtcgatcttctataccatgatacctcaggtactagaagttgcagcccggggatcatttttgcataaatccctaggctttttagaaatcaaaaggcaaggtacgattgtggggcaggtagatctggatcagttccagacattattaattacctcaccctcagtcactcttagctcccccctcctgtctgatctggctaatcggcatattgtcgttatcctttgtgatagtcactatgtgcctaatgctatcctccaacctttagcttctcataatcaagaaggggatcgtttacaggatcagattaacatgacagaacctatgcgtaagaattactggaagcaaattgtggcagccaagttaaggcatcaggctattgttctcgattcttatcagaagaagaatgttgcccgtttgcataaattatcatcagatgttcattctggtgatccagataacaaagaggctcaaggagcacgactatattggcagtctctctatggagaagcattccgtcgtcaacaaaagggtagtggtaagaacgtccttcttaattatggttatactgtcctacgttctgctgttatcagaggtctctatagtgctggtttgaatcccgccatcggtttacttcattctcctaatcgcaatcctttctgtctggctgatgacttaatggaaccctatcgacctatgattgacgctcttgtctatcaattagaaggtaacttaacaccagagataaaagcgattctatccaaatccttaacaatagatactttgtataaagaagaaaaagttcccttaggaaaggtatttcaaaatatagcctgggatatggtcacttccttaaaatccaaatcaaaaagcttaaacttggcagatatgcctgtggaggtgtctgaatggacacgggagattattacctcagtgggtacaagatgatgtggatgatggtgttatttgatttaccagtaatgacggactttgaacgaagtgaagctaatagatttagagtgttcttgaagaaacagggatttacaatggctcagtattcggtgtattataagtcattatctggaaaggaaatgattccaaagtatgagaagagggttaaagaagctcttccccagcatggacaggtggacattctatatgtcacggataagcaattcgagaatattgtgtcttattattgccgtaaaaaaggaaaaaagagagatgataataaccgccaattgctactttattaataacaatccatcacaactctatacaagagaagggcttagcgcccccctattgtaacacatttgaaaaagggatacatccgcaacttggcnnnnnnnnnnnnnnnnnnnnnnnnnnnnnnnnnnnnnnnnnnnnnnnnnnnnnnnnnnnnnnnnnnnnnnnnnnnnnnnnnnnnnnnnnnnnnnnnnnnnnnnnnnnnnnnnnnnnnnnnnnnnnnnnnnnnnnnnnnnnnnnnnnnnnnnnnnnnnnnnnnnnnnnnnnnnnnnnnnnnnnnnnnnnnnnnnnnnnnnnnnnnnnnnnnnnnnnnnnnnnnnnnnnnnnnnnnnnnnnnnnnnnnnnnnnnnnnnnnnnnnnnnnnnnnnnnnnnnnnnnnnnnnnnnnnnnnnnnnnnnnnnnnnnnnnnnnnnnnnnnnnnnnnnnnnnnnnnnnnnnnnnnnnnnnnnnnnnnnnnnnnnnnnnnnnnnnnnnnnnnnnnnnnnnnnnnnnnnnnnnnnnnnnnnnnnnnnnnnnnnnnnnnnnnnnnnnnnnnnnnnnnnnnnnnnnnnnnnnnnnnnnnnnnnnnnnnnnnnnnnnnnnnnnnnnnnnnnnnnnnnnnnnnnnnnnnnnnnnnnnnnnnnnnnnnnnnnnnnnnnnnnnattgtaacacatttgaaaaagggatacataaccatagttatactaagcataattaaaggacctgttgtccattcacatgttaaatataaatctatctctatagggagaattaaaacaatttgctataaaagaatctaattaggtttcctttctttgaaagacaacaaacttacaataattatctaggctatacttgatcaatccttcctcctccgaaaaaacatcagaggaggaaaaacaaattccttaagccttatctccagattttaatttaactggtatccatacttcaaagtattcatccggttcatccatcttgtagtaggcttctatttccgggccttcatcatgttcatagttagtggcagggaaccactcactgaatatttttttccatacactttggatggaatctggcatgggaccttgtccaggaaagatcgcccatgtcttagcttcaatagcaagaactgtatccatcttatctgagggagtctctccttcaacaccaatcagatatttgaatttttcttggggcatatcaaaatcgtaacaaatacccagtaatccctgggatgttgtctgtggagtgatagaagctatcgttccatcgtcctcttttttcttccagaactctggtattatccgtaggtttgccccatccttagaggtcacatctaatgagacccctatggctgtgaaggcctctttcttttctattctgtaatccattctttcttctcctttcacttgaatgataagttttaagggaggcgttgctttgaggatggattgggacgtttgagcctgtataggtgtttggccatggaagcgcttaaaggcctttgtaaaggcgctgccactttcgtatccatacttgagggctatgtctatgatctttttttcctcagccattatctcctgggccgctagggatagacgtctttccctaatgtattctcctaaggtcttctctgtgagcatggtaaatactctaaggaagtgaaatttggatgaatgggcctgtttggcaattaattcatagtcaaagtcttccagtatgtgttcttccacataatccagggctcgatttatatttttgatccagtccaaagcctgtctcctttgcgttaatataatgaattattattgatagtttatcttgttctgaattgctctcttgtgtccatcttttatttattcgtttaaacaatggagaggcccttttgtttttactgggcttttcaagaatctcgaaagggcctttcaaaagtttcgaatggacctttcaaaaatctcgaaagggcctttcaaaatgataaagcagtacagactcctctttttactaagagtagagagggacaaggcctggctgtcttcttatattttcttatttttttagtaaatgcatggatagtccctgaagaaaggcttaactgagatgagagttatgaccaagctcattaccatgtatcaatacaacgctggactgacctcctctttttttcttttaagataattctatagacaaggttctatttccttttcagttcttccttatactctatctatttaaaataacagaatcataacttagataaacctctgcagataaaataatttgataaataatcattattgctttggaaaaaataataacctggtatatagtatctgactgtatagtcaataaatgactgttaagtcagttatctgaagactatcgacgtcaatatttttgaatgtattaaaggagttatttatgaagaaatacatgggagtattgtttattatcgttgttcttcttctttcagcatgttctcaacccaccagtggtgatagtccaagtttatagttttgctgagataacgtatgatcgtgagtataaggatctttcaattattgcaaacggtaaaaattactacaaatttactcttccaaaagataaagatttcgtggttacaacagtgacaccaatgactggagagatagatgtggccttcactctctatagtgatgctaaattggaaacttccatagacggtgaaatagataaaaaaggtgcaaattctagcgaggcagttggttatcagcctctatcaagtggggggacttattatcttgttataagtgaaaaatcaggaaaggatggtacctatgcgatatctctctacccaggttggtagatacattgaatttaacaattgatcatgaagtaaaagcgcagggattcctgcgctttcatagtattcatttaatcctatttcatttttttcatgaacattaataataaaagtaaagaaacgatagccatgaaaatatctgaggcggcctggctcaaaatgactccctggtaaccagctgctcgtgataacagaagcatgaaaacggcaaagacgattccttgtcttcctgctgacaatataaaagcttgggcggctttcccgacagcctggaagagcactgttgagaccaaaatcattgccataaaggtcatggttatcacttgatagcggaacattagtgtcccattagcgataacactggaattatcaataaagaacgtcatcaattggggggccaatccatagaataatatactgagaagaaacgctaaaccacctacaaaggtgaaggtgaatttgacaattgatttcaggcgcttcttattccttgaaccatagttatagcccattagtggttgggcgccaaaggagaaccctaaaagaatgagggtaatgatcaggacagatttcatgacaattcccatggcggctatcttgtctgtaccataaggacgtaggtaatgattcgttaaagcaagggaaaagccttgcatgaagttcgtaatagacgcagggattccaataagcagtacttgtgtgatatggaaggatggaattttaaagtaagttgggttaatagaaagttttttgcttttctttagtacaaaccataggaagtaaatgttagtaacaccatatccaatgattgtcgctatggctgctccagcagctccccattccataagaaagataaagataggatctaggataatatttattacggtccctaaaatgcttcccttcatactggcagaagaaaaaccttcggatctgacaatattactgggggtgaaacttaaaatgatgagtggggctcccagggcaatatagtgatagtaagctgcagcatggaccattgtcgttccatctgccccaagtagatgtaaaataggggtttggaatataagcaaaaagattgccactatgatgccaaatataagggaactatagaaacaaaagacactaacccttttaccttcttcatccttcttttccccaaataatctcgatataagggaagctcctcctaaaccaaaaatatctccaacggctatcataaaagtgaataggggcgctccaatggatactccggctacaagggctgtgttattagtttgggcaataaagaaggtatcagccacattatatataagcgttatgaccatgctcattactaagggcagggctagggtgaagaaagcctttggaacaggtgtcttttcaaataattcatttgtttccataattaacctctcctggactataggcgaaaagtatatttgaataagtgacatgtgtcacaaaaaggagaaaaaggaagactcatgaaactgattagggattctggtgctatagaagatattatggaacaacataatgttctcaaacacctatatgataaacagtatcctttgaattactgtcatttctccaaaggggagtatattgttaatcctgtagaaaatctggagaatttgctctttattcattcaggaagtataaaactatttggcatacgagaagattcaagtgaatatgctgtgtgtcattcagatcaatttactttattaggagagctagaacttatcactggagcacagaccattctctgggtagaagcgctcagtgatgtagcctgtgtctctttatcctttcagtacaaagaggctctcatggaggatgtcgttttcctaagatatctggttcaggttcagtctcgcaagttttatgaattatcccaatctatcttcactcatcaaaaactggaagatcgattaattcattatatattaagtgaatgtgaggatctgatccttgataatcttcaggcggctcagtttcaacttcactgtagtagacgtcagctacaaagagttttaaaagctttagttcttgatcaaaagttaagaaaagtaggtcggggacagtatcaatggaatgagaattcgccttcccatcctttttctttagaaggttagtaaattcaatacccttatattcatttactgcacttaaaaacaagtatttatgcacagaattgcaagaaactccttgtgtctcaattctacactgaactgtatgtagatatgtgtaactgaaaagttactaaagtattaggaggataaaaatatgaattataaaaaaacactactgttatttataggagctatctttatttttacaggctgctcgaaccccagtagtagtgatgtaactaaaacttatacacttagctatgatgacaatggctcaaacactggaagtgttcctcaaagtggtacttttcgtgaaggtgacagtgtgaccgttgcgggtaatgagggaaatcttgtaaagacatcctatcctttttttgttggatggaatacagccccagacggctcaggtgaattctttcgtcccggagatacattaaagatgcccggtagtgataaaacgctttttgcttattgggttggtgctcatgaagttaatgtttctggtgtgagtggaggagatgatttcgcattctctgttgatattgatggagattatgcggtattcggcgttccacaatataaggaaaagggagctgtctacgtctatcacagaacaggaccaaacagttgggattcaggacataggttggatggtaagaaatcggattctgagtttggatattccgtttcaatcagtggagactatattcttgtaggtgctcgatttgatctggatgataccaaaggagctgcttacatctatgaaaggacgggagttaataactggggaaatgaaaaggtccttaaagcttctgatggagccaaagaagatgaatttggttattgtgtttctatagatggagattctgctgctattggtactggttgggcggaggctgtttatgtgtataagaaaggtgataatggatggagtaatccaagtgaaaccattattggctcctctacagaattaagaatacaatttggaaaagctatttctctagatgcagatacaattgcaattggcgcctacagtaaaaattaccgtggggttgtttatgtgtataaaagagcgggagacaattcttgggggaatagaacggaactttctgctccagacctgaattataataagaacttcggtatcagtgttgccttggatggagactaccttgtaataggagacacaaacttaaaaattatgaacaacagtgctcaaggaggcgcttatgtgtatcaaagaatgagtggaaacagttggggaaatatcaaaaacctaatcgcttcagatggaagagctggtgacgagttcggaacagtggccattagtggagataccatattggtaggggctcaaaaagtaactattggtgaaaatacctttcaaggtgctgtttacatgttctccaggacagaaagtaataattggaatgctgtaagtaaacttaccgaccctagtggggctatggacgagtatttttctatacctgctctgaatgacaaatctttagttattggtgctttaggtactaagttgaataaggcttttgcatcaatctacttatataagtaataaaattttatttgtttaggcaaactcatattagggaaaacaaaaagtcatccacaaatggatggctttttatagatcatcatatttcctactgttttttgtgtgatatctgctattgtcgtgaagataaatattgtcggggagaaacattatacatttccttaaagcattttgagaaatgggaagagtcattaaaaccccattgtaatgcaatctcggtaatcgtccgttttggattcttatttctaacaatttcatgacgacattgttccaatctttgttgcctaatcatctgagatactgaggtttctgttgaggaaaatagttgatgaagtgaccgaaggctgataccaaagtcctttgcaatttttcccggacataaatcagggtcgttcaggttcttttttatgtgttttgatatctgattaaataactttgttctatgtcctgtagttgtaactggatttagacgtaacatccatgtactcaggagttccaatgtcgaatctgttataatagatgtcgaatgtggatcaagtgtatcaaaacggctacttaaagtcatcagatttgagtgaataaatgggccaagaccctgtttcccatcaaatactttacctatcatctgagtcacttgagggaatagtttctcgagaaaatctttttcaacaaataaagtgtttttctcaatagctgaatatgagcggaaggatagcgtttcatttgtatcccataaataaatgtcattgtttgaaattttctgttcttttccacgtctttttatgacttcataaccgttctgtactgtgagaatagcatagtaagaggtattttctctggctatctgagttccagctctacttccactgcagggggagtaacaactgcaattactcaatttgaaacgtcccatactatgcattttaatatacccatagactgtatcgtctcttttatctagagaccatcccatatgagagttgttgagagcttcagaccaagcttcaaatcgctgttttttatgataatcttttgtccatatctttaaatgttcattcatcatgtttacaagatgtaatatatctcatttgcaattaaaaacaattttttgtgtactccgagttatgatgataatggctcaaacactggtagcgttcccaaaagtggtactatcacaggataggaacaaacagttggcttcaaagttttttgatgctggatttgggtattctgtttcaatcagtggagattatctagttgtagaaggtctaaagtttgatgtgggaacaaatttacgttaacgaattccatagcttatcgaaacggctatccatacaaacacttaaatctgttgtcacaaatttaccattataaaacaggctgaagatagtcgccggactaggcgccttttgggcctgttccaaggtttccagcttatgaatagtaaaaggtatccctcgcttttttgccgtttcaacgaaggatgttcgaatatgatattcggaataaggacatcggttagagtagtaaataacaagaccttcctgttctggacaggttccctcagtagcctcaggagcaaaaactgggattgatgctgatgttgtaatctttttttcaagaagcaggaagcctgacttcgtttcatccacaattgagaaaccttgcttttgaaaccatttaccatcgctcataaagtgaaatttcttttttccggcaaccgttacaatcccatctttcttttgctctcctacagcgttctcaacctgatttaagagtttctttcccaaccccttgcctttatattttcctgatacccagaaacagttaatattcaggtagttattagctataatgggtagccatgctttttctgctggaccatattcgataaagacctttgcccgttcatttagtcgatagaatacataaccattggacaattgttcttttagccattcttttttcaattgataactatctgtgcattttttatcagaaaatgcacaacagatatgctctgtatcaaggttttcctttgtaatatttgtaaattgaagcatatagtttttctcctatttcattttctttacagggacagcgattctcactatagattttattaaatccttgtcataacaatctttgtagtaattttcaaaacataaaccatcaacaggttccattcccatagaggggagggtctctcgg

SEQ ID NO: 2793 - DNA, 17502 bp, synthetic construct
  source 1..17502: mol_type = other DNA
  misc_feature 1..17502: note = Synthetic
gtaatcatcagctcctgatttgaagccttctatcacatcctgtttcaggttcttcgccgtaaggaagattatggggatatgggcatcgatttccctgatacctttcgcaagggcgaagccgtcaagctccggcatcatcacatccagcaggcagatatggaatctctccttcctgaagattgtcatcgcctgtgcgccgtcagtgaccagggtggtctcgtactccctggcattgaggtagttcttcagcagttgcccgaggttggggtcgtcttctgcaagcaggatgtttacctttttcattttggctgttcttttggaagatggattattattcttgttcccttgccggcctggctctccacctttatggtgccataatgctcatccacaatctttttgacgtagctgagcccgagtccgaacccctttatgttgtgcgtattgccggcgggaacgcgatagaatttttcaaagatgcgtttcagatgctcccgggggatgccaataccgttgtctgagacggtgatgatgacacccctgtgccatgatgccgttgaaacagtgatctccggcgtggtgacagtatatttcagggcgttgtcaataagattgagaaggacattgaagaagttggcctcatcaattgtaacaatcgggtcagaagcgtcaaggaaggtagagatggttcctcctcgaccgttgacctgaagtttaaaggcatccacggctctcagaatgattgcgtgcaggtccgcctggcgcttgtccagttccatttcggactgttcgaatatggcagtctgcagaaccctctcaaccagcactttcagcctgttgctctcctcgctgatcactactgccagtccctccgtgttgcgcgagccctccggaatactcttgtcagccagcatctgggaagccagcgagatggtggctatgggggtcttcagctcatgggtcatgttgttgatgaagtcgttccgtatctcggagagcctcttctgcctgaagatcacaatgaaggtgccggtggcgaggattattagcagcaacactataagcattgaggagatagccatgaaggcgatctggctgaatttgtactcctcctctttagggaagtagattgtcaggatattgtttcccggcaccgggtcattcggaaaaagctggcgcaggtatttgtttgcgccgctgccctcggtgtagtcgggcgtgcggtagatgatatcgccgtatgcgccgcgcaccgcacattcataatccagatggatgccgacggcatcaagcgaattcctgatgtacatctcgatctcctcaggagtgaagcggtctcgcagcggcggggtctcatgaaggatacggctgacgatattctcgatggagacgatcttgcttgtcatccgcgtagtagcgccggcggaaaggatctgttcctccggctcattgtcgccgggaaatgattccggcccggcagtcaccgaatcgagcagatatgtatatccggctctgcttatgatgactgaccttacatcaggatcgaatccatatttttcgaggagttttgactcggcagactgctggccgtagatgtctgccggctcttcatcgccggagggctgggactgaggattgatctcaccgattatgcgcttgtaggtctcagccttttcaaggtcggataccacctccttcagggcctcgttgacgccgaacctgaattcctgatcctcggcgctcaccacgttgttgatccacctgacctggataatcaccagcgcagagatggcaagaaagaaaaagacggccaggaggactatgtaggagcgcttcatattttaacaaaaataatctgttaaaaccttaatccgcagagttaacgtattttaacaggaacggcagaaatttaatgaacgcaaaatattaaataaatgttaaaaatcaatatattaacatatccttaagagataggtccggaaatatttctcatatttgcatcagttatggcacgataattgttataacatcaatggagtttttttcataggttaggttagttttagggttaacactgaagaggaggtgagaaattgtctcctctttctctttttactgggccagcagggcgatgttcctgtcggttgtttcgctgctgtcaagaatgaacactgcagttatttcagggatgagtctgagtgatgctgcaagctgtccggccgtttttatatcatgctgttgagacggcaccaggagataatcaatgtttttaagctttttcagaagcacggtcccgccgcttcggtttgagatcagggcaaaagctctgtttcccggtgcgaagcgtgaaaaactccgtgtaccggcggctgtatcaagtattatgtcttccgggcacttacgcaggtcggttccaaggtgcctgttgatcattaccgagagccggtagtcaggttcggctgagaccacacctaggaaaaagaatggttgtggtaccgcactttcgatggtgtgtcttgtgattttcctttccctgctcatttcttccttatcccgagcttgttgagggctgccattgacgcatcctgctctgcttccttcttcgtagctccttcgccctgcgagattatctcgttgtttatctccagggtgacggtgaagagagggtggccgttgctgccggatggcttctcccggaatgtgaagttaagcttttgtttgtttttctggcaatactccaggataaggcttttatagtccgtctcggctgccagcacctcgttgagattgagatgttttttaagcaccctttcgattatgaatttacgtgtgcgctcatagccggtatcaatgaagagggcgcctgcgagtgcttcaaccgcgttgccgtagagattgcggggagagtcagatggtcccaggtttgagactataaggcggtcgaggcccatggagaggccaagttgattgagtgtctcgcgattgacgatacgggctcttgttttagtaaggaaaccttccgtggcctcggggtatagcctgaagaggtaatccgacacgatactgtcaatgatggcgtcaccgaggtattcgagccgttcgttattgattcttacgccgtcgggaagagtgtatgtggcggaacggtgtatgaaggccatttcatacagtcgcaggttaacaggacgaaagccaaggagttttttcagtcctgaccggaattcgctcctgtcatgaatgagcgtgttgtttttcttcctgtgaagcaggaacactattcttcgaatttcctgaccaaaatagatgcgttgtgtccgccaaagccgaagttgttgctaagagccaccttcaccggtctcttctgggccttgttcagcgtaaggttcaggttctggtcaattgccggatcaggattcctgaagttgattgtggggggcatggtatcatgcaccactgccatgattgtggctatggcttccacggcaccggcggcgccgaggagatggccggtcatcgattttgttgcgctgatattgagtttataagcatgctcaccgaagacgttgatgatggccctgatctcagctatgtcacccagcggggtggctgtaccgtggacgtttatataatcaaggtccgagggtttcaggccggcctcttcgatggcctgcttcatgacgttgatggctcccatgccatcagggtgaggagcggtgatgtgatatgcgtcggctgtgaggccggtgccgatcacttcggcatagattcttgcacccctggcctttgcatgacccagttcttcaaggatgagtgcgccggcaccctcgccaatgacgaacccgtcacgggtgacatcaaagggacgggaagcggttgtatactcctcgttgtttgttgacatagcctgcatggagttgaaaccgcctatgcctgccggattgattgatgcttccgatcctcctgcgatgaaaacgtcggcttttccgagaatgatgtaatagtaggcgtcaataagtgcatttgtagaggatgcacatgctgaaaccgttgcaaagttagggccccggaagccgtacttgatcgaaagcattccggcggcgatgtcacttatcatcttgggaatgaaaaaagggctgaaacggggtgtgccgtcacccataacaaacccttttacttcctccatgaaagtatctatgccgccaatgcctgaggcccagatgacaccgcaacggtccttgtcggttgcctcgggatcaagacctgcatttttgactgcttcgtcggctgcaatatgtgcatactgagtgtagcggtccatcttgcgcgactccttcctgtcaaaatactgagcaggatcatagttcttgagctcacaggcaaacttcgtcttgaacctggtggtatcaaagtgggttatcaaaccggcaccactgacaccgtcaacaagaccgttccagtattcctgcagattgttgccgatgggggtcagagcccccatcccggtaactactacacgcctcatctcggggttataagatgatatctacttggcgttctcttcgatatacttaatggcttcgcctactgtgctaatgctttctgcctggtcatcaggaattccgatgttgaattccttttcgaattccatgatcagctcgacagtgtcaagagagtctgcgccaaggtcattagtgaaatgtgcttcgggagtaacctctgcttcatcaacgccaagcttctcaacgatgatcttctttactcttgtagaaatgtcagacatactaatcagttttacgttaatactcgtttttaaaactctgcaaagaaatatatttgtactatatttttcaagcaatttaccggaaatttacataactgcgtgcataaagttaagaaattcagcattttaatatcattttttagctgccggcctccggtgaaacattatacgctaaacagcagaaaatgaagcatatatccatactggcctccggaaacggtaccaatgctgaaaacatcatccggtacttttcgaacgataaaaatgcgcaagtgacgcttgttttgtcgaacaagcctcaggctaaggttttggaaagggctgcggcacacggggtggatgcattttttttcgaccgggctcaattttatgagaccggagaggtgcttatgatgcttcgtcgcagggagactgacctcgtggttctggcggggtttctgtggctggttccgcaggatgtgattgatgctttccggggccgtattgtcaatattcatcctgccctgttgccgcggttcggtggcagggggatgtacggtgacagggtacaccgtgcagtgcttgatgccggatgcagtgagagcggcattaccattcattacgtgaatgaacattatgactcaggtgatattatcttccaggcccggtgcccggtacttcccggtgatgatgcggacagcctggcggagcgtgtccacgccctcgaatatgagcattatccccgggtcatagaggagctgatcaggcaatagatatattttcgattttcgatttgcgatgtccgatttaaatcgcaaatcgcaaatcgcaaatcgcaaatcctcaatagcttattgtgcccagcaggttgatatacccttctgccacattgccgaactcctccatggattcaggtgcaacaggattgaccggcggggcctccacctttagcggatcaatgggcgagccgttgcggtagaacctgaaatcaaggtgaggacctgtagagaggcctgaacttcccacatatccgatgacctgaccctgtttcacatatacccctgatgatatccccggcccgaagcgtgagagatgcatataggcagtggaataaacgctgttatgcctgatcctcacaattcttccggctccgccctcgtaaccggtgctggtaaccctgccgtcgcctattgccagtaccggtgtgccgatcggagcagcatagtccacaccgtgatgcggtctcacaattttgaggataggatgcatacggcctccggagaagcgtgagctgatgcgtgagtagcgcagcggcgccttgaggaaggcctttcgcagactggcaccggtggtgtcaaagaatgacattacactgtcctggatgaagggtattgcgaagatggtgcttccggcatgctcgaactgggctgcatgtatcctgcggatccctaccgactcctcaccgatgaactcctcctcatagattaccttgaacttgtctcccttctgcaaaccgaagaagtcaatggtccaggcatatatctctgacatctcggccgagagattagggttgaggttattctcctgagctgcttcccagagagaagtcgatatggttccggatgaatacctgagtgtgcggattatttcagcatcatgcctgtagatggcaagcgtatctttcagcgaaaagaggtatgagaccctggggtcgtgattgtatatgaagtaatcgggtttactgagggtatcccttgttatcagcaccgagtaggagctgcctgtgcggaccttgcgcggatcaaatgtctccctgttgtcagtgagaagcttctcgatatcattccagtcgaccccgtgagatgccaggatggaggagatgaactggttcctctttatattaccggttataatgttgtacgaatcgagggggataccgaagaaggcattcctgtcgtcagccgtattggctgttcccgttgcggagtcagcctgagttgaggccggggtaagaacagcattgccggaaccttcggctgcaccgctgcgtacgcaggaagaggtgatcagcatcgcggcagcaaagagcgccgtcagggagctaagtaatctcataggacgatgttgactatccggttgggtaccacaataacttttggtttggctgtgcctatccatttccgcgccctctcgtcttccaggactatgcgggtaacctcttcgcgcgacagatcgaccgggagctcaattttaaatctcattttgccgttgacagataccgggcactcgaagagatcttccttcagatacttttcgttggcaacgggccagggctcataggccagggtgccggaatggcctgtcagctgccacagctcctcacccaggtggggtgcaaagggtgagagcagtttaacaaaggtcgaagcagtctcccgggttatcttttccttcttcatggctacattcaggaagatcatcatcgccgagatggctgtgttgaaacgaaggctctcgatatcctcagtcaccttcctgattgtcttgtgcaggctcttcagcacttcggtatcctcgtcaccgtctgttttattttcactgttggcaaccagccggtaggctcgtgccaggaagttatgagggcctttgatacccttctcgtcccacggcttcgttgcctccagcggaccgaggaacatctcgaaaagcctgagagtgtcggcgccgtagctcttcaccacatcgtcgggattgataacgttcttgaggctctttgacatcttcgccactatctggcggacctcttcgccggtatcggtgataaagaacctgccatctttttccgttacctggtccgaggctactttggcgccggttgccgtttcgtaggcaaacgccagtatcattccctggttgaagagctttgtgaacggttcgtccgttgagacaactccgagatcaaacagcaccttgtgccagaagcgggcgtagagcagatgcagcacggcatgctcagctcctccgatgtaaaggtcaaccggcatccagtatcgttccttctcagagtcaaatatggttttgtcgttcttcgggtcaataaatcgcaggtaataccagcatgaaccggcccactgcggcattgtattggtttcgcgcttgccgcgacgtccgtttttatctgtcacgtacagccagtcggtggcgttggagaggggtgactctccgctgacgccgggctcataaacctcgagatcagggagggtaagcggcaggtccttctcctcgagcaggctgatggtaccgtcttcccagtggatgacggggaacggttctccccagtaacgctgccggctgaagagccagtcacgcagcttgtagttgacacggtgcattccgatgttcctgctctcgatccactttgtgatggtagctattccctcatcgacattcaggccgtcgagggtgatgtccaggcccgggttcgaggagttgatgtaacgtccgtcaccgctccagcactcattgccggcgatgatacgttttttctgttctgcatcatcaacgtcgggagataggatgcatgtaatctccagtccgaatttctttgcaaactcaaaatcgcgctcatcatgtgccggtacggccatgattgccccggtgccgtatcccatcaggacatagtctgccacccagacgggtatattcttgttgttgaccgggttgatggcataagtgcctgtaaagacaccggtcttatccttggcgaggtcagtgcggtcaaggtccgatttgagtgatgcggccctgagatactcctcaactttatctttctgttcaggggcagtcagctcatttacaagcggattttcaggggagagcaccatgtaagtcgctccgaagagtgtatcggggcgggtggtatagactgtaatcttaagtttactgtcagccaccctgaaatcaacttcggcaccggtggagcggccgatccagttgcgctgcatctccttgatcccttcgggccagtcgaggttttcaaggccgctgaggagccgttcagcatagtaggggatacggagcatccactgtttcaggtttctgcgcaccaccttttgtccgcatttctcgtgcgagccgtctgtcagcacctcctcattggcgcatacgatgcggcaggaggggcaataccatatctgcgcgtcatcgtagtaggccagccttttcgagtcgatatatttcttcctcgcctcatctcctgccttgagaacgtcgaggggtatggggagttcgtttatgtcgcgaccgcggtcagtctggtggtcataccatgtgttgtagagccttatgaagatccactgggtccatttgtagtatgaggggtcggtggtgttaatctcgcggtcccagtcgtagctcaggcccagttcctttatctggcggcggaaggtatcgcagtttttgttggtggtaattgccggatgtgttccggtctggatggcgtactgttcagccggtagtccgaaggcatcccagcccatggggtgaagtacgttgaaacccttcatgcgtttgtagcgggcaacaatgtcagtggctgtgtaaccctcaggatggcctacgtgcaagccggccccggacgggtaggggtacatgtcaaggatatagcatttattgggatttgaaagatcgtccgatgttttgaaggttttgttcttctcccagtacgcctgccatttcttttctatctccgaaaaattgtactccttcatattaactgattggtttgcgcttatggggtgcgaaattaggaaatctttggcagaaatctccctgtacagcgggaggggtagccgatttggaggattaagttttgaaaatcggctttggcagtgtatttttgcaccctgaccggtcccgtagttcaatggatagaatgacagattccggttctgttggttgggcgttcgagtcgccccgggatcacgattacaacgctaatagcactgattatcagtgctattttgcttaatgggggacttattggggggcaatgcaatctatagaagttaaactattggtgcaggtattgtttctgttttataaaagaaagttatatttttaaagtagaaaaagcgacccgtttccggaccgctttggaagttttcactacggaataatccttattgtgaattgcttcaattgtctgataaagatacaacatatttcttaaaaaaacaaaccatgaagaaagtactcggccttgacattggagttaactcggtaggatatgctcttattgagaatgatagtgagggtaaagaccttaatataattaagacaggagtaagaatcgtaaatgaggatcctaattttcatggtaacttttaccaaggcaattcagccagcaaaaatgaagcccgaagaacaaaacgaatgatccgaagggggaaccaaaggttcaaagcccgtagagatgctctgtacagaattcttagaaaaaactctatgttcccatcagaccaactgcttaaccgtgttggcgagcgaacgctttacaggttacgtgctatagcagtttcagaacgactctcccttgatgagatcgggagagtatttattcatttgaatcaaagaagaggctacaagtcaagtaggaagtcaggccagagagtggaagaaggatcatacctgaccagaattgctgagttgggagaattgacgaaaagtcttacaataggccagttttgggatgcatatattaatttcaggtgtaacactgtagataatattccttctgcattgcttgattggttccggatcagagccgaagctgaaccaggtttccgaatcagggagaatatcttcccccgggattcttatattgcggagtttgataaaatttgggaatgccaggccacattttatccaactgttctcacaggcatgcctgggaagacattcagagagaacaagggaaccctttatcagaaaataagaaatgaaataatattctaccagaggaagctaaagagccagaaacatctcgtcagtgattgttcttttgagaaaggacataaggtcactcccaagagttctccgttttatcaagaattcagaatatggcagcagataaataatcttgaagttacggaccagtctaacaacataatgccaattgagtgggaaggacgcaaaagattatttgacgcactgcatgatcctgatcagctaactaagaggaacacaatgccatattcagttgttctgaaaattcttggatacacaggccgttcgtaccatctcaactataatttacttgaagggaacaaaacgtatcatactatctttaacgctttgaaaaaagcaggcattgaacaacctggcagatacctttcctttgataatacacaaaaaatacattccccgggcctttatgacctctggcacataacctattctcttgatgatgagagtgatgttataaagactctcgtaaagagatatggatttacaaataatcaagctgagattattgcaagtgaagtaggttatacttctgattacgggagcataagcacaagggcaataaggaagcttctgcctcaacttgaagagggtaaaaactattatgaagcatgtgtcgaggttggttaccagaatcctgaccatgttcgccgtgaggaattgaaaattcatatggatagaatattcccgaattccctaaggaatcctgtcgtggaacaggtacttaaccaggttgttaacgtggtaaacggaataattgacacttacgggcatattgatgaagtacgggttgaactcgccagagaccttaaaaacaatgcaaaacagcggagagaactcactcagaagaacagaaacctgaggaaactcaatgatacaatcgctttaagacttaagcaggagcatggatttaaccgggttagcggttctgacttgctaaggtacagactttgggatgagactgagaagcgatgtctgtattgcgggcagaatattactgtctctcaattatataatggggaggccgaaattgaacatttaatcccgtggtcaaggtcattcaatgatgccatgactaataagataattgcccacagtaagtgtaaccgtgataaggatcagatgacggcatacgattttatgtcatccaaaggagagacggaacttggaagatacgtggcagatgttaaccggctgttcacagaaggctcaggaaggcttgattctgataagaaagtcaaaatcaccagagctaagaaggacaatctcctgtgtaaaggttctgatataaaaggcgattttctcgccaggcagctcaaggatacgcagtatatagtccttgaaaccgttaccagactaaaggaggtgtttcccaaagtgaccaccacaacgggttctgtgacagactatctaaaagaaagttggcaacttaaaagccttattgatgagataaatattgacaagtacagagctgttggagaaaccgaatggagagaggagaaggaccgagagaatggtctaaagaaagttgagcggattaaaaactggagtaagagggatgatcagcggcatcatgcccttgatgcacttgtggttgcattgacaactcaaggcattattcagcgtatcaacaacgcaaaccaattgtttgagacaacccgtgagatgaaagagaaaactttcggatttcccattccggcacctgacctacgcaggaaaacaatggagagtcttggggaaatccttgtgtcttttaaaaagccggggtcaaaagttttgagcagaaaactaaatataataaatacctccaaaggacagaaggaacaggtgacatgggctccgcgagggagtttgcataaagacaccgtttttggaatgatcaggtggtacgaaaaaattaaaatcaataaaaggctcgacgaagagaccgcatccaggatagtaggagaggctgtacgttctgccgtattggaaagacttgcagcattcaacggtgatccagccaaagcattcaaaaagcctgtcttccaaggagaaaaagagataaaggaagtaacagtattgagagttagatttacaaaacggatattattgtcagaaactcttactcctaccgaggttgagaaaattgttgatccggtagcacagaagcttgtcagggaacgaatagatgtcaaaggtggtattaagcaggcattcagggattatctgaatgaccctatatggcagaacagagaaaagggtattatgttgaaacatgtaacagtgttcgatgatggaaaccttgagtcggtgagggatggttatgtctacacgaagggcaaccatcattcactgatatatttagatgaaaacggaaggtataccgaccgtgtagtatcattttgggaggctgtatcaaggtgcctggataacctaaacactaatgggtccatatatccggtgatagaccgcaatgacaaggatggcctcaggttccttttttcaatgcagatcaatgacctctttgttttcgatgttaatcctgaagacgttaacttctttgatccgctaaacagagcgttgctcggggaaaagatgtacagggtgcaaacaatatcaaaaggagactatcggtttagacaccaatacgaaacaactgtatcaaaggattatgatttttcatttaaaagacttcaatcagcagatgctctaaagacagctgttaaggtcagggtgaaccaccttggtgatataataagcattggtgaatgataaaacgaacgttctattttggcaatccctgcaagctttcactaaaagatggacagctgcacattgaatattctggtgacgagctctcaaaatcggttcctattgaggatactggtgtagttgtggtcgataatcctcaggttgtcgtaacagctgccctcatgatggcccttatggagaacaatgcggcgatattgatctgtaattcacgacaccttcctgattcgttgcttctgaggatgcacgaacaccatgccttcacagagacggtgaggtgtcaggtggaatcatcggaacctctgaggaagaacctgtggcagcagacagttgtggctaagatattcaatcaggcagcgcttattgaaatcatgggtattgaagcgaataacatgaaatattgggctggttcagtgcgaagtggtgatcctgacaattatgaagccagggcagctgcgttctactggtcggcactttatggcagtgaatcaggattccgtaggcaaaggcatggtgagccacccaacaacctgcttaattatgggtatgctctactgcgggccgtgattgcacggtcgcttgtagcttcagggcttatgaccttccagggtattcatcaccgcaataaatataatccctattgtctagccgatgatatcatggaaccataccgcccgtttatcgacaggataacgatggagattgctgcagatttcgaggatatcgaggagttaactcctgagattaagaagagacttcttgttatcccttcaactgatgtaataattgacggatcaaatagtccattaatgattgctgcacagaggacgaccgcctccttgatcaaatgctacgcaggtgagtctcggaaactcttatatccggtactgaaataatgcactggtaaatatggatgaaagaagctaacaggttaaactattacaggatcttgtgggtatttgtatttttcgatttgcctaccgatactaaaaaggacagaaaattctccgctagattccggaaggacctgatccgtgatgggtttacaatggttcaattttcaatatattcaaggcattgcaactccagagagaatgctgatgttcacataaaaagagtaaagggttttcttccacctcacggggaggtaataatcttcacgattacggataagcagttcggtatgatggaattcttccgagagaggaagcaggcagagcaccctgatacccctcagcagttggaactgttttaagttgtaggataaaaaagcctccccattacttacacggggaggctcttatgacacactttttaatttctctttgcgggcttaaaacacacttaatcaggcataaaactgcacccgtggtgtgtcaaagatcgttaaaccacaaattgaaagcaattcacaacgagttgacctgcgagagatcaggctcctgtggtgtgtcaaagatcgttaaaccacaaattgaaagcaattcacaacgccaccggccttttgtttgccgagcttgcaggtgtgtcaaagatcgttaaaccacaaattgaaagcaattcacaacaagggaactatgaatgtttatcaagcatcgggtgtgtcaaagatcgttaaaccacaaattgaaagcaattcacaactgacaacgcacttctttgttgaagagattcggtgtgtcaaagatcgttaaaccacaaattgaaagcaattcacaacgcatttaccacgcttgttgctttgatgaaaggtgtgtcaaagatcgttaaaccacaaattgaaagcaattcacaaccggtcttgatgacctccatgaggctactggggtgtgtcaaagatcgttaaaccacaaattgaaagcaattcacaacaaacttgctcttatcaagtccgagtattgcggtgtgtcaaagatcgttaaaccacaaattgaaagcaattcacaacgaggatcgaaaacgtaagaacgggaaccttggtgtgtcaaagatcgttaaaccacaaattgaaagcaattcacaactggcggcagacaataatacaccccgttcatggtgtgtcaaagatcgttaaaccacaaattgaaagcaattcacaacatatttttcacaccttggtgtatgcactccggtgtgtcaaagatcgttaaaccacaaattgaaagcaattcacaactcagtgacatagttgcctatctcggtctctggtgtgtcaaagatcgttaaaccacaaattgaaagcaattcacaacttgatatatgtactatctttggtacaacaaggtgtgtcaaagatcgttaaaccacaaattgaaagcaattcacaacagctactcccttgacttgtacacctagctcggtgtgtcaaagatcgttaaaccacaaattgaaagcaattcacaacacggctaacccgttcgagaatgatgtggtcggtgtgtcaaagatcgttaaaccacaaattgaaagcaattcacaacgtaacccagtctgtcccagccacgcccttgggtgtgtcaaagatcgttaaaccacaaattgaaagcaattcacaacgagtggtcaagtaatatttactcaggatagggtgtgtcaaagatcgttaaaccacaaattgaaagcaattcacaacaggccaccagcgccagcaagcagagcattaggtgtgtcaaagatcgttaaaccacaaattgaaagcaattcacaacaacagccctccgcagatagctgcggctaatggtgtgtcaaagatcgttaaaccacaaattgaaagcaattcacaactatatgttggttaggtgtaaaaaaaagaataggtgtgtcaaagatcgttaaaccacaaattgaaagcaattcacaactaaggctcgtgcctttgacggctcggaagaggtgtgtcaaagatcgttaaaccacaaattgaaagcaattcacaactagggaagttcgcttacattgtcggcaacgggtgtgtcaaagatcgttaaaccacaaattgaaagcaattcacaacagccctttttcgtatccatgagtaacagccggtgtgtcaaagatcgttaaaccacaaattgaaagcaattcacaactcagataccagcaatccttgacagcttccgggtgtgtcaaagatcgttaaaccacaaattgaaagcaattcacagccaattgtaggtaaatcaaaatgttgcccattggcataaatggtctcattttgtatgtatttttgcttagggttaagttgtgcggatgtaataccaagttagcgcctcgcaggtgatgggggctaggtaggctgtcaagggcagcgcacaatgaggccaacctgcaatccggacaggtacttacctgtccggattcttattagagttccgtggcaattaaaacaataatctacttaaagatttcatacggggtatgtaagaccttctggtcatagtttattatctcttggtaaggggggtgaggtctgggtgaacctaaggtacgggtgaggggggagctggctccccaaatgctggtaatgaaatttcagcattcaaatcagtgacagcacactattaaagtgctccgttatcagcgaaggagtaataatctgtgccggccattatcaaatgatcgagtaactgaacatcaagtaataatccggcttcttttattttctgcgtaatcttgatatcagaatccgacgggctgagatttccggaggggtggttatgcgctacaatcatccctgaagcagtattcagaactgcacttttgagaactatccggacatcggtaacggttccggaaatgcctccctttgaaatctgttcaattttaatcacccggtttgccctgttcagaaatatgcagtaaaactcctcatgcgtgaggtcggcaaagtagggttgtacaatttcccgggcatcgtttgaagacctgatttgatgaaggtctttttttgatgtgcgcccggcatgggc

SEQ ID NO: 2794 - DNA, 5098 bp, synthetic construct
  misc_feature 1..5098: note = Synthetic
  source 1..5098: mol_type = other DNA
  variation 4215..4347: note = n is a, c, g, or t
gcggcaagattatctacatgtttattgcaatagttcattaaagtgttaaatggctatagtgccgtatagtattaattctctgacatatttgttattccttacagagtatgggtaaatcctgaacatgtcaaaaaatcggtttgattttaaaatattgtgattcattattttaatattagccttagaaaatgtgcctctgcctgatcatggtagcattaaatcataattggggacttattggaggcaatatattctggagtcgtttaactctttagacagggtttgttccggtttataaaagaaaggtttaattttaaagaaaaaagcgacccgttgccggaccgctttggaagttttcactacggaataatccttattgtgaattgcttcaattgttcaataaaggtaaaacaaattattcaaaaaacaaaagatgaagaaagtactcggacttgatatcggtgttaactcggttggttatgctctcattggtagtgacacagaggataatagccttaaaatacttaagacgggagtaaggatagtaaatgaagacccggattttcatggtaacttctatcagggaaactcagccagtaaaaatgaagcacgaagaacaaaacgaatgatcaggagagggaatcagaggttcaaagcacgaagagatgctctgtacagaacacttagaaaaaactctatgttcccttctgataaactgcttaaccgtgtgagtgagggaacattgtatcggttacgggcgatggcagtttcagaacgtcttacacttgaggagatcggaagggtgttcattcatttgaatcaaagaagagggtacaagtcaaatcggaagtcagaaaagaaaactgaagaaggatcatatcttgccaacattgcagaattgggagaattgacaaaagatcttacaattggtcagttctgggatgcctacatcagttttaagagtaataacatagacaggattccaattgtgctgcttgattggtttcggtttagaactgaaactgagccggattttcgaatcagagagactatcttccctcgcgattcttatatttccgagtttgataaaatatgggaatgccaggcttccttttatccaactgttttgacaggaatgcccgggaagacattcagggaaaacaaaggaaccctttaccaaagaataagaaatgagataatattctaccaaaggaagctaaaaagccagaagcatctggtcagtgattgttcatttgaaaaaggacataaagtcgttcctaaaagctccccgttttatcaagaattcagaatatggcagcaaataaataatcttgaagttacagacctgtcaaacaacaaaatgcctattgagagcgaaggaaggaagcgagtatttgatgcattgcatgacactgatcagttgaataagaggaacacattgccatatactgctatccttaaaatccttggatactcaggccgttcgtaccatctgaactttaatatgctggaggggaataaaacctatattactatctttaatgcactgaagaaagctggaattgaacaacctgacagatacctttcctttgataatactcaaaagatagtttccaagggcctttatgacctctggcatataacctattctcttgatgatgaaagtgatgttattaagactctagttaaaagatatggttttacttataatcaggctgagattattgcaggtgaagtaggttatacttcagattatggtagtttaagcacgagggcaataagaaagcttctgccttaccttgaagagggtaagaactattatgaagcatgtgtcgctgttggttaccaaaaccctgagcatgtccaacgagaggaacttaagattcacatggataatatattcccgaattctcttagaaatcctgttgtggaacaggtacttaatcaggtggttaatgtggtaaatggaataattgatacttacgggcatattgatgaagtgagggttgaacttgccagagaccttaaaaacaatgcaaagcagaggaaagaactcaccaaaaaaaacaggaacctgaggaaacttaatgacacaatttctttacgacttaaacaggagcatggatttagccgggttagcggttctgacctgctgagatacagactttgggatgagactgagaagcgatgcctgtattgcggacagaatataactgtctctcaattgtataatggcgaggccgaaattgaacatattataccatggtcgagatcattcaatgatgcaatgactaataagataattgcacacagcaaatgtaatcgtgataaggatcagatgacggcatacgactttatggcatcaaaaggagaggcggaattgggaagatacgtggcagatgtcaacaggctgttcactgaaggctcaggaagacttgattcagacaagaaagtcagaattaccagggcgaaaaaggacaatctcctgtgcaagggttctgagataaaaggcgattttctagccaggcagctcaaggatacccagtatatagtccttgaaaccgtttccaggctaaaagatgtgtttcccaaagtaacaactacaactggctctgtgacagactatctaaaagaaacatggcagcttaaaagcctgattgatgagatgaacattgataagtacaggtctgtaggagaaactgaatggagagaggagaaggatcgtgaaaatggtttaaggaaagttgagcggattaaaaactggagtaaaagggatgatcatcgtcatcatgcccttgatgcattggtggtggcattgacaactcagggcataatacagcgtatcaataatgcaaataaaatgtttgaaacaacccgtgagatgaaagagaagactttcggatttctccctccggcaccggaccttcgcaggaaagcaatggagagccttggagaaatccttgtgtcgtttaagaagccggggtcaaaagtcttgagcagaaaggtaaatgtaatcaatacctccaaagggaaaaaggaacaggtaacatgggctccccgtgggagtctgcatgaagataccatttttggaatttgccgatggtacgagaagattaaggtcaacaaaaagctcaacgaaaaaaccgcatcccagatagtgggagaggaggtccgtatggctgttcttgaaagacttgcaacttttaatggtgactcatccaaagcattcgagaagcctctctttttaggagagaaagagattaaagaagtaacaattctcagtacaaggtttaccaagagagtgacattgtcggaaaaaattacccctgcccaggtggaaaaaatcatcgatcccactatacagaaacttgtcagggaaaggatagagtccaaagggggtataaagcaggcattcagggattatctgaatgaccctatatggcagaacacagaaaagggtataatgctgaaacatgttacagtatttgacgatggaaaccttgagtcggtgaggaatggttatgtatacacgaagggtaaccaccacgccctgatatattcggatgcaaatgggaggtattttgatcacatagtatctttttgggaggcagtctcaaactgtctggttaatctggataccaatggatctatatacccggtgatagatcgcagggataagggaaatcacaagttcgttttttccatgcagattaatgatctgtttgtttttgatgttaatcctgaagaggtcaacttctttgatccggtaaacaaacccctgttggctaaaaatttatatagagttcaggcgatgtcaaaaggtgattatttgttcaggcaccagtatgaggctacagtacaaaagaagtatgattttacctacaaaagaattacgtcaatggataagttaaagggcgctgttaagatcagaataaatcatctcggtgacatcataaaaattggggaatgattaaacgcacactctattttggaaatccatgcaaactttcactaaaagaaggtcagctgcacattgaatataccggaggcgagccatcaaaatctgttcctgttgaagatacaggagtaattgtgattgataattctcaggttgtcttaacagctgcgctcatgatggctctaatggagaacaatgcggcagtgttaatctgtaattcaaaacaccttccagatgcactgcttttaagaatgcannnnnnnnnnnnnnnnnnnnnnnnnnnnnnnnnnnnnnnnnnnnnnnnnnnnnnnnnnnnnnnnnnnnnnnnnnnnnnnnnnnnnnnnnnnnnnnnnnnnnnnnnnnnnnnnnnnnnnnnnnnnnnnnnnnnncacaggcatggtgaaccgcccaacaatcttttgaattatggttatgcaatactgcgggctgttattgcacggtcacttgttgcttccgggctaatgtcctttctgggtattcatcatcgtaataagtacaatccttattgccttgccgatgatataatggaaccatatcgtccgtttgtagataggattactttgtcgattactgaagattttgaggatattgaggagttgactccggagattaagaagaggcttctggttatcccttcaacagatgtaataattgatggctcaaaaagcccgttaatgatagccgcacagaggaccaccgcatcattgatgagatgctatgctggagaatctcggaaactattatttcctgtactgcaatgatatattagcaatatggatgaaaggtgctaacaggttaaactattatagaatcttgtgggtgtttgtatttttcgatttgcctaccgaaactaaaaaggacaggaaattctctgcaaggttccggaaggatctcattcgtgatggatttacaatggtgcaattctcaatctactccagacactgcaactcaagagaaaatgccgatgttcatataaaaagagtaaagagttttcttcctcctcacggtgaggtaattattttcacaattaccgataagcaattcggaatgatggagtttttccgtgggaggaaacagacagagcctcctgatacacctcaacaattggagctgttttga

SEQ ID NO: 2795 - DNA, 14174 bp, synthetic construct
  source 1..14174: mol_type = other DNA
  misc_feature 1..14174: note = Synthetic
agcacacgcttgataagcgtggggtcgcaggttcaagtcctgccagacccaccattgtcagtacttgtgggggtatagctcagttggtagagcgtctgttttgcaagcagaatgtcatcggttcgattccggttacctccaccatttctttttttagtaaatacgaattcattattttcttcagcaatcgctaaggccttaaaaacaaagaaatataaagggtgttccctttatatttctttgtttagtggttttattattcaccaaaaaataggttggtaataattttgaattttttagtgagcagtattgataggggctgttgtaactgttaaaatcgcgatagcgacagcggtcttaattgtggcactacgagataagggacgttaccgcgataagactgaaatagtatgtcgtaaagctctgtctcctgaagctgtccagcgttcaggagacatctttttttcgattgtctttttctatttactttaggcatctagattcacagcgcagccttgatggtgcgagactcttcacccgatctattctgttttttattttcaatgctattatcaatgctctattttgttttagatgtattttgcgttttatacattaaaaaaatgaggagtgaaaaattacaacagaaacaaaacaagtgccttatattctagggctagacttaggcattgcttctatcggttgggctttaatacaggtgcagccaaaagataaagataaaaaaacagaagaatcgctttgcgcccttttagattgcggcgttaggatttttaaaaaggcagaggtcccgaagagcggtgctagtttggctgctgaaagacggcagaaaagaggtcagcgccggattatacgccgccgtgcgcaccgtgtagcccgtttaaagtatgaactaaaaaaggcgggatttttacacgatggagattttatcgatagtgcccttaagatcattaagccagcgcccatgacctggttgaaccaggaaactggcgagattattacccaacaatcaatggagggggacgacaaaaaattcttgcctattggtatttgggggtggcgggttttagctctggaccagaaaattcctgatcgatttttagctttagttttgctccatctggtaaagcatcgtggttatttttccactcgtaaaaaaatggacctagaaaatctaaaaaatagtggggaaccaaataaagaaaaaaaagagagaaaagttcttaaaggagtgacggaaaatgatcagcttttagcacaatctctagcagaaaataacccttcttatcgtactccagcagaattggcagttaaaaagtttggtaaagaaactggccatattcacaataaaaagaacgattattcacatacttttaaccgagaacggatagaagaagaattgatagaaattcttcatattcaacaaagattgggaaatgataaagttaccgacgatgtgattgatacggttaaaaatttattaaaaagtcaaagagcggctttatcgggtgatgctttgaaaaaaatgtggggaaaatgcacctttgaaaaagatgaatatcgagcgcccaaacatacttatagtgctgagcgttttacttggttatcccgtttaaacaacctagccattaaatcgggcaattttttggatcgatggcccaccctagaagaaaaggaaattctaaaagaactgccctatgaacaaagtaagctaatctatgcacaagtacgtaagaagtggcatttaacagaaaatcaacgttttaatataagttatactgttccctttaagagaaaaaaaggaaagaaaaaagcggctgttgaccaaaaagtagaaaaaaaggataagacagttgcttggcaaaaaatagaagaaaggactttttttgagccggttgcttttcatacgataaaaaaagcattacaaaaagaaggcaaagaggataagtggctgatacttaagggaaatcgttccttattagataccataggggtggctttttcgctttataaaagcgatgaggatatagaaaactatttgtatgaaaaggtagaaacacgagataaaaacttgttggatgctatttttccttctcttttgaaacatatttctttttctggaacgattcatttatcccttaaagctttagataaaattcttccttatttagaagagggtatacgctatgatgaaacctgtgaaaaggtttatggtagtcatagcatctttgcgaagaatactcagaagcttcttcctcctgttcctgctggcactattcgcaaccctgtagtactgcgtagtttaagccaaatgcgtaaagtggtgaatgctattatccggacctatggaagcccctataaagtccatatagaatgcacgcgcgatttaggcaaaagccatatacaaagaacacaagaagaagaaaggcagttacagaatcgtgaattcaacgaaaaagctagtaaaaaatttaaagagctatttcccgaccacccccccaaaccgagggaggtattaaaataccgcttatatgaagaacagcaaggtaaaagcctttatagcggccaagaaatagatgttcgtcgtcttttagaacctaattatatagagatcgatcatgttttacccctgagccgcacttgggatgacagttattttaataaggttctggtactgaaaaaggaaaatcaaaacaaaggcaaccaaactccttatgaatggttaaagggaaaagaatattctcaagaatggcaagaatttcaaggtagggttcaatctctttatgcgactataccggctaaacaaggctatatcttgcacaaggatttacccgggaaccctaatgccgctgagccagaaacagaaaaagtagagcaatttcttaatcgcaaccggagtgatacgcgctatataacccgtcaagcagctcagtttattgagaataatttacaatttagagacagcgaaattaagaagaaggtctttactccttctggacgcatcactaagattatgcgtgagcgctggtgtcttaaaaaagatcgcggtaatcatcgccatcatgctttagatgcagtggtcgttgcttgtacgactcaaggcatggagcaaaagatcactcgtttttttcagcaaaaagaaacgggtaaaaaagaatctttagggtttcctgaaccgtgggatttttttagggaagaaatcaaagctcgtattttttcttcaactcctaaagcagagttacaagcaaaggcatgggatcgccttccgtatgtgccccatatagaacaagaagattatgatgcacagtatgctctttttgtatcgcgtatgccagagcgtaagggcacaggggaggggcatgaagagattttacgttcccctaagtttttaaaagagggaaaaagtgcggctaaaaaaccgttaacaaagcttactaaaggcgatattggtaatatcgtaggttaccaagcagggaaaaagggaagagagcctgccttttatgaagatttgcaaaaaagattggatcaatttggaggcaaagctaaaacagtctttgaaactgatttctataaacctaatcgcgaaggaagacaaggagctttagtaaaatctgtacgagtcttcagcaccaagacaggtatccttttagggcccgataaaacgaagccagaggcgatcgtcgaacgttcttctatggctcgaatagacatttttagtaaagtggctcataaaggaaaacgagctggccaaaaaaattattatgcggtgccggtttatacgtatcaggtagcgacgggcgtgcttcccgataaaactgttcctgacgatttatcggtggtcgatcttcagtttgagtttgctttatatcccaacgatttagtttattttaaaagtaaaagtattgatgctgggttttattactaccgttattacaatagaaatacgggggcaatagatctacaaacgcctgatttttcaagcggtgataaatcagtaaaaaagaaaaaagcaacagaaaagaaatcgttcggactatttcagggtgtgggaataaaacaggcagagatttttgaaaaatatacggttgatgtgctaggaagaaataaaaggaaagtccatgagcgaaagcgtcctggagtgatcgtaaaaaagtaaaagcacgaccacggcgaaaaataattcatttaggaggagggccgccctatgagctggcggagtttggccattacccatcctgctcgtttgtctttatctaaaggacagcttttaattgagcagcaggaaaaaattacggttcccttggaagatatcgctatcgtggtgatagaagcaaaggaggtggtgttaacagcacccctcctttctgtttttgcgagctatggaattactctatttacctgtgatcgcacctttttaccctgtggccagtggttacctttttcccaacatcaccgttttttaggagtgattaaaaaacaactctgtttaacccttcctagcaaaaaaagattatggcaaaaaattgtgcaaagtaaggtgcgtaatcaggcctgggtactaaaggcagcaaagtatgaaaagagtgcagagtatttggaacgcttagctttggcggtgcaatcaggagataaaagttatgtagaatcgcgggcagctgccttttattttaaagagctatttgggctggggttttcgcgccaatcagagcaaacggttaatgatcatttaaattatggctacagcgttttacgtgcggccattgcgcgtgctttgacgcaatacggttttttaagcgtgctgggtatttggcataaaaatgaattaaatagctttaacttagccgatgatttaattgagccctttcgtcctttggtcgatttatggctgattaaccaaggaaaggagcttccttcagagctaacgcagcagagccgaatggcgttgatctctcttctgcactacagtattaaaatagaaggcgccacttacagtgtactggcggctatagaaaaaacggtgagcagtttgcaaactgcaatcaacgaccctgcaccttgcacattggctcttccccaaatgatgcatttacagcggcacgaatatgagtaatgggcaatttatgcgtttgatcgttttatttgatctacccgtgaccagtaaaataaatatgcatgctgccaatcgatttagaaactttcttaaaaaagatggctaccaaatgctgcaactgtcagtttatgctcgcttagttcgcgggcgagaagtagtggagaagcaccggaaaagattaaaagccaacttacctccagaaggacagatccgttgcctagaaataacagaaaagcaatttgccaatatcgatatcctagtgggtcaaccgactgcacaagaaaagaaggtaaatggagagcaattgctgcttttttgaaactgtttttttatggttttttattctttttttaatgtcaatcaatgaattagcttcgtccgattatagcactacgagataagggagggaaccgcggctctcgtttaccaagcctcctatggtcttccattatagcactacgagataagggagggaaccgcggcccattgcgtcggcttccccatcgggcagcaaaataaatgatgggagcacctaagagtaggatagaaccgattcgccaatctaacgcaaaactcatgcaggcaatcgtcaagggcgtggtcagattgataattaaaggaacaagtaaatccatgaccgtttgcgctacaaacagtgtcccccttaccgctacgccgctggcaaaacctgttgcttgcgaattaaaccaacccaggggcaaagaaataagctgctcgccaaggcgacggtgcataactacgatgatccgcatcgattcgttaaaaccgcgcattactacccaagcttggagcgcaccattgacaagtgcccctattaatagactgagagagcttattaacagcatgtggctattggcagtgaaaagagcatagactgtgctgaggaacagacccagtactaagccttggaaaacgccgattaatgctgcagcgatgagaaaatgccagaatcttgctctagaagcgtgttcatctaactttaataaggttgtaatcatagtgtattttcttcaggctgatcagtagtaaattcgtgccataaacgcgcatagagttggccgtttgccaataaagtttcgtgggtgccgcattctgctatgcgccccttatccaacaccacgatttggtcggcatcctttatggtcgataaacgatgagcgatcgcgacggtggtgcggccgtgagccagatggataatagcttggcggatgtctttttctgaatctggatcaatggcagaagtggcttcgtccataatcagaatggggcgagcggccagaatcagacgcgctattgcaacccgctgcgcttcgcccccggaaagatgtacatcgatacctggtatcgaatcatagcctttagggagggccataatccgtttatcaattcgtgcggtctgtgcggctgttcgtatcttttcaagtggggtatcttccatacccaatgcgatattttgtgctaaagaaatagcgggaagtgaaggggtttgctctaatacgcctatccactcagaaagctgagagaggggaacatcgctgatattatgcccatcaatgcaaatttgtccgctgctgacatcttgctggcgagcaatcaaatgagctaaagtactttttccagcgcccgaaggtcctactaatgcagtgaaacttccggggggcaagttcaacgagatatcatgaagaacttctttatctccataagaaaaacctacattctttaaggtaatttctcctttatttaaagataccggttttgttgcattggagagctctttttcgttgagtagtttttgaatattacctgcagcgactaaagcggtactgcgaacttgattggcaagtgcgatggtcataatagaggcagggagaagcatggctacgagtgtggccaccataatttcttctgcggtcactgcgcttttttctaatccccagatgccaaaaaggatcatgatcaatgccactaccggtgaagaaaggacaatcagggcaatcgattgtgatttcatcgctgggcgcaccagagcactaaaattattatggaaacgatgggaaacatcggtaaatttttggtaaccgatgcccgtgcgactaaataccttaagcacgggaaccccacgcacataatcgacaatcacggcgctgatctctgccagttgctgtgagatttttttcatgatgcctttcatgttaccaccggataagatactgaatataaaagaataaagtataaaatagagcacgataggaacacaggccgctagccctaagcgccaattgagactaaaacaaaaacagagcccaaccaatggagtggtcacaaaagcaaccccttctaccaaagtatgggcgaccaattggtggagagcatcaacatcattttgcataacttgatggataccgcccgatgcatgtttgccaaaccacaccgctggtaaccgacccaatttatcaatgagatgtaaacgcagtttatgttgtaaattggcatcggcaaaatgagttattgctagggcgattgcgcttagtccagattgcagtcctagcccaatgatgaagatccataacgcatgagagatttgtgcagtggtcgctcctcctattaacctctcagttatttctaacagtgattgatacacgatccacccacttaaactggcgactatttggatctccaccgctagaagggtggggatccacacaggcttcaaaatcattaataatgggcttgtatttgaatttagcatggtagcaattctcctaaataatgaggcaatgaagtgtcgggaggggccatataaaaatggccgcctggcaaacaccgtatacgaaaattaccatggctggtataggaccaacgatggagggcggatcggttaatttcttgatcttcagcgccgtaaactacggttaaatctgctacggttcccatttgcgggcaataggtttctagtaagcgataatcttccctgatcataggtaaaaaaagttcacgaagttcagggatctgccaaaaatcacgatgtgatggattctgacgattcatatcagcgattaaagcggaatcatcctctttatgtagggtagtacctggaaggcaatcgggaggattttgccctgaaaccacagttatgatcgatcgttcaggtgtcatctgttcgagataacgggcggtttcccaggcgacccacgcccccatcgaatgaccaataagtaaggcaggcctgataggcagtagggcatctaaatggagggcgcattcccgggccaatgcaggcagggaagcgggatgaggggtatggaaacgactatcccgcccagggtaaacgatgccccataattgatgataaggtaaggtttctgcccaatgagcgtaaaagcgaggagactgcctccggcgtggggcaaaactactaccgcgggcgcaaaacgccgggcatgattatcgatatttccgagaggggtaataatatccattattcaaactttctctgagtaagccccaggctgtgttgcctatcgctttaggaggagggaggttctgttgctgtggttgacctacttgagttcctatgatttgccacagttgtagtacagttaattggcgctgtagttgggcgttgttggcttggtgagacgttatgaactgggctactgtggaccgaatagctgaatttatgtcttggaagagatggtcttggatgggcaccccctttaaaggactactgtaaaaaagaaaatctttttgaccgatattttgttcttttataatcgattgggattgttgaaatcggctttcccagatgacctgcccgtaaggagaatgaagcatcaattctccttcatcactgattaaaataatttgcatcaaaggttgcgcattgtcatcgggtgaagcggcgtcaaaacggttgaacaagacaatatcgacggcaatcccctgccagctaccgccgattaatattttggcaaacccggccataggggtagtggtaatcgctagagaagggctccctataatttccgccaatactaataaggcacaggttaatgtctgtatcgatacccgcatttctactgatcgaataccactttggtcactgagtttttgcgctgcatggagaaaacagcgtacactgggagtatgatcataaaaaggcgttatttgaaagcgagtgttgttctctctggcaatatgcaatgattgcaccatatcttgtgggtgcatgggtaattcttggagaactgggatcccttcttgtaataaacggcgcacgatttgatctccatcgccgcctacgatggaagaacgtaccgctacaatggcacaagtagggcgattatccgcaagagctgactcgatatcagaaaaataatcacagttgagctttttggccagttgccgcccttgtattccctcttttccgatcagtgcacgcagtcctcgaccttgcaaggcatgcgcatagtaggcgccaaactttgttcccactacccagatcccttggtttgaagaaagagacacctgattcatagctccccctcttcataggggggttggtttacaagagaacgccagctaattttgactccagaaggggggtgaacgttccaatcagaccaaatagaaattgcttttgggtaagatgaaaaccaaaatccccctttttgcgcactttctgctaagtgaaggacagcccaggccgcaacttctccagtgacagcgtagctatctgaacaggttaaataggtacattatcctttgtggacctctgtatcttcgtaggcttcagcgtacaggcaaaaccaaagtcttttgcctgcaagtgtggcggcaatatcttgacaagcgttttcggctatttttcctgaaatcattatttcattcaataaataagttatttcttccgatgccgtgacgttaaaagaagaaagcgatgaaaaattcaatactcgtgccactaatactgcttcttcatcaaggaatggatggatgagggaatttttaggaaagcaatcgggaagcagaggtttgggagggttcactttctgaaaatggcgatggtaaagctggaagccagggtaaccggttcgctcatgaatcgcctgtagatattcacttaatcccgctggcgtaagcggctgcaatcctcctgtaaaagcagtaacgtgcaatgattcggtgcaaggaaaacgatggcttaaagcgcgcagaataacccctactaaccctggttggactccggcaccaaattggtggcattatgatcgcggggtagataaataattccccatagacagcagatcagcatcgctgccgccgctactacccaggtccagcgtgagtggaccgtggcaaaggctgaaccgatgagacaagaaagcgccattcctattttgccatactggtgatagtgcgacaaagcggtttctatcgttacagaagtgctgcggttatcgagtaagtaagcgacgaaagtaccgctaaaaagcagtaaacttaaagaattaaaaaattcagcaagcacaaacgaagcgaaactatgggcaccggccatcaaaaataaccaaatggttgaacagaggccagcagttaacacggaaaaacggcgactaattttatcggctaaataggaaaggggcacatcaagaaaaaaaattaatgctgcctggaaggctttaataaagccaacttgttctagacttaagccataagccatcatataaaacacggaaaaagcgagggttaaagagcggatcgcattcagggttaaaccgtaaattaagattttatttttgaacatgatgtcaacgtttttgccaggatcttgaagtaaaggacttattattttattgatgctgttgtcatcagcattctgttttctgtttttcttaatccttaattttaagtgttggaataatgtcgcacattatacggtacagggctacttttcctgtccaaagagccgggttaaaagcgagattaggtacaataaaaatccttctacatagtatgttgggcgttcagtgaaatttttagcacgtagctttgaaaatgctcctttactgacctggacgaaacagaagagtcattcttttccttctttaaaaacctcgcgccttttcttgcgccgtctgacctatgccgatgctgaagccttgtttagctatttttctgagccttcagtcacggagtattacgacgtagatactttaatacgggtcgaacaggctgaagagctgattcgcttatggaacgtagcttatagtatgaaaaaagccatgcgctgggctctggtattaaaggagagtaatgaagtgatcggtacctgtggctttcacaacttccacgaagaacatgcacgtgcggaaataggctatgacttaaagcctgcgttttggcatcaaggctatatgagagaagccgtgtcttccatgatccgctatggttttcgacggttaaacttgcaccgcattgaagcctttatttttccacaaaatatcgcttctcgtaagcttttagaggcggttggattacaatttgaagggcgattgcaggagtatttttggcatcgcggcgaatttgtggatagtgaaatttacgccatcacctacagccgatggaagaaaaaatagcgctatttttttaccaagcggcaaatagcttcaacaatccgttcagcagtaagaccataagttttataaagcacatcccctggggcagaagcgccaaaatgatcgatacctagggcgatatctgatttattgatataccggtaggaaagatccgtgttccctgcttctaccattactttagggatcccttcaggaagaatgtgcttacgatatccttcgcattcccgatcgaatcgctccatacagggcatggataccacattgatgcatatgccatatccttctaatagcgtacgtgcttttatagcgagtgatacttcggtaccggatgcataaacgatggcttctgctttttcccggtagcctagataataggctccttttttgatatgggtgatttcttctttagtccgtcttacaaaagaagcttgttggcggctaaacaccagagcggtagggtggttgtgatttaagaaggcacattcccaagagacaaaagcttctaccgtatcacacgcacgccagacttctacattaggaattaaacgcaaggtatttaattgctctatcggttgatgggtcgggccgtcttcgcccacacctatggaatcatgggtgaaaacaaaaattgaacctaattccattaaagccgccatgcggatagcgttgcgtccatattcgctaaacattaagaaagtagcagcaaaagggcgcagccctccatgcaagaaaataccgttgatcatggccatcatggcgaactcgcgcacgccataatgcacataattgccgctgccctcggggcctatcgagtgcatttctggccaactggttaaattagagggggtaagatcagcagatccccccagtagttcaggaagcttttgggcaaatagagaaatgaccccttgactggcctttcgggtggctactttttcgccttttttttggatatgttgcagacactctctgctgtagctcgcaaaattgtccggcagttcatgatgaaggcgacggataaattcgcgcgctttttgcgggtatttttcttgatagcgggtaaaaagttcttgccacgctttttctactgctgcgccttgtgtgcgtgcatcccaggcttgataaatattttgcggaacagtaaaaggcggatagggccattcgagtttttctcgggtagcggcgatttcttctttacctaagggagaaccatgggtagaggcgctcccttctttattgactgatccagcagcgattttggtgcgacagcgaataaaactgggccgtgataaatcctgtttggcgttttgaatcgcttggtcaatggcgtccatatcatgaccatcgatttcattagtctgccacccataggctgcaaaacgctctaatgtgtcttcggtaaaccagccatcggtattaccgtcaatagaaatctggttgctatcgtacagaacaatcagtttacccagttttaaggtgccggctaaagaagctgcttcgtgcgaaatcccttccatcaaacaaccatcccctaagaaaacataagtaaaatgatcaatcagagcgaatttttcggtgttaaattctgcagccaataatttttctgccaaagccatacccaccgcgttagcaaagccttgtcccaaggggccggtactggtttctactcccggggttaaatgcacttctgggtgccctggagttttactgtttaactggcgaaaagcttttagatcgtcgatagataaatcgtacccggttaagtggagcacactgtagaggagcatagaagcatgcccatttgataaaacaaaacgatcgcgatcggggaaagaaggattgttaggattatgttttaaatgtttttgccacaagacggtagccatttctgccattcccataggggcacctggatgcccagattgagaattttctattgcatctatagacagaaaacgaatggcattggctaggggggaaaacagcataaagtattcctaagcgggtctttattgtgtgaggaatcttatgatgcttcttctgaaaagacaagggaagaaatcttttcgtattggtcgaggaaaaaatttaggttagaatgagttcaccgtaaaaaagcggtcatcttaccttattaatttttcataaggggagaatttgatagacgatttcttagcaaaatcaaaagaaaagacgtcgcccttcaagcactggggggtcgttttaattgttttgctggtgcatatttttctccttttcctcctgcttttgctatcgtttttatttaccgctccatcagtaaaagaaactccgctacaagtggtttgggttcggccagaaaataaaacgatgctcgaaaacaattcagcagctcatactggcgataa

SEQ ID NO: 2796 - DNA, 23117 bp, synthetic construct
  misc_feature 1..23117: note = Synthetic
  source 1..23117: mol_type = other DNA
ttgggaaattggtagcgccgagtgcagcaacagactcaaactcatcatcgagctgctgcataatctcttcagactcgaaaagagccaggaacagattttcggagacaccgaataatgcggcaatgtttaccagtactttagtatcattcaggtcctggccttctgcaaaaaacgcggaatgcatggctctgagaacttccagggtaagcacaggccggagcaggcgcatacacagcaaggcacggcaggcaggctctgtggcaaacacctgttctattttcaggaaatatctgaaatcgaaaggcagatgcgtgcgctgctgcacccaatgccagttagtggccagtcgttcgcgttcctgacgcttgagcggttgagtgttgtaagcctgcaggttgcctagctgcacctgtacctgtaagcgcccctgccataaggcggccagccggcgcaccacataggtaaagccgtagcaccaggcacacatcgggtttgtaatatagaggatagtaggcgtattcggagactgtaccatttgtagcggcgtgggtttagctatagtttacagcggtcgggcaattcaggttataaatctacagctgcttaataaaacgaattcataattcaactaagatagaaaggaaaaacaaaacccgctgccagatgctgtttacagtccggcagcgggtttatatttgatcaaactatagttatcgtttatctaattggcgtttcaacttttctgaaacattatccagcagctggtaccagttatcgccttcatcatgggcaaacacatcgttgccaggcacacctacacgcatgcgcacacttttctgattcgtagcctgcttcgcttcttctttaaaataaacatccactgaatctattttggtaccatggcgcttcaactttgtaattatctcccggatgttctgctgaatggtatcgggaatttcaatatcaactgcctgtatgtctagtttaatgccttcaaagttctctgtgtaattcataatatatctgttttcgtaggtgatgccggcaattttaccggctttaattgagtaaaattaaacgtacagacccggcttaggttcttgcgatatggctatagttttgtgctgtccgggcaggttatattcactactcaaaatattttactcatttttcagactaactacttgactttacgtaaaccgttattaactttgaaactcaaagtactttattatgaaccaacagcaagaccagttagctaccctgcacgagatccggaatatcatggatcgttcttcccggtttatttcgcttagcggactttcgggagtggcggcaggcgtatcggcgcttataggtgcagcggtcgtaaaatggtacctggtatcaaacaatatcgtttacaatgagatttatggccttacgctaaccagagaggccatcatctttatactatcggttgcagcattggtatttatactcgccctgtcttcggctacctattttacggcacgcaatgccaagaaaaaaagccatcgtgtctgggacagcaaaacagaacgtatgctgatcaacctgtttataccgttggcagctggcggtatcttttgcgctatactgatgtatcatagcctgttttatttagtagcaccagtcatgcttattttttatggctgtgccttactaaatgccagcaagtataccctgagcgatatccggtacctgggcattattgagattgcactggggctggtcgccagcttttttgtggggtatggtttattagcctggacgttggggtttggagtgctgcacattgtgtacggtacactggtgtattttaaatacgaacgctagcaggcacgtgaaagattaccttgaaaatataaataaagccttcgaaagcagggcgcggttaggcattatgtcggtactgatggtggaagagaaaacagattttaacaccctgaaagagacgctgcagctaacagacggtaacctggccagtcacctgcgtgcactcgaagaggcgaactacctgcacgtagaaaagcagtttgtaggccgtaaaccaaacactacttaccaggctaccgatgcaggccgcgaagcttttaagagccacctggacgcactggagcagttaattttgaataaccggaacggcatttaaatttttttattcatcaactttgaaactcaaagtactttaaagcaaaaaaaactataaatctataaacgatgacacatcaaagcgaaatacacaatcagcctgttcatccggctccggtagggaaacggatgctgctgggggcaggaataggtttgctgcttatctccttcttcctgatcggggcaacaaaggcgcctgaatggcccacttactggtggatcaggccattgctggtggtaccggcagctggtgcactgggggggctgttcttttataatatggatcacctgcgcagccagggcggctggagaaccggacttgcaaatgtgctgagcctgctggtgttcatagttgtgctgtggctgggtactgttttaggcctggccggtactatgtgggattaagatacctgaacagccaattgagaataaaatctgaaactataaactatagcaacatgactgaaagaaacaactaccagggcgaagtggccaaaaacgacggttctatggccctcaccatcatcagctggattttcgggctggccttctttgcaattggcatcgtgaacacgttctggggaggcgatactggcttcggaatttttatagtgctactctcactggtctattttcttcctgcaaacgagatcttccataaaataacgggctaccggcttcctcaattcagactattaaagatcatactgggcatcttcattatctgggcagccatgggcgtaggcgaattgttcgacaagatcgaaatgatgacaaaaagcttttagcaaactataactataacataataaaaacaattaactcaaaaactaaatattatgataacgcaaaacaaaagacttatcggtattgtgctcggagtagcgcttatcctttctattcccttaatcgccatgcagtttacaaatgaagtagactggaagctgttcgattttgtgatcatgggcgtgctgctccttggcacggggctagtgattgaactggtgataagaaaagtaaggaatatggattatcgtattggcttaattgctttagcacttttgatacttttcctgatctgggctgagctggcagttggcattttcgggtcgccgtttgccggtagttaagcagctgaactatagcaagagaggataattgaaacttaagcgaatcagtgatggaaaacaaaacaacaatgccaaacaagccaaccatctggactataggtgcatgggtattcggtattctggtaatactgatcggggtactgaatctattcctggtgcacccggttccgggtgttgcatacctgcttatttcgctggtatttcttccgccttccaacgcctggttcaggaggaaatttggcttctcctttccgttacttgtcaagattgtgctgggcgtggtgctgatcatgttcacgttaggtgtaagcgacctcggcgacatgattgacaagctgtaattctgacgtagcaactatagcttaatccggcaaaaaaacagcagccatgaaagaagaaatactaacgcacctcaacaacccgggccagctcgaaaagctataccgacataaccgggcaccttttacgcaggagttccgagccatttatcccgacctgaaaggtaacccgttggcagagttctggaacgaacgcctgcgctacgaaagcgacgacatttcgtggggaaccagccgggatctgctgctggtagtattggcatcgctggtggcagggtttattgctaaaataccggcttatctgcccgtagcggaagagttcttctatccacgcaacattggcttcatcgttttcccattgctaacagcctattttgcctggaagaacaagttgcaggcctataaaaccgcgctgctcggtgccatcatgcttgtttcgctggtgtacatcaacctattgcccggcactaccacaaccgacaccctggtactggcctgcctgcacctgcctttgctgctctgggctgtactgggcgcggcttacaccggcaacaatttcaacaactatagcaggcggctcgggtacctccgctttaacggtgacctgctcgtgatgactgccctgctggtaattgccggcgtgatcatgacaggtattacgatcggtttgttcgctattatcgggctgcagatagaacagttttatgcggagtacattggtattttcggggcggcggccattcctatagttgccactcaccttacccaaactaacccgcaactggtaaacaaggtgtctccggttatcgctaaaatattcagcccgctggtgctcatcatgcttaccatttacctgatcgcaatccccttttccggcaaagacccttacaacgaccgcgatttcctgatcctatttaacatcctgctggtcggggtaatggcgcttatctttttctctatcgctgataactcccggaaagagcaggacgccaccagtacctggatcctgttgctgctggctatagttaccattgtggtaaacagcattgccttatcagccataatgttccggatagccgaatggggcattacaccaaacaggctggccgttttaggcagcaacattctcattttgttcaacctgctcctggttaccggctcgcttttcagggcaattaccaaaaaggctgatgttgccagtctgggaagagccattgccgcttacctgccggtttattttatctgggtggtgatcgtggtgttcctgttcccggtgctgttcgggtttaagtaggcatcggtacccaatacctcttatctcaacttcctaaataaggtatcaatctacccggcactcacgtggtggggtgccggaactatgtctgaaaaaaatgaaaacactgataaaaacgcctgttaaaaccgagctcaacctgaagcttactggtgtagggctgattgtagtttccttcctgttgtttatgcttccggagtggggcgtcggggcaactgatgaggcttcgttcggtctcttctggatgaactatagtctgactgccgtttactttgtcgtaatgctatccaagggagtattttcctttaagcggcctttacgacacttagaatacctttacctctacctcgtactttttatcatcagttgctacgcgcttaaccgccagatgagcattttccaggattctgttccctggctcgaagctttcatcacgcttttctgcataaccctgatgggctatagtttccgggagctgttaccgaaaaaattgaaccaggtgctgctctttgtacttggtgccggatctgtgctgtggctatactatgctatttacctgttgccactttatatcatcagtctttttgggatactggcactgggcatgtcactacatacttatgttccgctctgggtagtaatttgtttgggggttggggtgtataaagccgcggctgaggacaggcagtacctgcgcagttttatagccggagccgcattccctatcctgtttagcgttttctatatctggcaatggcaagaccgtaatgagcagcttgccttcagcggtaacgaatacgtaattcaggaagatgaaacgctgccacgctgggtaaaattaagccagcaattacctgccgactacctgaccgaacgcatactaaagaccgaccttgtttaccaggtgcctatcggggagtttagcatgtgggatatgcccagggagaattttgaggaagtgaaacgccacgacccacttgtgatcttatcggtactgttgctgggtgagccgaatctggaccggaaagaaaagatcaagatactggaaagcatgtacgacgcacggcatcaggccgaggagcggctttggtcgggcaataacctgaaaacagccaatgtagtgtcgcaggtgcgcatttacccgaactatagacttgcctacaccgagaaggtgctacgcgtgcacaacaacatggcacacagcaataatcaacaggaagcaatctacacctttttcctgcccgaaggcagcgtagttacatcactttcgctctggataaacggtcgcgaagagaaaggttacctcactaccaaaagcaaagcccagacagcttacaaaactatagttggcgtcgaagcccgcgacccatcggtagtgcactggcaggaaggcaacagggtatcggtaagagtttttccgtgcacgccggaagaagaccgccagtttaagatcggggttacctctccccttcagcagcagggcgaagcgcttgtttaccagaacatttactttaccggtccaagcacacaaggcgctaccgagacatctatggtttatttggatgaacaggtaagcggcctcgagttaccagcaaactataaacttacgcgcagcaatacatataaacgccagggaaactatagccaggactggagcctgcggtttaacacacctgttttagcgaacagcagtttcagttttgccggcaacaactatagtttaactgaactgccgcaacagtttgtaccatttgagccacagcaactttacctcgatataaacgccagttggtcggagaatgaatttgagcaggtgtgggaaacggcaaaacaaaagccggtgtatgtatgggatgggaaaatggtgcaactgaacgaacagaacagggcagaactatttggcctgctgcaacagcaacgctactcattgttcccgcttcataagatcaaaaacccggaacaggcactggttatcagtaaaagtaacggcgtatctcctaacctcagcgacctgaaagataccccatttgcagaacagatggcggaagtgctgccgcaacatgcaactataagcgtgttctcgcttggcgaaaagttatctccctactttaagagtctgaaagagttacgggtaattgctcctatgcacggcgacaccaaacaactggctacactactgcagaataagcaattcattaacacaactatagatcataacaccgttcgcctgggagaatcagggctggctatagctaagacaaatgcaactatagcgggaggcacagcgccagatcatgtactgcgtttattcacctataaccatgtgttgatgcagatcggggcacggtatttcagtaaggaatttatagaagacgaactgattgcagaagccacgcaggccaatattgtaagcccggtatccagcctgatcgtgctggaaacgcaggcagattacgagcggttcgacatccagaaaagcaaagacagcctgggaaatgccagtatgaacggttcaggtgctgtaccggagccggaagagtgggcacttatcatcctggcagtgctgatcatcggatttatcaccttaaaaccttactttctgagatgaagctaaacacactgcgccctaccgagcaactgctgattcctttgctggttcttggcttgtacctggtattgggagccttttttctaagcaaatacctgctttgggacagccaatggttactggctatagttcttgtaccttttgttgcacaggtgcagcctcgtaaatcgctctcttctgttttactgatcacaactatagtgctggccatacttgctgctaccctgcaaaacagcactttatacttcttcgcttttgtggtagcgctgtggtgtggtgcgcagcttatagttggcaaaatctccatctacccgctgttgctgctggtagtagcttcgccaatatttaagtacatcgccaacattataagtttcccgctccggatgcagcttaccaactgggctgttaccatactgaatacgatagaaaagcaggccgaagcagctggcaatattattcttgttgaagggaaggagttcgccgtagacccggcgtgtgccgggttatcgatgctgtcgctggccctgattctggctgtttttatacttgcccacctgcaacggaccaaccagaaaatgctgccgctatggtttattgggttgatgttaggccttatgctgctgcttaacctggtatcgaacctactacgcatcctgttgctggtctggtttgagatactgcccggaaacccgctccatgatgtgattggcttgctctgcttgctagtttacgccctcattcccttttattttgtctccaggtggctgcagcaattcgtggttgtcggttcaaaaaaaccatcacgcaggtcacgcatcagtttaaggggcgctttgcttctgaactatattttactgctgatgctgacaggaacaggctttaagatcagaggtgagaaaccaactatagtttctgactttacaacgccggagctaaccggtttcgaagcagcaactatggaaaacggcgtaacaaagtatagtaatgaagaagtattgatttacctgaaaccggtgcaagcattttactctacggaacatcacccgttaatctgctgggaaggaagcggctataagttccggcatgtgcagcagcgacaggtgagcaactataacgtgtatgtgggcgaactgcaaaaagggaaagatactctctacacggcctggtggatggataacgggcaacatcaaactatagaccaatgggactggcgcacacgcatgctgaaaggcgaagcgaagttcaggctggtgaatgttactgttgcgcaaaagcagaaacttgccgaagctatagttacgctcatcgaaagccagaacaactatagtcacacaactattacattggctgatgctgcaaacaaatctcaactataggcatcgggtttctgcagaattttcggacctttgcagccgaattcatttaacctatagtttcttacatcaatggcatttaaggcgcttaaaaaattaatattggcaggtttgttcctgtatatgccgcttcagtcgatggcctggggcatgctggggcaccgcgtagtaggcgaaattgcagaacgtaacctgagctgcaaagcaaaaaaacaggtaaagaaaatcctgggatcggagtcgatcgcgatggccagcaactgggccgactttgtaaaatcggaaccgagctacaagtacctggatacctggcattacatcaactttaagtctggcctgaacaaggacgagtttatgactgcccttgcccaggacacttcagtaaacatcaacaccaagctgaatatgctggttgcagagctgaaaaagaaagacctgccgatggagaaaaagaagatgtacctgcgcctggtgatccacatggtaggcgatctacatcagccaatgcacacgggcaggccggaggatttaggtggcaaccgtgtaaaactgttctggttcggagagccaaccaacctgcaccgcctctgggacagcgacctgatcgaatcacaagcgctaagctacaccgagtacagcacacacctgaaccacactaccaaagcccagcgcaaacagtggatgaagcaaccaataagccagtggctgtacgactcttacctgatcagcaataagatttacagcgaaatagaaccggagcaaaaacttagctaccgctacaactacgataacctggaaaccttgaacacacagctgttgaaaggtggtatccgtctggcaggtttgctaaacgagatattcgggtaaaataccttaccaattatagaaaaagcctttctgcaactatagcaggaaggcttttttgattatccggtgttataaacaaaaatgggcgctacctaagcaacgcccaagactttcgtctacgggtgtgtttcacccttattgtgacaagatttcagagattattttgtcattgttaatacaaatatatatattgatattacaataacaaattatttgctatgaaaactttaggacttgatctgggcaccaattctattggctggtcagttgtggatgcctcacaaaaagtaatactcggcgctggctcccatatatttcaggaaggtgtaaacattgatgccaaaagcaaagcggaaacacccaagaatgctaaacgacgcgagtaccgtcaaaaacgtcgacagctgtttcgcaggaagtttagaaacaacctgctacaaaaagcactgaaacaagcttcattaatgcccgcttcccttgaagagaatgatgcctactggcaaggctgtccatatcaacttcgaaagaaagcattatctgagccactcacagcacatgaaataggtcgtgttatctttcatctaaatcagcgccgtggctttaaaagtaatcgtaaatctggtagtaacgaagaaggcgctctgtacaaaggtggaaacggtaaaacaggcatagacgacacattggccgattggcaaaatggtgattttagaacatttggggaatacctggcttcactggatccgcacctgcaacgcctgcgtaaccgctatactttgcgtagctggtatgagcgggagttggaagagatctggcaggtacaacaacggtatcatccggataaactcaccccagagctgaagaagcaacttgcttgccctgattttggaatcgtgttttaccagcgcccgctcaagtcgcagaagcacctggtaggcaaatgtaccctggagccccagaaaccgcgtgtgccggtatgccaccctgattttgaagagttcaggatgtggcagatcatcaataacctgcaggtagccggaccgggcaggtttaacgaactgctcgacgatgaagaaaagacgaagctggtagagctgttttatacaagagacaagatcaagatcagcgacatacgcaaaaagctgaaactgacggaagattatacttttaactacgaagagaaagaacaatttaccggcaacgagacaagtataaagctttccaaattgttcggaaaagctgcctgggatgccctgcccgacgaagacaaaaccctgcgtacttccaagacggaagagaaaagtataagcaagttagatgtatggcatacgctttactttgcccaggaccaggactggctgcaaaaatatgcagcagagaagtggggctttacagatgagcaactatctaaactgtcgaaaacgcacttgaaagaaggctatggcagcctaagtctcaatgctattcgcaaaatgctccctttactgcgccagggaattaaatatgataaagccgcgctacaggcaggctatcatcacagccagattagtgagtataaaactggcctggaaaagctggaaacacccaaaaacctgcgcaacccgattgtacagcaggcgctctatgagctgcgaacacttgtaaaccaacttatacagcagtacggcaaatttgatattatccgtgttgagctggcccgtgatctgaaagtttcggctaccaaacgtgctgacattcgcatagaacagttcaagaacagagctcgtaacgaccggtattaccaggaattggtgcagcagggtgttcagcggccaagcaagaacgatatagacaaatacctgctttgggaagaatgcaagaagacctgtccttatactgggcaagcgatcagctttaacgacttgttcttgcacggtcgcttcgacattgaacacatcctgccctatagccgaacacttgatgacagcatagccaataagacactttgcgagaaaggctttaacatcaaaaaaggaaaccagacgccgcacgagtgcttgagcggcgaccaagccaactatatgctggtactggagcgcgtacagaaacacatgccgcgcaaacttgctaggtttaaacaggagaaacttgatgaagattttgcgcagaagcagctaaacgacacacgctacatcagtaaagaagcacgagcctacctgaaaagtatttgtgaccgtgtagatgtgactaccggtacagcaacagcaccattgcgccacttctggggcctgaactctatcttgaacgaagggagaaacaagaaaacccgcgacgatcatcgccaccatgctgtagatgcccttgtagttgccctaactacccctggtatactccgcgaattgagcaactggaacaaactggaccgctctccacagatgcataacttcgaaatgccatgggataccttttaccgtgacgccagaacagctatagaaaacatattagtatcgcagaaaaagaacggcaagactgttacatcctggaacaggaaagtgaaggacaaagatggtaaaacaaccacgcaacggcaggtagcagcaagggggcagttgcataaggaaactgtgtacggcaaacggcaagacctgcaaggcaaagaattttatgcagttcgtaagagtctggaaacacttacgcctgccatgatcggcaaaatagtggacccagttgtacgcgagattgtaaaagacaggctgcgtgccttcggagtggacccagattcaaagaagtttgaaataccgaaaacagcctttaatgagccgctgtatatgccaaacattaaaggcaaaagcggcaggcaaaaccaaattaaaaaggtgcgcattcgggagaattcttccggaatggtgaagctaaaacaggatattaaccagtgggtagagccgggcagcaaccaccacgtagcaatttaccaggatgaacaggggaaactgcatgagcgggttgttactttctatgaggcagttgaacgaaaaaaacagggcattccagtagtacaacctaccactgttgagggttatacattggcgcagacacttcagataaatgacatgttcctgctcgggcttacggaagaagacatcaattggcatggccctaacctgcacaggctgctgaacccctacttatatcgagtgcaaaagctatcttctggtgattattcttttagattacatatagcatccacaattgaacattcggctgaggaaataagaattcgtagtatgaaagcttgggaacagcagaatcccatcaaggtgcaaatcacaccaaccggtcagctaaagaagctataatctatgctgaaacggacgatatacttaggctctccgctggatatgaacatccgactggagcagctggtgctcgtgaaccgcgaaaccggagaattgaataaggtgccagttgaagatgtaggcgtattggtgctggatcatccggaattaatctactcacaagccgtgatgcagaagctactggataataacacagccgttatttactgcgacgagaaacaccaccctaccggattgctcctgccattatgtggccactcggtgcagaacgaacggttccggcagcagctgtcagccaaaaagcctttgcagaaacagctctggcagcaaacggtacaagccaaaatacgaaaccaggcattgctgcttcgttaccacgacttgccccacgagccgctgctacgcttctggaaagatgtgcgcagcggagacagtacgaatctggaagcacgggcagcccggcactactggcagtacctgttctcgcccctacccttccgtcgcgaccgcttcggcgatgcacctaacaatctgctcaactatggttatgccatacttcgggctgcggtagcgcgggcgcttgttagttctggtctattgccaactataggcatacatcaccataatcgttacaacgcctactgccttgctgatgatattatggagccttaccgcccagtggtagatagcgccgtgaagcaacttatcagtgaccatgctgactgcagcatacttaccaaaccaatgaaagcgacattgctgcaggtactgacgcatgatgtgcgggtgaatggcgaagtaagtccgctattagtggcactgaacaaaactactacttcgctggtaggctgctttgccggggagcgagacgaaataagttaccctgaactatgcaaaacagactaaacgcctatcgcagcatgtggctattcgtatttttcgatctacctactgaaaccaaacaagataaaaaggaatataccaccttccggaagcggctgcagaaagacgggtttagcatgatgcagtactctgtatacactcgccactgcgccagccgcgaaagtgccgatgtgcatgttagtcgtgtaaagcaaatgctgcctccaaagggcttggtaactatagcccaattcactgacaagcaatatagtcgtatcatcaacttctggggcaatggtcggaaggcagtaactcctgccccaaaacaactcgaaatgttctaaaacaaaaagccccgccaaagtgtcagttctggcggggcttctgtattaaaaaacataaaacatgtaatcgcaaacaagcgtgagaagcttttctagcaagcaaaacaccttgtaaggcattagcatacaacattttaaagcattaactcttttatactttaaatctctgaaatcaagtcacaactaggaagccacagcgctgacccacacctgccttttatactttaaatctctgaaatcaagtcacaacttttcagaattccttagttaaacttgactacttttatactttaaatctctgaaatcaagtcacaacctgggagaaggagatcctgagcggcaataacttttatactttaaatctctgaaatcaagtcacaacaggcgggtatctggcgaacctacgctgtcacttttatactttaaatctctgaaatcaagtcacaacttgaaccggagtcctttagattctcaaaccttttatactttaaatctctgaaatcaagtcacaacacataaaagaagcttttctcactgtcccggccttttatactttaaatctctgaaatcaagtcacaactgccacgctgcaggatatctgcaacagcgacttttatactttaaatctctgaaatcaaatcacaactagaacagtgcacccttgtcaagaaaaaggcttttatactttaaatctctgaaagagaatggttagttttagcatgtcaacgaataactcattacgaatatactatattcttttgaaaccataacattattatattcaaccttccttgcccctactttcgtttaataggcaagtattaaccattaaagttgaaggctatgaacaccctacccatcaactggcttaccgaaggactcatcgactttgaatataaaaagtacctgctactggcttacctgcaggcagcaaaaaccgagtttggccaacaacgcctttacccggtattctccgacctgattatgcattaccgcaacctgaagcaggttaaagagcacaaacagctggtttacgagcagtttccgcagcgcatcagccgggccgactttgaaaagctggagctggtgtaccagaaaatcgtggaagacgatgaaaccatgcagcagatcgaggagatcattcagtatgccacgccgctgtttacccaaaccctggaagaaggcaaggaactatacgagtttgtggagagtaatctcgagataagtccggtaggcattacgcccatgtaccacgacgaaggctacctgtttttagatgcttttccgggcaaagagacgcaggtgtacctataccgcatcacggttttccagaacacttacgaaaagtaccggggcattaatacccagcatgtgcaaaccgtgcgccgcggcctggcccttacccacgaaaacctgaaagtgcagctactgaaagagcataaagagctgcccaatcctgctacatttgtagtggtctctaaagtaccggtgccgctggagcatagtttactgcctattgccaagcggtcgctggtaaaatatgtagcaaaactgagcgcttgactatagcagctccagtgtatagtttatggtggatgttttgtacaacaccatggctacagagcagtatttttccagcgacagttcaatggcacggcgtactttgtcttcgggcaggttgccgccaagcacaaaatgcaggttaatgttacggaactctgtatgttcgttaaccggttcgcggtcggctgtaactttaatatcaaaggtggtagcttccaggcgctgctttttcaggatcatgatcacatcgatggcgctgcaaccacctaagcccatcagcagcatctccatggggcgggcgcccatgttgtgtccgccaatttcagggtttgcatccatgtgcacagccactcccgaagctccggttgctgcaaaatgataatcctgatccaggcgagttaggttaatttccatgtagtataattttacacgaaagtataaactctgcccttccggtcaaaattcgttgtccgttgttcgttaatcgctgttcgcaaactcaactttatgtattaaataacaggatacgctgtcctgtttaacaatagttttatagcggaatggccatatcttttgtcgcttcagtttaatagcgatcaacaagcactggacaactataaacgacaccaaaaacatcgaccaaaatcttatcggtttcttatgcctatttatatagaaatgcggtgtattggtatattctgttttagcagtccgaaattgcgttgtttctttgtattgcgagattatggtaactcgtgtggaaggaatgaaaagaagtcttctttaaaagaactatgaagaaacatgtatttctattagccctcggccttacgtcgatgggcgcatttgcgcaaggtcagcaggctacgcctcaggcccgtccggcgcagcaacagtcagcaggcgtaccaagtgctacagtggcgaaaggcaatgcacgcattagtggtgtggtagttgattccgaaactaaaaacccggtagagtatgctactgtggcgcttatcaatgtagctaccggcaagccaattgatggaacgatggccgacgacaaaggccgcttcacaatacagaaggttggcgtaggcaagtataaattgctggtttcatttattgggtatcagcagaaaaccctgaatgagtttacagttaaagctgataacgaggacataaacctgggtacagttaccctggaatctaatgcgcaccgcctgaacgaagtggtaattaccggagagaaaccgctggtagaagagaaaatagaccgcaccgtttataacgctgaaaaagatatcacaaacactggtggcaacgctgccgatgtgttacagaaagtgccatcactatcgctggataatgatgggaacgtgcagctgcgtggtagctctaacgtacgtgttctgatcaacaacaaaccttctgctattatggcaggtaatattgctgatgcacttaaacagattccggccgatcagatcaagtctgtggaggtgatcacttcgccatcagctaagtacgatgccgaaggtactgccggtatcataaacattatcacaaagaaagatggtggcttacagggtgtaacaggtactgtggccatgggtgtgggtacgcgtggcagcaatgcaaacgcaagtctgaatgtgcgccgtggtaagttgggtatcaatggtacgtttggtggtaacatgttctacaacaaaggggacatgtcaaacactatgatcttttatgatgataagaccacaccatttgatgaagggtcctatagtttccagagtggaaataccaaagtaaatggtgcattcatgaacggccagcttggatttgattatgacatcaaccagcgtaacaatatttctggtggtttccgatccaatggcggtttattcaaaatgagtaacgatcagtctgtttactctagaaccagcatcaaagaagacgaatttaacaacaaaatccgaaatgagaatcaacgtataggcaccgactacaaccttgacttcacacattatttcaagaaaccgcaacaggaattagctattctttcgctgtactctattacggatgctgaaaatgatgtgaatcaggactattttaaccagggggaagcaccttacaaactgattcgcaacaacaataataaccttaataaagagcttaccttacaggtagactatacgcacccgtttgctaataaaacagtacttgaaattggggctaagaatattctccgtgatgtggaaagtaaggcaacatataacgaaacgcctgcacctgttctgccaagaccaaacgacgatttcttctatgagcaggatgtttatgcaacttacctgacgtatggctttaccctcaaaaaagcattgaatgtaaaactgggaggccgttacgaatttacagatgtagcagcagaccttgccggaattgataatgactatactacagattatgacaactttatcccaagtgtagcattgtcttataccttcaagaagacacataccctgaaggctaactttactcagcgtattcagcgtccgtctatgttctacttgaacccgtacctgcagaaacaaacatccaatacttatgtacagggtaacccgaagatcgatgcagaacttaccgacttgtttgaattaggctatagcacttactttaaaactacatctataaacgtgacggcgtatatgcgccagaccgataatgcgattgagacggttgcatctccttatcagaatgaagatggtgagccggcaactctgcttacgttccagaacattgctaaaaacaagacatacggcgttagtttatttggtaataccaagccaaccaataactggatgataggcggtagctcaaatatttacttcgtagacctgaatagtaagtacaacagcaatagtggctggatgtataatgtcaatgctaactcgtcttacaccttcggtaaaggcataagtgcacaatttaatggtggttttaactctgagcgtatacagttactgggcagatttgcagctttctcttatcacagcttagctatcaagaaggatctttttgacaagaagggcggcataagcgttggattagacaatccgttccgcaaaagcatgaagatgaagaatgatgtaattgcaacgccgacacctgtaaatcctgcaagctacgagcaacatgtgcgcatcaacaactataaccgcggtgtgcgtgtcgctttcaactatagctttggtaaaatggagcagcagcgtccgcctaagcgtaaaaagtctatccgtaacgacgatgccaagcaaggcgacggaaacggaatgcaataacagaacattaccactctcggtataaaacaaaaatccccgcctggttcaggcggggatttttgtttggcttgctgattgaaaaagcaactataaactatagctcctccagactatagccacttgcgaagtacttcggtcagttctttgcgggtaaatggtttgcagaggtgatcgttcatgccggaactcaggcttttagcaatgtcatctttataggcatttgccgaaaaggcaactataggtttctcgtaacccaaacggcgtagttttacagttgcttccaggccatccatacctggcatctgaatatccataaatatcaggtcgaacggtttacctattgccacttgcagggcttcttcaccgcccacagcagttgtaactatagctcccatctgttccagcacgtcctgtatcagcagcacatttatcgggttatcatctactaccagtatatcagctttgtaaggcatttcaaaggttgtatcttctgcagaatccggagccggtatatctgcatccggtacgaatgttaggggcagtgtaaaccagaaagtagtgccctcctgcccttcctgcatgctgattacgcccatttcgccatgcatcagggttaccagccttttacagattgtaagccccagtccaaatccgccataacggcgtgtagtagactgatcagattgtgtgaaggcgtcaaaaatataggcctgtttttcgggcggtatgcctatgcctgtatctgtaacggtaaaccgcagtgtaacttgccttgtactttcattttggttatcagcactgcatcgtacctgtatgctacctgtttcagtaaacttaagggcgttacttaccaggtttaccagtatctgtattgttcgggtagggtctccgactactacctgcggcacatctgctgcaaaactatagtccatggttaggcccttctcgttggccaggtaccggtaaggctccaggtgcgatgccgtcgtggcacgtatgtcgaacggaatggcttccagctctactttatcctgctcaatacggtgcaggttcaggatgtcgttcaggaggcgggtaagggtggaacctgaggtgcgaatcaggctaacgtattgctgttgggtctgatttagcggggtatcggccagcagatcagcaaagcctacgatgccatttagtggcgtgcgtatctcgtggctcatgctggacagaaagaaacttttagactggctggcagcttctgctttctctttggcctcctgcaattcgcgctcttttaatttcagttcagtaatgtctttggcaataatcaggatgccatcggtctgatgatgcttatcgactaaataagaaaaggaacatgaggcaggaatctgcctgtcggttgcctgtaatataaactcccggttagtgcatttgccctggttttcgagttcgaagaaaacttccagtagcttcagattctcagtgtcgctgaaaagcacagaaatgtgttgcccaaccagttcggtttccggcattcctatggcttcttcaagcgccgcattcacattccggatggtgtaatcagtattcagtacaagcagcatatctaccacaccctggtatatgctctgcataaagtcgcgggaaacggttgagtttttaagctcctgccccaacatggtaatcccctgtatcagcgcatccagttcattctcattttccgacacgtcaagggtgtaatcatagttcccgtttgccatttcggcaatcagggtcatgatgtcgtctaatcttttattaagtgcttccacgtggtgttggtttgagaacggtatacaaataacgctactaataggcaaacccggaaattccctgaataatttaattttaaaaaaatcggatggggcttttcttaattctctatatatcagagtattgttaacaaactatagcaccttgagcgtataatatcatttcaggcacatgcagattttgatgtgaatcatttaattttagtatacttgtttatgccagcctaatgctggcatcagattcatttattaatcatactgttttgaactctaatcagaacataaaggaaacgccttatatgaagatgttcatccaagatggcattcttcatgtttattataaaacgcttgaaaactttgaccaggaagtagctgaaatttgtgtgaatgaccgaaaggaattcaccaaccatcagtcttacccttgcctggttgatgttgtgcagatcaaacacctcacaaaagaagcccgcgactttttagctgtgtatggtagtgaaggaattactgcaaatgccattattgtgcattcggcagtgcttaaaatgatggctaatttttacataaacgtaaacaagccgctaacccctacccgcatgttcactgaagaacaacccgcggtggaatggctgaaaaagtatagaaaaggttagtcatcccaactatagctgcagcccgcttttctactgaaaagctataaatggaattcagaagttatcgatgctgaagtttcgctcctatactatcgttaggggtttaaactgtttatagtttgctctgatcgctgacttacgatctgcagttttgtccaggtaaagcactgttttgtccgttgtgctttaagcttataaagctgatttttgtttgcacaaatgcacaaccgccatgcacatcattatccccgacgattaccagaacgttgtccgttcgctgtcctgttttcagttgctggaaggccaccaggttacagtttataacgataccgttaaggatataccaaccctggtttcgcgctttaaagaggccgatgtgctggtacttacgcgcgagcgcactgccataattgaagaactggtctcacaactgcccaacctaaagctcgttagccagactggtaaaatatccaaccacctggacttgcaggcctgcaccaactatagcattgccgtagccgaaggcattggctcgccggttgcgcctgccgaactaacctggctgctgatcatgaacgcactccggcaagtaccgcaggcgatagcagccatgaaagaaggcagatggcaaaccaacattggcagtacagtaaacggaaaactgatcgggatctggggctatggaaaaatcgggaaactgatagctggttatgcgaaagccttcggggcaaaagttatcgtgtggggcagcgaaaactccagagcacaggccgtgcaggacgggtatctggcagctgaaagcaaagcagccttttttgcgcaggcggatatggtaaccctgcatctgcgtctgacggaaagcaccaaagctatagttacggctgcagatctaagtttaatgaaaccagatgcagtgctggtcaacacaagccgagccgagttgattgaagaaggtgcgctgctgcacgccctgaagcaaggcagacccggctttgcggcactggatgtgtatgaaactgaaccgatcttcgacaaaaattacccgctgctacaactgcccaatgtgatctgtacgccgcacctgggctacgtggagcagaacagttacgaactatacttccggaaagcgtttgagaatgtggtggcttttgccaacggcacacccacaaacattgccaactccgaagtgctggagggttaaaaccaaactatagcctgtgctcagcaacgccaacaaactatagatttaacgatagcttctttatctttatcacttccgcgacaacacataaaactatggcaaaggcaagcattcccattcctgttttcaccgaagcagagagctttaccaaaagcaagttccgcgatttttacattgcgtcgtaccaggatgcgcccgatgcaggacttcgacgtgtagcgccccaccgccatac

SEQ ID NO: 2797 - DNA, 3932 bp, synthetic construct
  source 1..3932: mol_type = other DNA
  misc_feature 1..3932: note = Synthetic
atccaaattaagcaaaaagccccagaaattaacttttttaattttttccatcaaaacaagtaaattaggattttttattgatgtaattgatgtagcacaaaagacaccacgaataaagtcagcaaaatctgtttgatagttttctaaaagaatacttccacgcaaatctagttcttcttcactatatttttgcattttcctaactaaacagttaagatcgtattttttccctaacgaccttatataatcatcaaaactagaatttaacccacaattaaggtcaaaaccattacccaatattactaatcgctttgctctcctcattttactacctctatctattattatataggaacaacattattatatcactgctcttacctattgtttatactactttaatcttagctgttatttattttcttatcttagaatgatataatgtaaataattaacaaataaggagaattagcatttatgactcaaaaattaaattatcgaattggcttagatgttggagttggctccgttggctgggctgctatccaagatgataaaaacggccatcctattaagattttggacttaaacagctatcttttccccagtggggaagatgctcgaggcaattcaccagctcaaaacagacgagaagctcgaagtgccagacggctaaaaagacgccatcagttcaggaaattacgggttcgcaatttcctggtaaaagaagtcggcttaatcaagccgcaggagttaacagaagttttacatacatccctgtataacgatttaactgctttgagaagccaagccttggatcatcccctaaataatccggcactctttcggatcttctattattttgccggccaccgaggcttccaaagcacccgaaaagctgaattaaaagatagcgaagctaaagggatgctggctgaattaaacaagaccgaaaccgccctaaaaggctatcgaactttaggcgaatattacgccaaggcccctcagtttaaaggcggttttcataataaaggttacctatccggttatagtgggacagctaaacgggcttggctaattaaagagattactttaatttggcatactcagcatgatcaatttcataacccactcttaacagaggacaagctgcaagcctacctaaaattgtttaaacaacagcggagctttgatgaggggccggctaatggaccattttccggtgggattgctaaactggtcggtaaggatccattcaataaaactgaattaagagcagccaaagctacggatagttttgttaaagccaatctgttaattcagctaaacaatttaaaatatttaagccgtgatccggttaatcataaagcaattagttttgctatcaatggtgataataagactaaaattgttaaagcatgtttatttaagaaaaagaaagttactttagccactattactaaaattttaggtctgcccaaagatactcattacaatctacagttaaagggtgagacacctgggaagcatattttgattgacttaactgccaataccaatctacacaaaattttaaagggagttaatgtatcttctaaagaatacgaccaaattgctgatattttaaccaagtttaaaactgacagtacccgactaaaaaagttggctgaagttaccgcccttaagccgttaatccaaagtcatgataaaagaattgacgatctgctgttagaaacacccagtcaatttggccatttatcagtcaagactttacgtcaaattatgccttctttaaagcaaggctttacttatgatcaagctatgcaggctgccggccatcaattttctactttaactaccagccttgatgatattcgggcaattgccaatccagtagttaaacgttctgttctacagaccattaaagtagttaaacatctaattgcccgatacggcaatccagattatatttgcttggaaatggctcgggaactaggtaaaactaagctggaacgcaaccagattttagctaataacttgaattatcaaaataagtatcgggatgatcaaaaaaaattagcagatagtggctttggacaggttaatgccactcaggttaaaaaatatgagttatggaagcagcaaaaccacgttgatatttattccggccagccaatttcaattaaagctgctttaactgccgctaccgaaattgatcatattgttccctattctttgactttaaacgatagtttaaacaataaagtcctgacgacagttaaaaataaccggcagaaaggtcaacgagtgccaatggattatttaagtggagctgctctgactaatttccaaaccttggttagcaatctattcagtaataagaaaatttcttatactaagctgaacaatctattgtctaaaaagacacctgagcatcaagatattcttaaaacttggcgtaccagtgccgttaacgataccggctatattaacaaattattgaataattactttaagaattctggcgacattcattatcataatccccagggtgctaagaagaatcatttaaccgtagtagtcattaacggtcgagtcacttcctatatgcggaaaatctggcggttaaacaagaatcgggcagatggtgatctacaccatgcccaagatgccgctgtcattgccgttaccactcctggaaccgtacagaagattgttagatactatcaatttaaagaaaccggccggccgctgacacataaactatatgccgaacagccatttgagggctttaccaagcaattgaaagttctgctggctgatgatcccctgagtatgaaccagcagctacacgcctttaaggacggtaccgatttaaagccgaagattccggtttggaagcccgatcatcatattgccggcaaggtgaacggagatacccgttacagcggtaaactaatcagccagaacaaagttctgatccgtaaaccaattaccagtttgatggctggaaaagatccggatggcagggatgttttatattacagctcgaatggaactaaaaaagctaatcccaaaacagttgcatataactatctaacttctggtaaattagttaatgacaagctctgtgaattaattaagcagaaagatcctaaggaactttcaggagccaatgcttttccagatggagtggctatttttgaacacaatggtcaaacggttcgagtaactaaggttcgattaattaagaccatgaatattaatccggtcaatgtcttgaaagtcaaatctaataattctgtgatggatctagccaataatgcctatcttaatattttttggaataaagctaaaaagaaatatgagtttggacctgaatttagttaccaaattcatcaaagcaaaatgaccggtaagccaattcaacattttgtacaaaaagactttaaaaatattatcttacaaaataaaaatcaaaaacttctatttaaactttttaaacgagatttagttgaattaactttaaataaagaattagtcttaaagcctaatactgattcttccaatcaaaatcaaaagattattcctgccggagatcctattttgatgcatttgtgcaataaaacgggaatacaattaggcttttctgaagtaagaggtaggttttaaaattaattttatttcgcctagttcaattattaagattaaaaaaattcaaaataaaattttatcaatttaattttagaaaaattggtaaacaattaaataaatatgttatagaataaggactgactatttttataataatcagtccttatcctatattttaaagaagtgaatatcatgttatcaaattttcagataatttatgttcaaagatacaaaattattcaaaataactctaaaaaacaattggctaatttttcatt

SEQ ID NO: 2798 - DNA, 23366 bp, synthetic construct
  misc_feature 1..23366: note = Synthetic
  source 1..23366: mol_type = other DNA
gtatgtgcagtatcgtgtcggatatttcctgtacgcgctggtctttatcgtgttcgacgtggagacggtcttcctttatccgtgggcggtgcgtttcgggcatttaggccttttcgctttgatcgagatgttcatatttatcgcaatattggccgtcgggctgggatatgcctggaagaaaggagcattgtcgtggaagtaatcgatattgtaccgccgatactgaaaaataacgtaatcgtcgtgaaggtcgaccagcttttcaaatgggcgcacgcgaattctatttggccgctgtcctccggtcttgcctgctgcgccattgagatgatgagctgcgcggcggcgcgtttcgatctttcccggttcggctacgaagtgttccgtccgtgcccgcgtcaggccgatcttttgatcgtggcgggaacgctgacctggaagatgacgccgccgctcgtccgtctttacgaagaaatgccggagccgaagtatgtgattgcgatgggaagctgcgctatcggcggcggcccgtttgccgattcctattcggtggtgccggggattcatgaggttttgccggtggacgtgtacattcccggctgcccgccgaggccggaggcgctgatcgacgggatgctgaagctccgtgagaagatcatgcacccggagcgggtggaagaagaccggaaggcgaggttgatggaggcatgaaggcttatatcgacgcgtcgcttttggcgattttgaagcagaaatttccttccgtagaatatgacggcgaggcagcgcagcctgcggtttacgtacccgcggcggagctcgtcgcggtactttcatttctgcgggacgatgaacggttcgcgttcgcccgtctcgaaaacctgacgtcggtggactatcagacgtatttcgagatggtctatcatcttttcaactggaatacgggcgcgtggattacggtgaaagtgaagctggaccacgagcagccggcggtcccgtccgtgacgggcgttttccccggcgtggaattcgaggagcgcgaggtttacgacctgatggggattggcttcaccgggcatcctgatttgcggcgcatattgatggccgacgatttcgagggccatccgctccgcaaggattataagcagatcatgccgccgcatgtgccgcggatacggaaggaggggcggtagtatgccgaaaacggaaacctatacgctgagcatgggaccgcagcatccttcgacccacggcgtgctgcaggtgcgcctcgacctcgacggcgaaaacattttgaaggcgacgccgtacatgggatatctgcatcgcggcatcgagaagctgttggagtcccgcacctatatccagggcgttccttacacggaccggctcgactacgtttcctcgatgaacaataatcttgggtactgccgcgcggtggaagaactggcgcagatcgaggtgccggagcgcgccgagtacatccgcgtgattgtcgccgagttgaaccgcatcgccagccatcttgtcttcatcgggtcgctggcaaacgatttaggcgcggtcacgggcatgatttatgcgttccgcgaccgggaaaaaatcctcgatctcttcgatctcgtttgtggcgcacgcatgacgttccactatatccgcgtcggcggcgtcagcgccgatttgccgccggagttcgcggcgaagtgcgacgagttcctgaagatcgtgccggaattcatgcaggaatatgaagatatcctgacggggaacgagatcctccagcaccggctgcacgggacttcccccatgacgaaagagcaggcgctcagccacaacatgacggggccgaatatccgcgcggtgggcataccttttgacatccgcaaggtggacgggtacggcctctatccgaaattcgagtttgacgttccagtcggggaaaacggggacaactgggaccggtaccgggtgcgctatcaggagatttacgagagcgcgaaaattatccggcaggcgctcgacggattgccggagggcgatatcatggcgaagttcccgaaggtgctgcgtcctccgaagggcgaggtgttcagccggacggagggaacgcggggcgagctgggattctatatcgtcagcgacggctcgacgaagccgtaccgcgtgcatatccgccgtccgtccttcataaatctgcaaggccttgacgatatgtgccggggaatgttgatcggcgactcggtcgccgcgttctccgccattgatcctctgatgggggaggtggactgctgatggatattttgaatatgatgatggggcagggcgtggtttccacgctggccgaccagctgcacaacttgttcatgctgttgttcgacaacgcggtcgttgcgggcttcctgatgaaatgcgtcggcatcggcgcaatcctcggcatcatctcggtggcggccatcgttttcacctatggggaacgaaaggtttgcgcattcatgcaggtgcgcatcgggccgaaccgcgtcggcggacgattcggtctgctgcagcccatcgcggatatgctgaagctgatgagcaaagaggatatcatcccgcaagggtgcgaccgggtcgtatgggcgcttggcccgatgctgctctttgtgcccacggcgctcatttacgcctttttcccgtttgacaacggcgtggcgctggccgacgtgaatgtggggatttttctgatgctggccatctcttcgcaggcagtgctgccgttcctgatcagcggctacgcatccaacagcaaatatgcgttcatcggcggtatgcggaccgtggcgcagatgctttcttatgaggcaccgatggtcttctcgctcctcggcgtcgtgatgctgtccggctccatgcggatgtccgacatcgtgaacgcgcagtccgagcagctctggttcatcctgatgcagcctatcgcctttgtggtgttcgtgatttccgctacggcggagacgaaccgcgtgccgttcgatctcgtggaaggcgaggcggaaatcgtcgccgggccgttcgccgaatacagcggcatgcgctgggcgctgttcttcctcgcggaatatgcgaatctcctgtccgtctcgattctgacgacggtattcttcctcggcggctggaacgggccgtttttgccgggcgtcgtatggttcggcctgaaggtgctggcgatggtgttcgtgttcatgtggttccgctggacgttcccgcgcacgcgtatcgaccagatgctggcctttagctggaagattctgctgccgctggcgctggtcaacgtgctgttcaccggcgtgggcatttacgcccggcagtggatgtaaggagggacgctgaatgtttggggaaggtttgctcacgggcatgggcgtcacctggaaacacttctggggcaagaaggagacgttctgttatccggaggaaaagctgccgatgacggagcggtttcgcggcggccatctcgtgctcgatcataaaaaatgcatcgcctgctcgctgtgctcgctggcgtgcccgaatcaggcgatcaagctgaagatcgtgcctgacgcgaaaaagaaaaggcacatgcagagctacgtccaccttgtcgggcggtgcctgtactgcaatctctgcgtggaggcgtgcaacatgcacgcgctttcctgggacaagaactacgcgatttcatcatggcacaaagaggaaatggaagatgagcttgtgaccgccgaagggcttgcgtatttccatgaagtgatggaaaaggcgaaagctgaggccgaggcggaagccaaagttgcggcggagaaagcagaagccgaaaagacgggaggggacgcttgatgaacgaggctttgggatatgtgcatggccttgtgggatgggcgttttccctggccgaggcatacgacgtgccgagcctgatcggcgccggcgtgttctttttgttcgcagggctcgcgctgcttttcgcctgcggcgtcgtatttttgcgaaatgtggtgcacagcgccctttcgctgacggcgaccttcatctgcgttgcctgcctgtatctttccattgacgcggatttcatgggagccgtccagatccttgtgtacggcggcgcggttgccgtattgatcgtcatggccatcatgctgacgcggcgcgacgacatggcgcactcgaatccgtcgcgggggctttggcagcatgcgggcgcggctgtcgtgtccgggctgttccttttgggaatggcggcagtggcggtgctttctccgttccagtctgcgccgcagcctttgggagacgctgcgccgggcttggcggatctgatgctttcccattatgtgctgccctttgaagtggcggccgtcctgctcctcattgctatgatcggggcgatccttttggcgaagggggcggaggaatcatgatgaatctcatggatttcgtgcggttggcgacgcacgtcgggctgcatcatttcctgctcttttcggcgctgcttttcgctatcgggcttttcggcctgctgacgaagaaaggattgattccgctgttgatgtgcgttgagctgatgctgaacgcggtcaatatcaacctggtggcgttcaatcactatatgccggtctcggattattcgggacagctgatggcgatattcgccgtcgcagtggcggcgtccgaggtggctgtgggcgtcgcgctggcgttccgcatctatcgcgatcacggcacggtcgacgtcgatgaattgagagaaatgaagggataaggagggagcttacggatgttttttgattttgcgctgtatcacgcatggctgatcccgctccttccggcgctggcctttcttatcatcgggctcgggacgcggcagaacaaaaagacgtcggcgatcatcggcatcacggccatcggcgccagcttcctgctctcgctcggcgtcgtcggcgcggtgttgacgaaacgcctcgtcatggcggctcccttcgtgatgaagacggtctgggcacatatcgggaatatggatctcggcatgggcgtgctgatcgatcctctgacggccatgatgctcgtcgtggtcacgacggtggctctgatggtcaatatttactccgtcggctacatggcgcacgatccgggcatggggcggttcttcgccttcctgtcgttgttcgcggcgtcgatgctcggcctcgtcatttccctgaactttttgcagatgtatatcttctgggaaggcgttgggctttgctcgtacctcctgatcggattttattactataagatttcggcgcgggaggccgcgaaaaaagcgttcattacgacgcgtatcggcgatttcggtatgcttctcggcatcctgcttttgcagattaccttcggcacggtggacttcatcgagctgaaaacgctggtgcccaattatatttgggtgtcgggcacgagcttcctgacggtcatcggactcttgctctttatcggccctatcggcaaatcgggccagttcccgctccacgtctggctgccggacgccatggaaggccctacgccggtttcggctctgattcacgcggctacgatggtcgtcgccggcgtttatctgatcgggcgcgcctatttcatcttcgcggagcttccggttgtcttgcatgtgattgcctggctgggcggtttcaccgcgtttttcgcggcgacgattgcgatcacccagcggccctttaagcgcatcctcgcgtattcgaccatcagccagctcggctatatgatgctggcgctgggcgtcggatcgctgacggcttccatgttccacctgatgacccatgcgttcttcaaggcgttgatgttcctgtgcgcaggcgcggtcatcgaggcgatgcacgaggaagcggacattttcaagatgggcggtcttcgccatcggatgcctgtgaccttcaagtgcatggctatcggcgtggtggccattgcgggactgcctcccttcgcaggctttttctcgaaggatgcgatcctcgccgcagccgcggaggtcagcttcccgctgtatctgttggcttcggtcacggcgttcatgacggcgttctatatgtcgcggctgctgtttgtggcgttcttcggcgaagtcagggacgattgccccgcgcaggagacgaacgcgttcatgcgctggccgctggtcgtgctcgcggtgctttccgtcgtcagcggcgcctggggccattttgccggcttcagcgattgggtcttttatggcgtgcgtgaggaagaagcaatcaactggacgattgcgggcagttccatcgtcctctccctgttcgcgatgtggctggcctatcagatttacgtggaaaagcgctggtcgtcgcaccagatcgcgaagcggctcggcgtgatctacgatttgagcttccatgcctattacatcgacgagatttatgcgttcatccgcgaattgacggttgataagatcggacagcttgccctttgggtcgacacccatatcgtcgacggcgtcgttcatgggctcggccgtctgacgaagggcctcagcgtcttgctggcgctgccgcagaacggcgacacgcagcggtacgtcgcattcttttataccggcgtcatcgctcttgtggcgtacagcctgttttttgcggtgaagattcttgccgtgacgggaggtgctttctgatggatttccctgtgctttccacagtcctgttggcgcctttgattgcggcttttgctctgtgcttcgtcgacaaagagaatcgggatttgatccgcaaggtggcggcgggcgccatgatttttgccctctgcttcacgctctacgcgttcttcaattttgatacggcggtgggcggcgtgcagttcgccgaaaaaatcccgtgggtggaagacctgggcgtctgctattcggtgggcgtggacggcatctccatgccgctgctcctgctgtccgacgtcatcggcgtttccgccgtttacacgtcgtggaatacggaaaaacgcgccaaggaattcttcatcctgcttctgctcctgatcgcgggcgttaccggcacgttcatcgcgcgggatctcttcatcttcctgctgtcctatgagctgttcgtgattcccgtattcgtcatggtgctggtttggggttccacaaagcggctgccgaaagagttcgtggcgatgaagttcatcgtgttcctgctcatgggctccgctttcatgctggtgggcgtcgtgctgctctatgtgacggcgtacccggcgggagagcgaactttcgactttgaggcgctgcgtctggcggaggagatggggcacttcagcgaagatttccagatattcgcgttcccgctcctgcttttgggattcggctccctgctctcaatgttcccgttccacagctggtctccggacggccatgccgccgcgcctacggcggtgtcgatgatccacgcgggcatcttgaagaaactcggcgcttacggtctcattcgcgtcggcgtacttcttttgccgctgggcgcgaaatactggtctccgctgattgtcaccacggcggtgatgggcgtgctgtacgcggcctatatcgtcatggcgcaaaaggacctcaaatacatcatcggctattcgtcggtgtcgcacatgggctatatcctgctcggcattatgacgctgaacgcgatcagcgtttccggcgccgtggcgaacatggtggcccacggcatgatgacggcgctgttcttctcacagatcggctacatctatgaaagaacgcatctgcggagcattccggagctgcgcggtctcgcacattatatgccgcatctgaccatcggcttcatgctcgccggtatgacttcgctgggcctgccggggctgatcgagttcctgccggaattcacgattttcgtcggcacctttggcgtatatccggtgcaggcgctgattgcgatcttcgtgatcgtgttcaccgcgctttacgttttgcgcctgcttgcgacgttgcttttcgggccgaaggacgaaaaattcgccgtcgttcccgacgaacagggcgtatcgcttgtgccgctgcttctattgggactgttcatcgtcggcttcggcttattcccgagcctgttgatgaacgtcgtcaactgcggcatcgagccgctggcgccgctctttgaaaagatcgcggctgcgccgacgctgatgggaggtgtccgataatggatttttgggcaatcagcattgaaatcgcggtcaccgtcctgatgctcgtgacgctcatagccgacctcctgctcccgaaagagacggacagacgggcgatagcgttcctgacggtcatcgggctcatctccgtattcgtgttttcactgggacaatatcatctgtcttccagcgccacgtttttcatggggctcttcattgccgataattattcgctgttcttcaagcagctgttcatcctgggcatgattttcgttgtgctgttttccctggattacgcccagaaattcctgcggtaccggggagagttttataccatcctgctgtcggccttgctcggaatgtgcgtgatggcctcggccaacgactttatcacgctcttcgtcggcctcgagctgatgacgatctcgttttacattctcgtcggcttccgtatggacaagacggcatccggcgaggcggcggtcaagtatcttttggtcggctccgcttccacggcggtgatgctctatggcatcagcctgatctatggcgcgaccggcagctttgagttcatgatcatttgccgcaatctccaccttttctatgcggcgggattggcgggcgtcgtgctgatcatggcgggcttcttcttcaagctttccgcgattccgttccatatgtgggcgcccgacgtctatcagggagcgccgacgcccgtgaccgccctgctcgctatgagctcgaaggcggcgggacttgcggttttcatgcgcgtgctctatgtggcgttcccaatcttaggcacgtactggatgcatatcttggcggcagtctccgcgctctgcatgatcggaggcaatatcctggcaatcaagcagaaggacgtcaagcgtatgctggcgtattcgtccatagcccaggcagggtacatgatggtcggcatggcttcggcggattatgcgggcataaaggccgtgatgttctacgcgacgctctatcttttcgcgaatgtcggcgcctttgccgtgctctccgtagtggaggaggagcggggcggaacgacgcacgcgcatctgacggggctttcggaagcgtctccgatgctggcggcggtcatgaccatctcgctggtttccatggcgggcgttccgccgacggcgggcttcgccggaaagatttacatcttcacggcggcggtggattacggttatatctggctggccttcgtcggcttcgtcatgtcgatgatgtccatttactattatctgcttgtcgtccgtgccatgtatcgtgacttgacggaacaggaagcggattacgccgctccggtgaaatatcctttcgccgtccggctgactgcgatcttagctgcggttgctaccctcggcgtgggcgtctatccggaccttttggcgaaggtgacgaatctggcatcgcagacgttcatgcggtaatcgctcgtcgcatctaaattgttttcaaattttatacaaattgtttcacgtgaaacaatcgaacataacctgaaaagcggctgaaaaatatttccctttgttttgcatgtttccctctgcggacagacgaaagagaatgttgctgccagcacgtttttcgttgcttttttaggaaatgtttagtataatgtccatgtaataacaaattgtgccatagcgaggtaaaataggttattacaataaggtccggctgcgaggccggaaccgcaaagctctgacggcctgcctttggtgggccgtcatctttatatacgggtaaagcaagaaggaggtgctttatgaattacattttaggtctcgacatcggcatcgcgtccgtcggctgggcggcggtggctctcgacgcgaacgacgagccgtgcaaaatcctcgacctgaacgcgcgcatcttcgaggcggcggaacagccgaaaacaggcgcttcgcttgccgcgccccgacgcgaggcgcgcggctcccgccgcaggacgcgccgacgccgtcaccgcatggaacggctgcgccacctttttgcccgcgaggaattgatttccgccgagaacatcgccgcgctttttgaagcgcccgccgacgtttaccgtctgcgcgccgaggggctttcccgtcgcctcgacgagggagagtgggcgcgagtcctctaccatatcgcaaagcgccgcggcttcaaatccaatcgcaagggcgcggcctccgacgccgacgagggcaaagtcctcgaagccgtcaaagaaaatgaagcgctgctcaaaaactataagaccgtcggcgaaatgatgttccgcgatgaaaaattccaaaccgcgaagcgcaacaaaggcggatcatataccttctgcgtcagccgcggcatgctcgccgaggagatcggcgagcttttcgccgcccagcgtgaacaggggaatccgcatgcctccgaaaccttcgagaccgcttacagcaagatattcgccgaccagcggagctttgacgacgggccggatgcgaacagcaggagtccctacgcgggcaaccagatcgaaaagatgatcgggacctgctccctcgaaacagatccgccggaaaagcgcgcggcgaaggcaagctattccttcatgcggttcagcctgctgcaaaaaatcaaccatctgcggctgaaggacgcgaagggcgaggagcgcccccttaccgacgaggaacgcgccgccgtggaagcccttgcgtggaaatccccgagcctgacctacggcgcaatccgcaaagcgctgcccctgcccgatgaattgcgcttcaccgacctttactatcgctgggacaagaaaccggaagaaatcgaaaagaaaaaactgccctttgcagcgccctaccatgaaatccggaaagccctcgacaagcgggaaaaggggcgtatccaaagcctcacgcccgacgctctcgacgctgtcggctacgctttcaccgtgttcaagaacgacgcgaaaatcgaggcggcgctctcggcggcgggaatcgacggggaggacgccgtcgcgttgatggcggcggggctgactttccggggcttcggacatatctccgtcaaagcctgccggaagctcatcccgcatcttgaaaaggggatgacctacgacaaggcctgcaaagaagcgggctatgacttacagaaaacgggtggcgaaaagacgaagctcctgtccggcaatctcgatgagatccgggaaatcccgaatcccgtcgtccgccgcgccatcgcccagaccgtcaaggtcgtcaacgccgtcatccgccgctacggcagccccgtcgccgtcaacgtggagctggcccgcgaaatggggcgcaccttccaggaacggcgcgatatgatgaaaagcatggaggacaacaacgccgagaacgaaaaacggaaggaagaactcaaagggtacggcgtcgtccatccgagcgggctggacatcgtaaagctgaaactctacaaggaacagggcggcgtctgcgcctattctctcgccgccatgcccatcgagaaagtcctgaaagaccacgactatgccgaagtcgatcatatcctgccatacagccgttccttcgacgacagctatgcgaacaaggtcctcgtcctttcgaaggaaaacagggacaagggcaaccgcacgccgatggagtacatggcgaatatgccgggacgcaggcatgactttatcacatgggtgaagtccgccgtccgaaatccgaggaagcgggacaacctgctgctggaaaaattcggcgaggataaagaagccgcctggaaggagcgccacctgaccgacacgaaatatatcggcagctttatcgcgaatcttttgcgcgaccatctggaattcgctccgtggctgaacggaaagaagaagcagcacgttcttgcggtgaacggcgccgtcaccgactacacgcgcaagcgtctcggcatccgaaaaatacgcgaggacggcgacctgcaccatgccgtggacgccgccgtcatcgccaccgtcacccagggcaatatccaaaagctcacggactacagcaaacagatcgagcgcgccttcgtcaaaaacagggacggcagatacgtcaatcctgacacaggggaagtccttaaaaaagacgagtggatcgtgcaaaggtccaggcatttcccggagccgtggccgggcttccgtcacgagctggaggcgcgcgtaagcgaccacccgaaagaaatgatagaatcgctcaggcttccgacctacacgccggaagaaatcgacgggctgaagccgcccttcgtctcccgtatgcccacgcgcaaggtgcgcggcgcggcacaccttgaaaccgtcgtcagtccgcgactgaaagacgagggtatgattgtcaagaaagtatcgctggacgcgctgaagctgacgaaggacaaagacgccatcgaaaactactacgcgccggaaagcgatcatctgctgtacgaggcgctgctccatcgtctgcaagcctttggcggcgacggggaaaaggcatttgccgagtcgttccataagccgaaagccgacggtacgcccggccccgtcgtcaagaaggtcaagattgccgagaaaagcacgctgtccgttcccgtacaccacggcaggggacttgcggccaacggcggcatggtgcgcgtggacgtgttcttcattcccgagggcaaagatcgcggctattaccttgtgcctgtctatacctccgacgtggtgcgcggggaattgcccatgcgggcggtggtacaggggaaatcgtatgcagaatggaaactcatgagggaagaggactttatcttttcgctttatccgaatgaccttgtttatatcgagcatgaaaaaggcgtcaaggtgaagatacaaaagaaattacgggaaatcagcacacttccgcgggaaaagacaatgacaagcggattgttctattatcgtacaatgggtattgctgttgcctcaattcacatttatgcgcctgatggcgtctatgtgcaggaaagtcttggcgtcaagaccttaaaggagttcaagaaatggacgattgatatacttggcggcgagccgcacccggtacagaaggaaaaaaggcaggactttgcgtctgtaaagcgcgatccccatgcggcaaaaagcacgagcagcggctgaagaacaatctgccggagaatggttccgtgcgtctcttgcgaatcaccgaacgacaatataccgccatgcggattctctgcggcaatccgtcccccgacctcgatatcgaccatgaaaaaacgacggtcctcacgctttagaagaccgccgtttttcgtttttgagaaaacaaaactcagccgacgccttacggcgtcagcggtaaagaggatatagattgtaccatagcgagttaaattagggaattacaacaccgacgatatagacccgtctgcactgttgattgtaccatagcgagttaaattagggaattacaacatggtttttattttgtgtcaactgccaaagattgtaccatagcgagttaaattagggaattacaacttctggatcgccgtcaacgtgatgaccgtcattgtaccatagcgagttaaattagggaattacaacattccgaaagaggtgatcttttctgtcgccattgtaccatagcgagataaattagggaactacaactgacggcaagacaatatttcaagcaaattgattgtaccatagcgagataaatcaagagactaccaccgattcgccgcgcgcctttttaggataacggaatagtctaaaacactgtccataaaattattaaaccgatccgcgaacatgataatcaagtcgacggatacgccaacaaaaatacagaaaaggtaggttgcaagagcgaaaaagaacaaagcaatgacagcaaataccaacacggcgagcgacacgaccatcaactcctttcctttaagtgtgcctgtttgcgtcgtatatcggttctccgggttgtaacccaaagaatttgattttttcgccggaaaaaagctggagcaggaacatcggcaatcctacaagtatggatagcagaaggacgaggaaaatcaagccgaagaaccccggatcacccaaaaaaaacaacaatccagacatgatgagcaccgcctttctgtagtccattaaaagaatccccaaaatcagttgcgagtgactaagccaatctgggccaatgatttacaacttctgattaggaatgaaagtacagattttatgagttgaaatgcaaacatgaaaacttgtaagacaaaaccgagaacatttagcaaggcccaaagaaaaccgagccccaaaaccaataaaataagaatgtcatgattttagcattctctttccttttataattatatcagaaaagagggggctatagtatgcgttgggaaaattttctattacgaaaatgttacaggcttcgtttgcataagaaatgctaaaagctaacgcgttcaagcgttcctaattatgtgaaacaagcgaacgtaatctgaaaactttttgcactgtttaaaaccgtgaaatcaaaaacgtttcacggtttttctttggaatgtttcgcgattgcagacaatgattaaagcatcatcttatgatataatcctgcttaaaggataatttagggattggctactgcctatgctaatggatggacaggtaggatttaaggggggaagtgtgatatatatatgagtttatctaagaaaacttacaaattcataaaaaaatacatagaacctattgccgctctttgtattgtagtaggattcttttccccgtttgcgtttcgctatcttgaaggaggaacgactgcaaaatatgaggtccttgctactgccggcgattggctcgcaggaacatctgctccgttcttttcagttgcagtttctcttctaatgtatggcgcatataaaatacagaaaaaggaattgcgactaacaaggaaagagatgaagcaaactcgcaaagagtttaaaacacaaaatgaaacattgaaacggcaagaatttgaatccacgttctttcacttgttagagttgcatcatcagattgtgaatagtattttttttcaaagtgatgatgataattcatatcatggacggcattatttttcatgggcctttcaaaaaatgaaccactcttacaaagagaagcgaggtctctatgaaatgtatccttccatgaacaatttatcgccaaaacaaattgatgttaagtgcgtacaagaaagcctaaatgataactttcaggagatagaagtaaatataggccactatttcaaaaatatctttcaaactttacggcttcttgataaatccatattgtgcgccgaggagaaaaaggactttgcaaagctattatctgctcaattatcaaatgacgaattgaatttattgctttattattgtatcaataatgttgaagataaagagttgcgagagttagcctttcgatatgggatttttgacacgatcaatccgaatacgcttcttaacgaggcgcattatatttggtttgataaagactaaaaatacgggacgtccgaaaaatcgcggacgtcccgtaggattctttatgtacaatcagtttaatcctcaaaattcccttttgtcagcaacttttccatagtctcccgaaacgctggtatatcttgcgtcaaggtgtcccatatactttcaaaatccacgctatcaaatttgtgcgcatgattattgcgcattgctttcattgatcaccatggaattttggatactgcgtcgggaaggccgggaagaaaaacaaggcagcccatgaaagaaggattttcatggactgccttttgtcgttattgtttttcggttttatgctttgccgttgcagccgagcacatggaccagtttgtgcttgacgatctctttgatgttctcgcgcgcagggccaagatattcgcgcggatcgaaggccgccggatgcgccgccatgtattcgcggatgcccgcagtcaggccgagacgcagatcggagtcgatgttgatcttgcagaccgccgatttcgccgcgcggcggagctggtcctcagggatgccgatggcgtcgtccaaagcgccgccgttgtcgttgataatcttgacgaatttcggaacgacggaggaagcgccgtgcagtacgatcgggaatttcggcaggcgcttctcgatttccgcgaggatgtcgaaacggagctcgggcggtacgagtacgccttccgcgttgcgcgtgcactgggacggcttgaatttgaaagcgccgtgactggtgccgatggcgatagcgagggagtcgacgccggttttttcgacgaattcctgaacttcctcgggacgcgtataggaagcgtcttcggctttgacgttgacgtcgtcctcgatgccggccagttttccgagctcgccttccacgacgacgccttttgagtgcgcatactcgacaacctttttcgtcaccgcgatattatcttcaaagctgagcttggagccgtcgatcatgacggaggtaaagccgtcgtcaacgcaggatttgcaaatgtcaaagtcagcgccgtggtccagatgcaggcaaatcggcaaatccgtgtcttcgagagccgctttgacaagatggacgaggtaggcgggctttgcatatttgcgcgcgcctgcggaaacctgcaggatgagaggcgcgttttcttctttggcagcctcggtgatgccctggatgatttccatgttgttgacgttgaaagcgccgatggcatagccgccttcataggcttttttgaacatttccgtcgatgtgactaatggcatttaaatacccccttcatattgatgaatgaattctatgctcatattatatcattttccgaaggttcggtctatgcggaatgtaaaaatgtaaaatttgtcggcggttgtctttaataggaaattgacaatatccctgctttgatttacaatcaatacaagagatttaataagaatcgttcagccgtttcctattacggaacggctgagatacatatatgtttttgagcgtcgccattttgcggcgttgtttgtgtgcaatgattggaggaagcatcgtcatgatgggggctgaacttagggccgaaagagaacgacaaggattgacgatacaggacgtcgaacgtgagacgagtattcgtgcggcttatttgcaggcgttggaacgagaggattacagcgcgctgccgaacgaagtttatgtgaagggatttatacggaattacgcggcgtttcttcatatggatccggaaaagctggtgcaggaatatcgtgaaacgattcatggcgccgatgtgggaccgattccgaaggcgaatccggaaacgacgtcccttgtcaatgagagcgcgcctttctcttccggttcggatttccatgagcgggtggaaaaatccgctaagaagcagatgatattccttgccgtggcgtccgtggcgattgcatttatcggcagcatctattactttttcggggatgacccggccgcggtaaaaccggtgcagacggcgcagcagacgcccgcggcgcaaacgcctgctgcggggcagaattcgcagacgccgaacgctcccgccgccgcgcagaatgcgcagcctgcggctcccgtccagaccatcggcaatacggcgaatgccgctgcggggcaggcggacgtgacggcgaaattcacggggcgctgctggatacaggcgattgccgacggcaaggtcgtttatgaaggcactgtggaagcgaaccagacgaagcgctggaccggaaagaaagaggtcatcgtcacggcgggcaacgccggggccattgacgtcacgtacaacgggcaacatgtcggaaagcttggcaaggaaggcattgtcgtcgaaaagaaattttccaacggaaaagtcgaggacgtcaaataacctttttcctcacgggagcaacgcatgaatgcttttttgccgatgacaaaacaggatatggcggagcggggctgggacgcgcttgattttatcttcgtgtccggagacgcttatgtggatcatccgagtttcggaccggccatcctctgccgtcttcttgagaagcacggataccgggttgggattatcgcacaaccggactggcgcggaagggaagatttctgccagctgggccgcccccggctggcttttttcgtttcaagcggaaacatggattccctgctcaacaagtttacggcggcaagaaagaagcggagcgaggacgcgtattcgccggggggacggacggattgccggccggcgcgcgccgtcacggtctatgcgaaccggctgcgggagatatggcccggcgtcccggtcatcatcggcggcatcgaggcgagccttcggcgtctggcgcattacgattactggacggacagcgtgcgccgttccgtcttgatggacagcggcgccgaccttttggtttatggcatgggggagcgtcagatcctggaaatcgcggcggagctgcatcggggcgtcggcatagacgcgatccaggacgtccgcggcacttgctatcgcgtgccggatttcgattgcgtttatgattatttgacgcttccgtccttcgacgaggcgagggaaagcaagagcgcctttgccgaggcgttcaagctggaatatctggagcaggacgcgattcgcggcagaaagctcgtccagcggaacggagaggtctgcgtggtgcagaatccgccggcgcttccgctgtccgaggaggaaatggacgagatctacgacctgccgtatctgcggacgtaccatccccgctatgaggcggaggggggcgtccccgctctgcgtgaagtgcagttcagcatcgtcagtcatcgcggctgcttcggcggctgccatttttgcgcgatcgtgtcccatcaaggcaggatcatccagcgcagaagccatgcctcgattcttcgggaggcggagattttaacgaagcttcccggattcaaaggatatattcacgacgtgggcggccccacggcgaattttcgcaggccgtcctgcgacgggcagcttgcgcgcggcacttgccgggggaaggagtgtctttctccgaaaccgtgccgcagcctgatcgccgaccacagcgattatttggatttgctgaaggaattgcgggcggtgccgggcgtcaagaaggtgtttatacgttcgggcatccgcttcgattatttgatgctcgcaaaggacgatttccttgaaacggtctgccgccatcatatcagcggacagatgaagatcgcgccggagcacgtaagcggccgggtgacgcggctgatggggaaatcggggcgcgaggtctatatgcgttttgccgagcgcttccggaaaataaatatgcggctcggcaagaagcagtatctggtcccgtatttcatgtcgagccatccgggagcgacgctggccgacgcggtggagctggcggagtttatccgcgacctcggttatcggccggagcaggtgcaggacttcattccgacgccgggaacgctttcgacggccatgtattattcggggatgcatccgctgacgggcgaagcggtttacacggcgaaaggaccgaaggaaaagcggcgtcagcgcgcgctgatgcaatactggctgccgggaaaccagcccgttgtccgcgaagcccttcggctggcgcatcgcgaggatttgatcggatatgggaagcaatgccttgtacgtccggaaacggacgccggctttccccggggcggaaaagaggggcgggcgcccgggcaaaaaacgggcggcaggaaagcgtctgcgctgccgcggggcagacggcggaaacacatgaggaatgagggggcgggaaaatgagatgtccttattgcaaagagctcgacagccgcgtcattgattcgcgggcggcagacgacgggaactccatccgcaggcgacgtgaatgcacttcctgcggtcgccggttcacgacctatgaagtcgtggagaaaatgccgctgatggtcatcaagaacgacggccggcgtgtggtctttgacaagaacaagatcctgaacggtctgattcgttcctgtgagaagcggaatatccctacggagcaggttgtggcgctggcagacgagatagagcgggaacttcggaatacgatggagcgtgagatcacgacaaaggccatcggcgaactcgtcatggagaagctgaagaatttcgatgaagtggcctatatccggtttgcttccgtgtatcggaaatttgcggacatcagcatgttcaaggaagaactggaagagttgctgcgctcgaagacggaaaaggcttgacgcggggggaacggtttgaactggaagctgaaggagaaaatagcggcgcgcctcgcgcgggagcagggatattatctctatcccgcgggaggcagagcccggtttgccttggcctatccgaattcgtatttcgtcgggatgtcgaatctcggttttcatattatttatgacattttgaatcgcaggccggataccgcgtgcgagcgtttttttttgcccgacgggcgggagcttgacgaataccggcggacgcggacgccgcttctgagcatggagacgcagtcttcgctggcggattttgacgtggtcggttttgccgtttcctttgagatggattatttccatttgcttgatatgttggaggccgggcgtgtgcccgtgctggcggcggagcgcgacgagcggtcgccgctggtgattgcgggcgggccctgtgcgacgttcaatcccgagccgctttcgctgttcgtcgacgcttttatcatcggggaaggcgaagagaccgtcggtcgtttcatggacgcttaccaggtggggaagaccggcggtgcggacagagctgagacgctgcgccgcctttcgcgcgtgccgggcgtctatgtgccgtccctttatgaacatacctataaaatttcggacgagctggacgatatccgtcccctcggggacgcgccagcacgcgtcgagcggcagtgggtgaaaaatcttgacgactatccggcccatacggtggtcgtgaccgacgagacggaattcaatctgtatctgatcgagacggcaaggggctgcgggcggcattgccgtttctgcatggcgggttattgcttccgccgtccgcgcaatcgttcccttgacgttttgaagggcgcagtgaaagacgcgaaggcatacgggaaacggatcgggctgatgggcgcggcgatttccgattatcccgagatcgacgcgctttccgaatatatcctttccgagggactgacgatgtcggtggcgtcgtttcgcgccgactccgtgacggagacgatgatccgttccctcgccgagagcggcatgaagaccatcaccctcgcgccggaggcgggcagcgcgaaaatgcgcgccgtcgtcaacaagggcatcgacgaggagcatcttttccgtgcgatggagctcggcatggctgcggggattcgtcattaccgcctttatattatgatcgggcttccatacgaaaccgaggaagacgtggacgcggtggcggatttggcggggcggctcaaggatcatctggaagcgaacgaaagccgcggcacgctgacgctcagcgtcaatccgtttatcccgaaaccgtttacgccgttccaatgggcgcccatggcggacaagaaatatatcgaggcggctttgaagcggctgaaaaagactttgtcggggagaaagggcgtcgagctgattgccgagccggtgaagtccgcctatatccaaggcgtccttgcgcggggcgaccgccgcgtttcccgtgcgctttactgcgcgcatcaaatgggcggcgcgaaagcgtttcaccgcgccatgaaagaggaaggtctggaagaagcgttttacctgcatcgggaatccggaaggcaggatttgctgccgtgggacgctctcgatatggggatgagaaaagagtatctttatgaggaatgggaacgcgccggacggttggaggcgacggttccgtgttttgacgggtgccggcgctgcggcgtctgcaaggggtgaggtgacgcatggcttttgttttgcataaagacgataccggcgcggagcgatacgggacgttttcgatatttcccggggcggcggtcgttcacgccgtgtccgcccggtccggcggcgtgagcgcggcgccgtatgattcgatgaatttagcgctgcacgtcggggacgatgcggcggacgtggtggaaaaccgccgccggtttttgggaatgctcgggctggatttcgagcggctgacgacgccggagcagattcacggagaccatatcgtacgcgtcggcgaagccgaagcggggcgcgggcggctttcttatgcggatgcaattccggcgacggacgcgctgatgacggacgtgccgggcgttcctttgatgctctgcttcgcggactgcacgccggttttgcttttcgatcccgtgcatcgtgcggcggcaatcgctcacggcggctggaagggaacggtgcgttccattgcggcgaaaacggtgcgcgccatggccgaggctttcggcacgcgcccggaggattgccttgcgggtatcggtcccgccatcggtccgtgttgttacgcggtcggcggcgaagtggcggaagaattccgcagcgcgtttccgcaattcgcggagcagatcctgtcggaggaaaacggaaccatccgcctcgatttgtggaaggcgaaccggctgcaattagaggatgcggggctcttggcggagcatatcgacgtggcgggcgcctgtacctcgtgccatgcgcggacgtttttttcctatcgggcggaaggcccaacgaccgggcgtatcgcggcggtcatggcgattcgatgacgtgaaaggggaaagaaaaatgagtgatattgcggaacagcttcatgcggtggagcgggagatagaggcggcaaaagagaatcgtcgtgcgggaaaggacgagccggtcagcctcattgccgtgacgaagaatcacggcgtcgaggcgatgcgcgaggccatcgacgcgggtgcggccatcatcggcgagaaccgcgtgcaggaggcggcgcaaaaaaaagagacgctgg

SEQ ID NO: 2799 - DNA, 23357 bp, synthetic construct
  source 1..23357: mol_type = other DNA
  misc_feature 1..23357: note = Synthetic
gatgactatgcccatcatccgacggaaatcaatgccactctttcggcggcccgcagcatggggacgcatcgtgttgtctgtcttttccagccgcaccggtatacgcggacgcagcttttggcggatgaattcagcagagcgtttgtctgtgccgataaattgatcctgacggatatttacggcgccggtgaagaacctatccccggtgtggacggcgcgttcctgacggagaaagtcaaagccgccaccgggcaggatgtggtatatgtggcgacgaaagacgggttactgaactacttgcgcgaaaatgcgagaccgcgcgatttaattctcactatgggcgccggcgatatttataaagtcggtgaagcctttgttgcggcagaggagtctgaaagataaatgacggatatgaaagctatgaaagcccggaaaattgccgttgtcgtcggcgggccgtcgacggaagcggaagtttcacgtcgtacaggcaaggccgttacggacgcattgcgaaaaaaagggtatcaggcggaaattgttgaactggtgccggcagaattggcggcaaccttgcaggacaagcggtttgatatcgtttttaacgcactgcacggacaatacggtgaggacggagtccttcagggcatgtgcgaaatgatgaatatcccctatacggggccgggagttatggccagcgccgtcggaatgaacaagataatcagcaagagcgctttccgcggcgccggtatttcgacggcgcctttcgcctattattttattgaacagggccttgatgaaattgccgccgatatgggcagagaattccccctgcccgtcgttatcaagtcggcggcacagggatccagtatcggtacggttatcgtgcgtgacgagaaggatataaagcccgctttaaaagaagcgttcacgtacgggaaatccgttgtggcggaaatgtttctctccggccgtgaatttacggttgccgtcatggacgacctggtctttccggttattgaaatcatttctaaaacaggtaaatacgattaccgctccaaatatacgccgggactgacggagcatatttgtccggccgcgatttccgccgcgctgacacgagaaatgcaggatttatccgtcgccgtttttcgcctcctccattgccgggggattgcccgtgtcgacctgatgacgaacggcgagggcaggccttttgtcctggaaattaatacgatgcccggcatgactgaaaccagtcttgttcccgacgcgtcccgtgctatggggatgccttttgaggatttgtgtgaacggattctggcggaagcatcgaccggtaaattttaattttatatataaggttttactatatgtcacatacacatttcgacgacacccgctccaacgaatataaccataatcggcataccgacggcttcaagccgtttgcggcacaggatatttcggaagaaacgcattacagtccgcacatggatcccgaggcggcacggacagaaacacaggaacgcattgccaggcggcacaggaaacgattgaaaagagaagcggccctgcgcaggcgtaaacgccggctgcagattatcggcgcggccgttattattttcatttgtttgctgttgctgcgtgtcttgccgatccctttcggcactgtcgttattgatggtaacggcactatgcccgatgaggatgttctccgtgtcggcggcataccgtcgacagtaaacgtagtccggctttcgacgagtgaaattagagaacggctgttacgcgacctgcgtgtgggcgatgtcagcgtagaacgtgaactgccggcaaccattcatatttttgtaaaagaacgcaaggccgtagccgtcgtcatgacactgtacggttttacctacatagacgatacgggaacggttatcggcctggaaccgcaaattaaaggagttgccgtgccgattattaccggcaagaaagtggatactcttttattgggggaccggctcgatgatatacccatgaagcatgcaatggcatatttggaagaactgtccccggagatatcgtcgcaaatcgccgaaatcaatgtgggtaatccgaaagaactgatagcctatacgacggacggcctgtccattcacctcggcaacggtgacaggacggccgaacgcgctgccgtgacgcagggcctcctggaagaaatcagaaacaaccgtttatccgtacagtacattgacgttaatccggacgccccgattataaaagaaaaataaacaatgccccgccggcgatataatgatatatcggcaggcatagatttttgcccgggtattacggataaaggcagcccgattatcgacaaacccgttcttttagtgtattatgtaagagaactttgagtctgtacacgtaacacaggatactgaaggaggatattataaatggccgagtttgcaaaaattaaagtaattggtgtcggcggcggagggaacaatgccgttaaccgaatgatagaaagcggcttgcagggcgtcgaatttatctctgtaaatacggaaaaccaggtgttggaagtttctcaggccgatttgaaagtccagatcggtgagaagctgacgcgcggcctcggcgccggcgctaatccgcagaagggagagcaggccgccctggaaagtaaagaagacattatgaaagccctccaaagtgcggacatggtattcgtaacggccggcatgggcggcggcacgggtacgggcgcggccccgattgtcgcggaaatcgccaaagaaatgggcgctcttaccgtagcggtcgttaccaagccgtttgcttttgaaggtaaacgccgtaaagagcaagctgaaaagggcgcggcatatttaaaagaaaaagtagatacgatcattacgattcaaaacgataaactgttgcagattatcgacaagaaaacgccgctcaatgaagcgttcaaagttgccgatgatattctccgccaaggtgtacagggtatttccgatctcattacgacgacaggccttatcaaccttgattttgccgatgtccgcacgattatggaggatcagggcgaagccattatgggtatcggcgtagcgaccggtgaaaaccgcgccgtcgacgctgtggaaagcgctattaagagccccctgctggaaacgggcattgacggcgcacagagtatcctgttgaatgtgacgggcggtcccgatatcagcctttacgaaatcaatgaggccgctgaaaaagtatcggaagccgtatctcccgatgccaatattatcttcggctccgttatcgatccggatatgaaagattccatccgcattactgttgtcgcgaccggctttggcaaggatgcttcttccgtccccactttcggtaaaggtgcaggtattgcggaacccaaagatacaggtgccgtggaaattccggcgtggatgagataataagagacactgagaaagcggatccgcaacggacccgctttttttagaataggcacgtgaggggagggaagcaacatgcgttgtcctttttgtaaatatgacgatacaagggtaacggattcacgggctaccgatgacggccgcgccatacgccgccgccgcgaatgccaggcttgtaaccgccgctttactacgtatgaaatggttgaagaggtcccgctttatgtcgtaaagaaagacggaagcagacagctttttgaccggaataagattttaaacggccttttacgggcctgcaataagcggcgtgttacgcgccagcagctggacgatatcgttctcaaagtggagcggaacatacgcaacacattggcacaggaagtgccgagcgtaaaaatcggcgaaatggtactttgtgagttaaagagtatcgatgcggttgcttacatccgctttgcttccgtgtatcggcagtttgccgatctggacagcttcatggcggaactcaagtctttgatgggtaataataacaacgcttaaatatcccggcgagtaggaggtgttggtgacggaacggtatatcgacaattttttaaataatcaattgccgcagctgcgcattgccgttatcggggatgtcatggtggaccggtacgtgtacggcaaggtggagcgcatttctccggaagcgcctgtgccgattaacaaggtcaataaagtgacctccgtcctgggcggcgccgccaatgtggctgccaacctggcgcagctggattgcaatgtctacttggccggccttatcggggaagatgacaacggcggccttttaaaagggctcctcgcggaagcgggcattgacggttcgggccttgtgacacgaacgggccatgcgacgacgacaaagatgcgcatcctcggtgcgcggcagcaaatggcgcgtctcgattttgaggaaattacatcctttacggcgcaggaacaggccgaattgacgggatggcttgatgatcggattgcagccggtctggacggtatcgtcctgtcggattacagtaaaggcgttttcacgaacggcgtcgccgcgctcgtcattgcggcagccggcaaggccggtatccccgttcttgtcgatccgaagggcagcgattggtcccagtataacggcgccgattttgtcacgcccaatataaaggaaatctcacaatgcatcgggtatgacgtagcgaatgaaacggaagcggtcgttaaagcggcggtatccctgcacaagctgtatgatttcggcaatctcatgatcacgcgctccgaaatggggattaccctggtcagtaaagacggtaaggtttggaataatccggccatttcgcaggaagtatttgatgtgtccggcgcaggtgataccgtagcggcttcgtttatcgccgccattgccggcaaattgtccatccgtacggctctgaatattgccaatgcggctgccggtattgttgtcgctaaagtcggcacctatccggtccatcgcagtgagcttttacagctttggtcgaactggcggccgctgcgctgggaaccgtaccggccgttgacgcgggaaacaatggccgaaaagattcgtatgtggcaggataagggtgagaccgtcgtctttaccaacggcgtgtttgacgtcctccaccgggggcatatcctttacctgcagcaagcggctatgctggggcagcatcttgttgtcggcctcaattcggatgcgtcggtgcgtcgtttgaaaggggaaacgcggcctttcaataaacaggaagacagggctgttcttttaaatgctctcggatgtgtcgatgacgtggtcatctttgaagaagatacgccgaaagaactgttggcacagttgcgtccggatattctcgtcaagggcggcgactaccgggttgaagagattatcggccgtgaatatgcggagcgcgttgaagtcattcgctttgaaagcggctattcgacgacggagctggtacggaaaatcgctgattcagtgaagaaagggaagctatgattatcgtaacaggcggcgccggctttatcggcagcaatattgtcagaaaattaaatgaacggggcattgatactatccttgtcgtcgatgatttgacggacggccgtaaatgccgcaaccttcagggattggactttttcgattatatggattatgaggatttcaccgccgatatggcggacgataccttttcttacggcccggttgacgtggtcttccatgaaggggcatgctccgacacgatgaactatgacggtcggtatatgatgaaaaataactacgaaggcagcaaggccgttcttcattactgtgcggaacgggcgattcccttcctctatgcgtcttccgcttcgacttacggcagcggtaaaaacggtttccgtgaagagcctgcctgtgaagaggcgttgaatccctatgcgtactcaaaacttcaattcgatcggtatgtgcgccgtattttgccgttggtaaaaggacaggtagcgggtttcaggtatttcaatgttttcggcccgcaggaaaatcacaaagaccggatggcgtcacttattttccaaaagtatcatgaactgcaggaaaaggggaaaatcactctctttgaaggtacggcgggctatgaaaacggcggtcagatccgcgatttcatttacgtcaacgatgtcgttaatgtactcttctatttctgggaacatcccgaactgtccggaatttataactgcggcaccggtacgggccatacgttcaatgaattcgttacgggtattatcgattattgcggtaaaggttctattgaatatatcccgttcccggaaattctcaagggtaagtatcaaagctatacgaccgccgacactgcaaaactcatggaagcgggttatgataaaggatttacccctcttgaagaagcggttaaagaatattgcgggatccttgaaaagaacgacggatatttctcctgatgaaagctgttttttttgatcgtgacggcgtgttgaatgtcgacgccggctatgtatataaaaaagaggatttcgtttggacggaaggtgccagggaggcccttgcgtggctgaccgacgcgggctatgccgtttttatcgttaccaatcaaagcggcgtggcccgcggttattatacggaagaagaggtgcgccgcctgcatgattggctttgtaccgaagcaaaggcggcaggcggcgccattacggccgtatattattgtccctatttggaaggcgcgcctgtcaaagcgtatgaccgcaggagttcatggcgcaaaccggagccggggatgattttgcaggcgtttgccgattttgatattgacaaagcgcagtcctttttaatcggcgacagcccccgtgatcttgaggcggcccggcgtgccggcctggacgggtatttatttacgggcggttcgttgaaagactttgttgtgcatattgcagaggagagacataagggtggagcagtataacaatatattgatcattaagatgagctcactcggtgacgtcttgcatgccttgccgactctctatgcgctgcggcaaaatcagccgaatgcacgtattgtctgggcagtgcatgaggaattcgcggctctcctgccggaggcgccttatattgatgaagttatccgtatagataagaaaaaattgaagaaactgtcctactggcacgaattgagaagtatcctgcacccctatcattttgatatttccatcgacttacagggactggctaaaagcgccgtcgtcgcttttaacagcggcgccgggaaaaaagtcggttattgggaaatgcgcgagggcagcttcctcgtcagcaaggggctggccggtccccataaaaagggacatgtcattgaacggtatctggatgtggtccgttgtctcggcgggaccgttgaggccgtggaatttcccttaccttccattgaacaggaacgggcccgcatgcgtgaggcgcttaggatgcggacgggaggaaaaccctatattgccgtcgtccccggcgcacggtgggctgtcaaagagtggcctcttgcgtattggcaagtttttgtgcggcgcgtgacggacagcggtatgcacgtcgttcttctcggcggccgcgacgatgtgtcgaaaggacgggtcatagaagagtctgcggcttccccgctgcttttcaattatacgggccaaacgaccttaaaagagttgacggccctcattgcggacgccgttttatacatcagtgcggatacgggaccgcttcatttggctaatgcgctgaaaaaggagctcatcgctcttttcgggccgaccagcccggaacggacgggaccgtacggcggcaaagaggcggcgtacattcatcttctcgtatctcccacgtccgtcgccactgcggaccgtcccctcgtggacgatccggactgcatggcacggataaccgttgacagcgtatggcaaacctatgcctctattatggagaaaacacggaaatgattaatttgaaagataaacggattatagttacctttttgatgcatctgggagaccttatcctggtcacgccgtttttacaggttctgcgccgtcatgcgtacaattcggaaataacgctggccgtcgataaaaaagttgccgatgttgtacgttataatccgaatatagacaaactcgtagaaatagataaaaaaggaagggacaactcgatcggcgccctttggcgcatcggcaggaaactgcacggacacggctatgaccttctcatcaatctccatcccaatgagcggacgtcttttctggcggcagctgtaggggctaaagaattcgtcggcatgagtcattttctcttccgtcccatgatggataaatatacccgcctcgaccgcatacatcttcatgcggccgatatgtatgtcgatgtattgaaacgactgggcatcgacgattgccgtaatgacgggctgcaaatcttcacgtgctccgcgtgggatgagaaggcggcggctttttatgcctcgtgcggcgtggcggacggcgatcggcttatcggttttaatatcggcagtgccgtgccgcaaaaacggtggccgcccaaacggtttgccgccgtggccgattattttgcgctccaaggatatacatgcgtttttttcggcggcgctatggacagagaaatggtcaatgatgccgtatctcttatggaatcacaggccatcgtggcgaccgggaagttttccgtcggcgagctggcggcggccgtgaggtggtgcagcctttttattaccaacgacagcggccccatgcacgtggctgtcagtcaggacgttcccgtcgtcgccctctacgggccgagcaatcccaaattttacggcccgtacacgaaaaaagccattgtcctggagtcgacggatacgtacgcgaccggcaagagcatgaaaaaaattatacgggaaggtacctatcgcggtatttcgatcattacaacgaaacatgttattgaagcggctgagacaatgttgtgtcaataccgataattgaagtttcggtgaaagtaccgtataatatagataatgtaacttgaagtttggtattgcaatttaatttcggaggtgcagaactatgaaaaaagtattcacagcggcgttggtggctaccctcgtttcggccggcgccatggtatatgctgccggtacacctgttcagaaccgtcaggcaggcgacctgaaagtcgatcttaactacgggttcaaccagaaaatgggccatcgcgatgcgcgttctcatttctccggcggtgacgtgacctatgtactcaatgataaagttgacgtccagtatgacaataacaatacgaaagcaagcagtaacggcgaccgtgtaaatgaacacggcttacgcgccatctaccattttaacccgtatgtttccgcgttcggcggcgctacaaaggtcgatacgaaattcgcaggccatcgcgaacacgattggggcggtcaggtgggccttgaaggacgggtgcccattgccgataaagtaacgggtttcggctccgtcggcatcggtgacgacgttaacacctacgaaataggtgtaggctacaacttcaacgagaaccttgatgcccacgtaaaataccgtcgcgacgacattgacgtaaacaactatgatgatgatgtaaaaggctggcaggtaggcatgggctataagttctaacctacaacagtcatataaaagagagccgcaaggctctctttttgtgtggggaattataattactttaaatcaatatatatttgacataaaattataatgatgatacagtaatgatgtaagccttatatctttgagagagatgataggttattacaataaggtccggcgggagtgccggtaccgtaaagctctaacggcatacctattattgaggtatgccgttatctttatatataacctaatttctgaaaaatcggagggtatgtatggaaacggaacagatgaagtacgtagtcggattggatatcggtattacctcggtcggatgggcaacgttattgctggatgttcatgacgagcctgtgcggattcttgatttaaattcccgtattttcgataaggccgaagtgccgaagacgggggcgtctttagctgcaccccgccgcatagctcgtggtacgagacgccgactgcgtcgcagaaagtttaggcttcatcggattcgtcaatatatcctgcgacgacatattcttgataaagacgggttagatcgtttatataaaccagaacatacgatcgatatttttgaattgcgaacggccggtctggaccgaaagctggagtctgaagaatgggcacgtattctgttgtatatggcgaagcacagagggtttaaatcaaatcgtaagtctgcatcgttggcagatggagacgaaggagttatgcttcaatccatagcaaaaaaccgtgaaatcttaagtcaatatcgctctataggcgaaatgatttataaaaatgataaatttgccgaccataaacgcaataaaggcggatcttatgaatttacggttgcacgctccatgttgattgatgaaatcaagttgctatttgcaaagcaacgagactttggtgctgattttgccgatacagaggccgaagaggaatacataacgcttttttcagcgcaaagaaatttcgatgaaggtcccggaggagacagtccgtacggtggaaatcaaatcgagaaaatggttggaacttgtatttttgaagatggtaagaatggtacaaaggaagaaaaacgagctcctaaggcaagttatgcctttatggctaccaatttatggcaaaaaatcaatcaaattcgtttaattgacagtacgggagaggaacggcctttgacaagcgaagaagcgggtaaggtagctgaaaaggcgtggaagaaggaagccatgacatatgcagatattcgtactgaaatcggtatgagtgacgatgcgtatttcaaaggcttgccgtataagtgggggaatggagcgcagaaggacgaaacagagaagaaaagtaagttttcatgggtgaaagaatatcataaactgcgcaaagtgttggataagattcaaaagaatcgcattgcgaaattgtctaatgatgatattgataacattgcctacatatttagtgtatataaaaatgatgaaaagatacggacagctttagaagaaaaacatatagatgcgcaggatattgaagtcttactcgaacatctcggaaccttcagtaagttcggacatttgtctcttaaagcgtgctataatatattgccctatttagaaagaggcatggtatattccgatgcttgccaagaggccggatatgatttcagaaaatccaatgaagacaccattgccgatatacccaatcctgtggtaaagagggcagttagccaaaccatgaaggttttgaaggcaataaaacaaaaatatggctgcccgcctgtagaaattcatatagaaatggccagagagttggcaaaaaactttgatgaccgcagaaaaatgactaaatccatggaagaaaatcaaagtaaaaacgagcgtataaaggagcgcttaaaaacagatttcggaatcgcctacccgaacggccaggatattgtgaaactgaagctatatgaagaacaaaatgagacgtgtgcctattcacaaaaacacatagatgcacatagattattccatgattccaactatgctgaagtagatcatatcatcccgtatagccgcagttttgatgattcatacagcaataaggttctcgtgttgacggcagagaatcgtcaaaaagggaatcgcacacctatggaatatttagggagcgacaagggacgtaaacagcaatttatagcttgggtcaagagtgatattaagcagccgagaaagagagaaaacctcttgcgtgaaaaatttacggctgatatggaaaaggactggaaggcgaggcatctgcaagatactcaatatattagccgctttatgctcaattatttgcaagacaactataaattgatgcccggaaatacggataggaaacggcgaattatccctgtaaatggggctgtaaccgcctatgttcgtaagcgcctcggaatcgttaaaattcgagagaacggtgatttgcatcatgccgttgatgcggctgtaatagctgctgtaacgcaaggtgtggtaaatgccgtgtcaaaatacagtaagcggcatgagcttcaataccatgtagatagtgacggtaattgtgtggacatggtaacgggagaaatcatggatgatgcctttaaagaaaagcatcaaataaaaggattccctgaaccgtggccacactttagggatgaattggaagctagggtcagcgataatgcggcagaagctatacgaaacttaaaactgcctacatatagtcctgatgaagatataaaaacaccatttgtatcccgtatggttcgtcataagactacggggcaggcccatgaggacaccatcagaggtgtgggtggtgcggacagcaatatatacattaaaaaagtggcccttacagaattgacgttgaataaagatcatgaaatagagggatactataatccgtccagtgaccgcttactttacgaagctttgaaaacgcggttggaacaatttggtggtaagggaaaagatgcattcaaagaaccgttttacaaacccaaatcgaaacctaagtccgccgatgatagggggcctcttgttaagacttgcaaaattatggaaaagattaacttgagtgtcaaagtacatgacgggaagggcattactaaaaatacaggtggaagcatggtgcgtgtggatgtatttaaagttagaaaaactaatggtcaataccgatattatttggttccagtttacgtatccgatactgtaaaaactgatttgccgaaccgtgcagttgttggtggtaaaaaatataatgagtggccgactgtagatgataaagattttctattttctgtttatccgaatgatttactatatattggaggtaaggaagttaaattaaatggcactagaggagatacattaagacaggaagtaatgaccaaagatgcatttctttattataaggcaatgaatatttctagtggaaatattgctgttgagaatcatgatgatacatatgcacaagaaagtctaggtatccgactcgtgccggtattagaaaaatatgaagtgagtattttaggtgaccttacgaaagcaaagtttaaggaacgagaacagtttacaatgaaatcacaagcgactaataggtcaagataatgtaccgtcatgtaattattgaacaaaatgcctatgtgtattataaaaataggcagttatatgttaagggtgatgaagaatatcatatacccatagaagatattgctacggtcctgttagcatcgtctcagattacagtgactgccagggcacttgatgccttagtagagagcggggcaaatcttgttgtctgcaattcgtccttcatgcccagcggtaccttagtgcccttcggatcgaattcaagacggttgaagatgattcgcttgcaagtgaatcagtcaaagccaagattgaagcgtctttggcaacaaattattaaacagaaaattcgcaatcaaggtctatgccttcagtatatgggtgtagatgactgtttaagtcatttagttgataaggttacgtcaggggatacggagcatgttgaaggctatgcggcggggctgtattttaaggccttattcggtgacgattttgtgcgtcacgatgatacggttattaacggcgtactcaactacgggtatgctattttgcgcagctctattgctcgctttttggccgtttacggttttgaaccggccttaggtatatttcatcacagtgagctgaatgcgtttaatcttgctgatgatttaattgagccattcaggcccgtcgtggatttatgggctgcaagtgcatgccgagaggcaagcgaattttccgtacccatgcgtcgtgatctggtacggttattaagttgtcatattatgtcgggagaggagaaacacgttatgaattatgccatagaaagaaccgtgcaaagcttgtccgcttgttatgctgataagcaaaaagaattgttgcttccgtccttgcttcctattgaacggcatgtgtatgagtagatatatgagattacttgtcatgtttgacctacctgttcaaactcatgaagaacgcaagctggccactcagttcaggcagtttttactgaaagacggttattatatgatgcaattttccgtctatgttcgtatatgcaacagctatgaagccatagagaagcatcgcatgcgattgcttcaaaccttgcccaatacgggatcggttcgcatcttaaccgttacagaacggcaattcgccatgatggaaatcctttgcggacagaaaattcccgaaattgatacaaagtatacagacgatacagtgactgtattgtgaagaaaaccggagcgttctaaacgctccggttttgctttgtactgatttttttgaatttgaaaagctgcagaatgagtagttctgcagcttttcagggtaagtattatacccttgagagagatgttagggaattacaacagccgagatattatccgtgacgccctacttattatacccttgagagagatgttagggaattacaacgtcggcgtatgcggccgttacgtcgcaacattatacccttgagagagatgttagggaattacaactattcggcaaatcaatattctgctgcactgattatacccttgagagagatgttagggaattacaacacggccgatcttctcggtttagccgtctttattatacccttgagagagatgttagggaattacaacacatgcggcccatgtgcgtcagaatattgtattatacccttgagagagatgttagggaattacaacctatccgcaatgcccttattgtgtgtactcattatacccttgagagagatgttagggaattacaacagaatgatttgatgatagccgctgtcagttattatacccttgagagagatgttagggaattacaacctgtaaggagattgttatgtacgtatataaattatacccttgagagagatgttagggaattacaactaacagattacccaaccattaaggtgggtgattatacccttgagagagatgttagggaattacaacctagcatgaaccaacaagcgcagcgatacgattatacccttgagagagatgttagggaattacaactcaagcgtgaccataaataatccccttactattatacccttgagagagatgttagggaattacaacatgacaggttttataaagatttttgtgaccattatacccttgagagagatgttagggaattacaactcaatctttggtaacaaaccaaatgtgtgaattatacccttgagagagatgttagggaattacaacgtcaggactcggcgttcgtagagaacactcattatacccttgagagagatgttagggaattacaactgaaaggtcgtcaggggtataacggacataattatacccttgagagagatgttagggaattacaacctgtatccccatagaagtaagtacgccgtaattatacccttgagagagatgttagggaattacaacacagcgtcacatcgcagcattaactccacggattatacccttgagagagatgttagggaattacaacacagatgacgggcgttcgtctcgtcgaacgattatacccttgagagagatgttagggaattacaacgcgaccgatacggacgatgcagaaatccttattatacccttgagagagatgttagggaattacaaccgtaggggctgttaagtcggcaagcttaatattatacccttgagagagatgttagggaattacaacgtattaccgtatacatatttcttagggcttattatacccttgagagagatgttagggaattacaaccaggaaaatgttctttattggcaagcttgaattatacccttgagagagatgttagggaattacaactgacttttctgatttctgacgaagttggtaattatacccttgagagagatgttagggaattacaaccctgctgtcgttccttctgcggctcagtttattatacccttgagagagatgttagggaattacaacgcatggtaaatgcaaagaaagtgtgggggcattatacccttgagagagatgttagggaattacaaccgggttactggagtgaatacggtaaaaaggattatacccttgagagagatgttagggaattacaacgtatatggaactatatagcatatatccccgattatacccttgagagagatgttagggaattacaaccagagcctcgttaccgccgtcggactgcagattatacccttgagagagatgttagggaattacaactatcttccatcacattttcgggcataacagattatacccttgagagagatgttagggaattacaacacataattagcacgatttaactgggcttgcattatacccttgagagagatgttagggaattacaacacgcgctttacgtcgattaaatgcttcgattatacccttgagagagatgttagggaattacaactaccagaatcatctgcgttctggcctgataattatacccttgagagagatgttagggaattacaacaactccacaacgaataccatgccgaaccaaattatacccttgagagagatgttagggaattacaacccattgcctgttaataccttgctgataagaattatacccttgagagagatgttagggaattacaaccaccgaattaagctgcatgagccaccggaaattatacccttgagagagatgttagggaattacaacagttgtcgctcacgctgtgacgcttcgtgtattatacccttgagagagatgttagggaattacaacccgtgcgcgtgtacaccgagtcttccgcgcattatacccttgagagagatgttagggaattacaacgggttgcagcagtctatcacggatttaagcattatacccttgagagagatgttagggaattacaactcccgaggcagcgttaagcggggatccttgattatacccttgagagagatgttagggaattacaacttgacggtatcgtacttaacgtataaaaagattatacccttgagagagatgttagggaattacaacttgatttcatcaatcaacatggagcgtgcaattatacccttgagagagatgttagggaattataacgcggcgatgcatggaaacgtgacagctatgattatacccttgagagagatgttagggaattacaacgcattaataccgctactaatatcagaaccaattatacccttgagagagatgttagggaattacaacgaattaggccatatcaaactaaaacatcatattatacccctgagagagatgttagggaattacagcggcgttgtctgataggtattttattcccctatccgcagaagtaattgcgaatccatgcaaatgagaccgcttttatataacgccgaggaggtatatttctccattccggcattgtataaaagcggtcatgtatgatttctgcccgttcttttttacagtaacccggccgctacgagttcatcggcgtagcgaacggtactcatggcgtctttgccgtagcaatccgcaccgatggagtcggcgtattgcttggtcatgacggcaccgccgacgacgattttgcaatccggttttttggcatgcagctggttaatggtttcttccatattgactactgttgttgtcatgagggctgagaggccgacgagttttacatcgtctttgacggcggtttcaacaatgagttcgggacttacgtcacggccgaggtcgacgactttgtagccgtagttttctaaaaggactttgacaatatttttgccgatgtcgtgaatatcgcctttaacggtagccaggatgaccttgccttttacgtcctgcgcaatatctttcattgattctttgacgacggaaaaggccgctttggcagcttccgcggccataaggagctgcggcagaaagatcgtccctttttcaaacccatggccgacgttgtcgagggccggtaccaggtcttcattgataatcgccagggcatcgcgtgtaagcagggcgtttctggtcgcttccgccgcgggattggcaaggccgcgctcaatggcatccatcagtttcgaaccttttccggttgattcctttcttccgtcggcagtgggagaaggttcgattgttttcgatgcaacgggtttcactgtgacggctttaatctcccccaagtcgaaatcgagggcacgaaggatttttttcttataggcgctgaccgcttcgtcaacgcgtttatccggcgttttgtagtcccggtaggcgccgataaattcagtaaagttcggatctttatcggtcagaacgcagtaagttcgatatgcctgcatcatggccgtgttgttcggattgatgatggccgatgtgagccccgactgtaacgccatggcgaagaaatacgagtttatcagctcgcgtgcgggcaggccgaaggagatattagacacgccgagaatcgtattgccgccgagttcatcgtggatacggcgcactgtctccagcgtgacgagcgccgatgccgggtcggccgaaacagtcatgcagagcccgtcgataatgatattttctttggcgatcccgtaagaggcggctttgtcgtaaattttcccggcaatggcgacgcggccgtccgccgtcggcggaatgccgtcttcatcgagcgccagcgcaacgacgacaccgccgtattttttgacgagaggaaagaccgctttcatggtttcttcttttccgttgaccgagttgataagggctttcccgttatacatgcgcaaggctttctccatcgcttccggattagaggtgtcgatctgtaacggcaaaggcaggatggactgaagtttgccgacgacttcctgtatgagctcgacttcatctgtttccggagagccgacgttgacgtcgagtacatgtgctcccgcttcttcctgctcaagcccttgactgacgatgtagtcgatatcatgatcgaggagagcctgtttaaaccgctttttgcctgtcgggttaatgcgttcgccgataatgacgggtgcaatgtccctgccgatggttaccgtccgtgagaaagaggaaatgacggtgcggtgtttgggctttacgggcataaagggaagaggggatacggcggcgatcactttttttatatgttcgggcgtcgtcccgcagcacccgccgacggcactcgccccgagccgggcaatttctttcatgcaggttgcaaattcgtcggggcctatagtatagaccgtttccccgtctattgattcgggcaggcccgcgttcgggttgacgagaacgggaacggaagctgccgctgtaagccgttttactgtcgggagcatttctttcggcccgagggaacagttggtgccgatgccgtcgatccccagtccttccatcacggcgacgatcgattcaggtgtgccgccggtaagcatcttgcctttttcatcaaaaacgcatgttaaaagaacgggtaaatcacaattttcttttgctgccaggacggctgctttggcttcgtaggagtcgttcatcgtttcgatgaggacaaggtcggctccttcacgtgctccgatacggacgatttccgcaaagatactgatggcgtcttcaaagggcagatcgcccatcggttttaaaagtttgcccgtcgggccgatgtcaagggcaatgtaggcatcgtcacggcctgcccggcggcatgactttttggccagccgtacggccgcggtgacaatttcatctatcgtgtcggggaatttgagccggttggcgccgaacgtattcgtattaaatatatgacagcccgcttccaggtagtgctcgtggaggctgatgattttatcgggatgaatgaggttccacgtttccggcagttctccgggctgcagcccttccgcctgcaggatagaacccgtgccgccgtcaaagaagagccattctttgccgaggcgatcaagtaacttctttttcatgtataatgtctccccctggcagtctcagttacggaattgacagtcgtttttcgtacagcggcggcatttattttcgcgttcccccgatacggtgtccctaccggatgcttccgctgccgatttacccgtcgcgtcgagcgggttggcgacatccgccaaaaaagcgtcttccgtttccgtgtcaaattttttcgtacagccgatgaaagccgttaccgatttggacggtaccatgagaagagtatccgtcaaggtgatgccgcatgttttcggcagttcgagaatacgggaaaaatccttttgcagggcaagcggcacatccccgtagccgggcgagaagcggggacgcagccggcggccccgttttgcttccgtcctgcgcagcgcgccgttcagttcgtccgcataggcttcaatcatttccgcaccggccgcctgatagatgagggcgtcgatcatgccgcctatttcgccgcgcttgatgagacggtcgataccgacgccgacagtggcggcaaacatataggcctgatcgcagccggccaggtttttacagagattccgggagtgaattgtcagcccggcgatttccactgtatccggctttttgacggatacgggaaattttctgtgtgtcgtccgcagcgtcatggcggcatacatcctgtcaacacactgctgtatgcgctttaccgtatctgcaggcggttcggtgccgcgaaaacccaggtagcggtatatttctcgtagacgcaattcaaacatatacgctcagtcctcagtttccgttcaagtaatcaagcgccggtttgatgttgctgtaaacggcttcggcaacatccggcttgttcatagtgaaaacatgaatatttttcacgccgttggcgagaagatccgtaatctgttcggaagcataaatgatgccggcctgtttgatcgcttccggcgaatcgccgtaggcatcaatgattgctttataacgtgccggtacggtcgtgccggacatggtgacggaacggccgaggagctttgcgccggtgatcggcatgatgccggcgagaacgggtacggtaatacctttggcccggagccggtagagataattgtagaaaacggcgttgtcgaaaaacatctgtgtcgacagaaattccacgcccgcatccaccttttttttcagattttcaatatccgcgtctttgttcggcgcctcgtaatggccatcgggataacaggcgccgccgatgcacatgccggggcagtattttctgatatccgcaacaagttcggaggcatagccgtaatcacggtgcggtatgccttcggcgggaatatcgccgcgcagggccatgaccgtttcaaacccgccgttacggaaattttccagcatagtgcggactttttcctttgtactcgatatgcaggtcaaatggggcatgacttccacgcctgcaacgcctttgattttttcggcaatatgaaccgtgaaatcggatgtaccgccgccggcgccgtaagtgacggacataaagtcggggcggagggccgcaatatccagggccgccttttccgccgccgggacggcagcggctgttttgggcgggaatacttcaaaagatagagttacgtttttactgtttaaaatgtcgatgattttcatgcggcaaaactcctttatatacaaaaccggctgctgcgatttaccgtgttttttactgtactcatttattcagagaacatgtgttcattataacagtaaactatgggatagcataggctaagtatatgttttatttacttatattttttatagtgaaacaggctttttagcgttatcatataaatgcagataaatgagattgcctacttgccaaataaaatgtatcatgctataattttccttgttcggactgcttgcagactctgaacgttatacggcctcgtggtgtagcggttaacatgtcgccctgtcacggcgaagatcgtcggttcaaatccgatcgaggtcgccatagttgctcaggtagctcagtcggtagagcaggggactgaaaatccccgtgtcggcggttcaattccgtccctgagcaccacatacgcggaagtagctcagtggtagagcaccaccttgccaaggtgggggtcgcgagttcgagcctcgttttccgctccatagtatggcggcatagccaagcggtaaggcagaggtctgcaaaaccttcatccccagttcgattctgggtgccgcctccataagcttcttggtttgtcatgccgaggtggcggaactggcagacgcaacggacttaaaatccgtcggatagcaatatccgtaccggttcgattccggtccccggcaccagtcgaaagcgagagaaaagccggcccggatgcatccgggccgacttcttttacttgcagcggagggagtgtaacaggatgagaaacccattctgttgcactctttttaggttgtctgaagatgagtaaagaaaggccgtcatggaagaataccggtataaggtttccgattttgaaggtccgttggatcttctcctgtatttaatcgaaaaaaataaagtcgatatctacaatattcccattgcggaaattgccgatcagtttaatgaatatgtcgctcagatagaagctttcgatgtcaattacggcagcaaattctttcttatggcggcgacgcttttgcagatcaaatcacgtcatcttttaccgaaggtgaaggctgtcgaggcggaagaggaggacgatccggaagaagaactggtgcggcagcttcttgaatataaacgtatgaaagaagcctcgtccgtcatggccggcctgtgggaaaaacgacagcttatgcacagtcgggaacggactccttttgcgtatgaaccgaaattttcaggaactattgaaaaaaacgcccttttccatgcgtttcgtctcgtttgccgggcgttgacggaaaaagaaccgccgccgcctgttcgtattgaacgggaaatatacagtgttgatgaatgtatggatacggtccttgacttcctgcggcagtcggccaagccccgcacggtta

SEQ ID NO: 2800 - DNA, 23312 bp, synthetic construct
  source 1..23312: mol_type = other DNA
  variation 14627..15466: note = n is a, c, g, or t
  misc_feature 1..23312: note = Synthetic
gaagggcaagcgcctgcagaaggtagtgacgaaactgccggataatctttcctctgtgcaggacgtcggcacgcttttcacccgcctctacaagcatgaatgtgtggggccgcaggaggatgaaatcatgatagacatcctcaagggacaggaggacacggcttgcttcaacgctgccctgcctgactggcagatagcccacaaaaccggtgaaatcagcgggcttttccatgacggcggcatcttctacggctcggagggaaatttcgtgctggtcatcttctgcgagaagtacgccgggcgccagattgccatcgaggatatacaggaaatggcctggtattttgcggccaggctgtcggatttgaaaaataagtgacgaatagtcagggggaaattgtaatatttccctgctccgcacgtatgtatgtgtatataagtgttgatggcaagggaggcatgcatcatgaaatggtggaagaaactgctgatagcagtggggatattggctgctttggggctggggctgattggctatggtgtctcgaaggtaagtgatgtctatgaggaaaagatccagcccgatatgcagcgctacgtgcagatgactaaggcggagcaggatgaatacgtcattgctcacatggaggacctgatgaagtccatccagagtgatgatacagatgaaaaagtaaaactggagacagaagctatcgagaaggatccggcttcgcggcaggcggctgtggaagtgggccgctccatgtgcgctgtcctgctcagtgcctctgaagatataaccagcaagctctcagcggcagacaaggccaagtacgaggaggaaggcaaagccctggaggccagggggaaagcctttgataaggcagtggaagactacgccgccagcaagtctaagtaacaggtggtatacgggatacgcaaaacaaagaggatgtgaagaaatgcgggagcatttgtccacatcctctttttctatgaaatatcctattataactcggaagaagatgtcccccacctctataggtgggggtggcgaatatcataacaggcgggagcgcatatctcccgcctcgttgaaacactgattggaagattttgtctatcgacaaaatttgaacaatggtgttataaaaacggcggtagatgtttcacgtgaaacatctaccgccgggaaaacatcagtttttctcaccgaggtagtcctgcctatagatatacagcagggcaatagacactcctgcggaaacgacctccgctactgcctggcatatccacaagctcttggcgccaaagatcagtggcaggccgaaaatcgccagggtctgaaagagaaaggtacggcaaatggcaatgatggccgagatctttccgttgttcagcccggtgaaatatgccgcagcatagatattgaagccctgcaggataaaggccagagcaaaggctttcagagcttcctcggccaaggcacagactgacggatcatagcccacataaacttctgctatccagccggcagttatctgtgccagggcaaacatcagtatgccaaagcctaagttgaggacgatgcccttttttagcaggcttctcaattccaggtggttttgtgcgccgaaatggtagcctacgatggaatttgcctcaaggcacaaggcggcgaatacggcagtgaagatgccctcgacgaatactaccacgccaaaggcggccactccgtcctcgcccatgaagcgcagcagctgtatgttgtaaaagacgaaaacgacggagatggccatgtcatccaccatttccgacaaaccgttggagcaggtagcaaacagggctttgccatcgaacttgtaggaggtgaagtgcaggcagctgctgttggggcgggagaagtagtagagggggatgagcccgttgatgcaggcacctatgcccgtagccactgcagcgcccaccatttcccactgaaataccacgatgaagagatagtcaaagatgatgttgctgaacatgttggcaacggaaagataaaatcccaattggggtttctcggcagttatcagtatgctttggaaagcatagcctacaatcataacaggcaggaagaggaaaagggttcgcccgtagggcaggccatattccatgatgctgggggtagcgccgatcagctcgcctatctccggcaggaagatgaaacccaaaactgccaaagcgacaccgatagtgaaagctgtcttgatgagcatggtgaaaatctgccgggcccgttcctctttgccgcgtcccagctccgaagctatgagagcgctgccacctgtgccaaacatatagccgatgacggaaagcatgagctggaaggggtagatgatattgactgccgcgaaagctgtcttgccgatatagtttgacacgaagaagccatcgataatatcgtaggttatggcaatcagtacagtgccaatggtaggcgcggcaaaaagcagtatctttttataggtgaagtgatcagataattttatatccattttctcaccccaagataaatttcacaaaagtttccatatacagattgtggaactttacgatgcggttccgggagaagatattgcctgcccactcaaattcttattcaaggtagcctgagttgtcattgttctccaggaactccagctccagcgttgttcccggagcacggtattcgttgggcaacggcagatagaagggctgcagctcatcaagctcatcagcgttgatgttgagctgatagttcacctccatgggggcctcctggtaggatttgtaattggcaaagaagtagtcgtagctggaatgtgtgattccctccgttacctgtttctttacttcggccagcaggttttccatgctgtctatctgctccatgtgtacccccacaggcagattctttatcagcatgcctacggaattggctgcatatcctcccagacggttgttgaaaatccagttggtcatgatgtgcttttggccggaaaattcgtggagggcctgaatggctgatgctatggcaatcacgcttctggaagcgtgcaggcgctcttctgcctcggccaggtcagtctcgtcaaagggcagcttgatctgccgcgaatctgcctccaggttcaggtccgacttgttgcccttgtctggctcggggatgctgcaccagtcatagccgccgtaggttgagaggaaatatgatttgtcttcctcatactgaggggatgcgcgcagcttttcttccttggccagataagtgcagtagtaatcacggggcaggggctccccgcgataagccctgatgatgtccgacatgaggagccccagggaggagccatccatggccaggtgatgcacatcaaagaacatataaatgtagcggggggatttgaaaagcctcactctgaccagagggtctttgaagatattgaaggggcgtatcagatcctttgagagtctgatgatttccaggtcgctcagatattcatagctgatttcctggagaagttccggggtataagtctgcaccagttcccctgcatcattgaagcttatcttcatggccagggccgggtgattgcgaagggcctcattgacggctttttgcaatttatccgggtctgttttcctggaaaagcggaagaagtaggacatattgttgaacatggtggattggagtttggcaaattgattgtccaccatctctatctgcatgggagataatctatggggctttttccgctccttgtcctcacgctcgtccagggattcatcagaacctcgttctgccaaaagggctgccaggcgttctactgtgcgcagcgaaaatacatcagcgctggaaatgcccttgtccatcagctttgagaccagcaccatgctggagagggagtcgcctcccagctggaagaaatcatcttcgatgctcacggcctccgggtccagatgcagtacctctgcgaaggtgtggcagatatagcgctcggtgtcattgcggggagggacatatttgctctcaccatgggcaggttcaatctggggcagctgcttgcggtcgatcttgccgtttacagtttggggcatcgtttccagctgcagcatggcggtgggaatcatgtaatcaggcagccgtgtcttcatgaaggcaaggagttcttctgtgacagtagctccttcggcagaggcagtgaagtagcctgccaggtaatcagatttgcctgcacgctgcaggacttttaccgcgcaggagtctatggcagggtgttcacccatgactttttctatttcatccagctctatgcggaacccgcgcagcttgatttgattgtcgatgcgcccatggatccttatcttgccatccctggtccaggaggccagatcaccgctgtgatatgccctgtgcccgttgcaggtgaaaaaggccttggcggtgcgttcaggcatattgatatagccccggcccacacaagccccgcagataatgagctcgcctttttcctccaggggcaggaagtctccctgctggtccaccacataaaacttcgtattcaccatggggccgcctacgacgatttctccctctgcttccatgagggcagaggagcagcccatggtacattctgtggggccgtagacattcatgatgacgctatcagggcgcagcgcccgcagcctggtaaaaagcccggcagggaaggcctctgctcccacatcgtaaaaggtcacctgcttcagagcctcccggcattcggggatgttcaggatgctgaggaggaaagtgggggtgcaggttatgccattgacccctgcggactgtatgagctttgacaggagaaatgggtcgtgtatctcatcttcagtggctatgcatacagtgcagccattggagagagggacaaattcttccacaatggaaacgtcaaaggaaaaggcggccatggccagggatacccgtccctcttggacgaagtgcatgatttctatggatttttcatcccgttccatgtagttggcaaaactgtgctgctcaatcataacccccttgggcttgccggtggagccggaggtatagatcacataagccagatcatgggggccaatctctgtagacagcggcgtggtatcggcagaggccaggattttctctatggtgaggagttcaaacttcccctttaggtcagtgcgggcagcttttatcctggcagaggtgatgagcaaaggcgccccggcatcttccaggcagaaagatatcctctcgtcagggtaggaagtgacgaagggcagaaaagctgccccggccttcagtatgccctgctcggcaacataagcccaaactgtacgctccagcaacacccctatgacgatatcacggcaagggctgccaccatgctgctccttcccggcagccagttttctttgcaggaaattggccacgatgttggtctgggcatctaactcactgtaagtcatttcctggttgggggcataaattacagctgtcttatggggatgcttttgtgcctgtgcctgaatccgctgggaaacagagacaaagggaaagttattttcggtttgattgaatttatcctgctccagcagcgcaagcctgctggcttcatttttttccggtctgtccatgagtatcacaccatctttctccggtatcgcttttatgtatcctgctcgtggcagagagttagtaatatgttatattcgcttgtcataggtgttttacctgcaaaagctcctctgagctgttttccatgctaaaaacggcggtaaatgtttcacgtgaaacatttactgccgtttctcagtcatgtatcaaagacgcatcctatatgtaaaaatctcaagcaacttttgcagcttcaatcatcttgaggacatctgcatgggagatgctcttgccattgtaagaatacttgttgtccttggacatgaagccggtgccgagcacgcctacgctcaggtcatgggagatgccaagctggctcaggcccttgcctacagcttcccgcagcagaatgttgaccggaccggccacgccgctcttgtcgttcaaggcgctgtggatctcggctacaacttctccgaagatgccgcccttcttggcgaaggcatctgccagctgattgacttctgtaagagtcccaccggctacgaaatccagttcaaaatcattcagcttcttgttgatcattgcgttcttcattttcatctactcccttcggtggttgtctttgtttgtgtttttgttttctgtctatacatacgcaccggcggggaaagtattacagaatatcttaaaagttttttgaaatgtttccgataggtaggcatcagcattcttgttattgaaacaatacaccattatggtttataataggggtgaggtggagagtatgccaaatgtcttggataaatacaagcctacatatgatctgaattctttcaagcattctgattacggtataaagcagtcggccttgtctggggctgctgctatgggctttgaacgcagggatatcttgcaggcggtagaatccatgcagccgaagcatttctataagtcgatgacttcctataacaatcataggatatggcaggatgtttatcatgttccatataaaggatacatggtgtatataaagtttactcagggaatacttaccgagtttgacttgttgtcctttaaggagaaatgaggtgctgtcatggaagatgtgatgtatgacgttgagacaggagcagaacttaggagggatattcgtccctttaccataacctaccaggggaggagcaggactttcaatatgccaggctggtatcctgcaggggaagagtgtgaggctacttttacgcaggaggatttgaaggtctacgacaaagaaatcaaggtgctcaaagctgaggcggagcatttgcttctgccggaggaaattcgttctatccgcaagcgattgaaactgacccaggttcaagctggaattatcctgggtggtggtaagagggcttttcagaaatacgagaacggcgatgtgctgcccagtagggcgatatcaaaccttttacggttgctgtccgtaaatccggctttgctaggtacattgccgcagtaaggtggctgcgatatattgcattataaaaacggcggtagatgtttcacgtgaaacatttaccgccgttttcgattcgtcaggcaactttttgctgtcttttatttctctatgagtttttctgccagcttaaccgctgccacgccatctttggcgtaggcatcggctccggcactgtcggcgtagtcctgggtaaggcaggcaccgcctaccatgactttggcttttgaacctgcttccctgaggtcggcgatgactttgtcaatctgcaccatggtggtagtcatgagggcgcagagccccacgatatccgcctgtttctccagggcggccttgacgatttcctcactgtccacatcacggcccaggtcgatgagctcgaagccggagttcttgaggagtgctcccacgatattcttgcccaggtcgtggacatcgcctttgacggtggccagcaccacggtgcccttcttcacagtttctgtctccggggcggcttcctgcaaatggttgaaggcttccctcatggtctctgcagagagcagcacctggggcaggaacatgcggcctgcgccgaagtcctcgccgatgtccgtcatggcagcggtgagggctttttccgtgatggtgttggggtcatgtccttcggccagtgccttgtcgatgaggggcaccacttcgtccttctcaccggaaataaccgtctgcttcagagcttccaatacgggcaggtcggtggttttcatggcagctgccgccttgggcacggccagatttgcctcgttctggctgtacttcaggccgcaggggtctttgcccaggagggctgcggcggcagagagggcctcctgcatcttctcgtcatagggattcatgatgggggccgtaaggccggcggccaggcacatggagaagaaagtggcgttgataaggggccggttgggcaggccgaaggaaatattggaaaggcccatggtggtgggcagtccctgggccgtcacctgacgcagggtttcaaagacggagcgggcggccttttcgtcagcggaaagagtcatgaccagggcatcaaccaggaagtctccctccgtcaggccagcctcttttgccttggtgatgatggtatggacgtgggccagcctttcctccacactcttgggcaggcctccgtcggtgaggggcaggcagaggatggcggcgccgtatttcttcgccaggggcaggaatttttccagtcgttccttttccgcagaaactgagttgatgagggctctgcccgggtaggcgcgcagccctgcctcaagagcctccgggtcgctggtgtcgatggccaggggggcatcggtgagctgggcgatttccgtcacggctttcttcatggcggcggtctggtctatgccgcccacccccatgttcacatccagcacctgggccccggccttaacctgacccagagcttctttcttcacggacaggaaggagccttccttgatctctgccgccagcttcttgcggcctgtggggttgatgcgctcgccaatgagcaccgtgggcaggctgctgtcaatgcagactgacttgctgcggctggtgagccagagttttctgggggaggtgtcccttgcaggttcttccttatccttcacagcttcagccagcgccctgatatgctccggggtggtgccgcagcagcccccgagataagtggcgcccgctgctaagagcttcggtccccaggtgccgaagtccttgggccccatggggaacttggtctccccgttttccaggtagggcatgcctgcgttgggctggacgctgatgggcacccggcagttggctgccagagttttaaccacaggcaggagctgctccggtcccagggagcagttgacaccgatgacatctgctcccagcgcttccagcaggatggcagcgctctgagggtcggtgcctgtcacggtgcgcccgtcctcgctgtaggagaactggcagattttcgtcagggcaggggccgcttcatgggcagccaaaagagctgccctcatttcctgcaagtcgatgcaggtctcgataatcagggcatctgcaccaccctcggccagagctttggcctgagcaagatagttctgataggcttcctcgaagtccaaatctcccagaggggcgataaagcggccaatggggcccatggagccaactactttagcctgcacgccagcttctgcaatggcctctttggccaccgccacggcagccttgttcagctcagccatgcggtccgtgagcccatagtgggccagcttcaaagggctggctccgaaggtatttgtctcgatatggtcagccccggccttgagataggccagatgcacgcttttcacaacatcgggggcctctacgttcatcagctccggtgctgctcccggcttcagtccccctgcctgcagcatggtgcccatggccccgtcaaaaatatgtatcataaataatcacttcctgtatcaataaattgtaaagatgtaactattgtacttcaataacggggaaaagtacataaatttatcttcctataaaatattcattaggcttttgaatatggattagaaaaatcagaaaaacttgacatatatgacatcggtgctataatgaagctgtaggaacttattgcaccatagcgaggaacattaggttactacaataaggtctagcctatggctagtaccgcaaagctctgacggctcgccttttggcgggccgtcatctttataatggcatatattagtaatggcaaatttgcttggatgatacagtaggatagaatttctgaaatgacatggcaaaggagtgggagtatggatttgcgctatgtgttaggtctggacatagggatagcttccgtgggctgggcggtactggctcttgacgataatgatgagccgtacaaaatagtggcgcttaattccaggatctttgaaaaggcagagaatcctaaagatggttcttcattggctgcgccacggcgcgaagccagaagcatgaggcgcaggctccgtcgccgtcggcataggagtgagcgtgtacgccatctgttggtaagagaaggcgttttgtctgtggaggaagcaaagtccttgtgttcctcagctattccgaaaaattttgtgcgtggcaaggggttgcacgccttgcgctatgaagggctggacaggaaactttcacctgtggagtggagcagggtgttgctatactttgccaagcatcgtggcttcaaatccaatagaaagaatgagcctgctgataaggaagaagggcgtgttcttcagtccattgccgccaatatggaactgctgtcaaagtatcgcagcgcaggtgaaatgctctacttggatgaaagattcaagattaggaagcgcaatgcttctgatgactataaaatgaccatcagccgtgatatgctgctgatggaaatcaaaactctatttgcaagccagagaaatcatggcaatccctatgcaggtgatgaattggaggaggcttatacgagcatcttcctgtctcagcgcaactttgacgaaggccccggcgaagggagtccctatgcgggcaatcagatagagaagatgatagggacgtgtactctggaagggaaagatgaacttcgggctcctaaggccagctattccttcatgcggttcaatctcctgcagaaactgagccatatccgcatccgtggcaaggcgggggagagagcactgacggaagaagaaataaaaaggctggaggccctggcctggtcaaatgccagcctgaactacggacatttcagaaaagaactgggactggctgatacggacaggtttgcagatgtgtactaccatacggaagattttgtgcaggaggaaaagaagaacaaaatcaaaatcacagcagcttaccatgaaatagtcaaagctttgaaggataaaggcaaggaatatacagccacattatcaatagatcaacttgatgcgatagcatacgcattttctgcctataagagtgacagcaaaataagggattatatgcaggcaaaggggatattgtcagaagatgttgaacttttgttgacaaacctgtctggttttagcaagtttggtcatatttccatcaaggcttgcaggaaacttattccttatttggagaagggcatggcatatacaaaagcctgtgaagctgcaggttataaagacgagtcagttcaaaaaggagaaactttgccaggcaatatcaaggaagtaaaaaatataacaaatccggttgtaaagagagcggtcagccagactattaaggttataaacgccatagtgggtgagtatggcagcccggtggaaattcatatcgagttagcgcgtgaaatggcacgaagtaaaaaagaccgggatgcgatgacttccagtatggaaaaaaataaagccgagaatgagaagataaaaaaggatctgatggaaaaaggcttgctttccccaaaagggttggacattataaagtggaagctttataaagagcagaagggagaatgtgcctatagtcagaaaaccattaaggtggagaggcttcttcatgaggagggatatgcagaggttgaccacatcctgccttacagtcggtcctttgatgatagcttccgcaataaggtgctggtgctgacaggagaaaatcgcaagaagggcaatcggacgcctatggaatattttgccgatatgccagagcggaagcatgcatttgtgacatggtgcaaggtgaatatccgtgatttcaagaagcgtgagcacttattaaaggaaaactatgaccgtgaagatgtgggctggaaggacaggcatttgaatgataccagatacataaccaaactggtcaagaatattatagagaactatctactgatggctccctttaagaccaatcgtaagaagaatgtggtagcagtcaatggtgcagtcacgtcctatgtgcggaaaaggttgggcattgcaaaaatccgtgaggatggcgatttgcatcacgccgttgatgctgcggtgattgcctgtgtcacggacgggatgataaaccgtatcagcagatatagtaagcgcagggaaatcctctataacaataagctggtggatgaagaaacaggagaaattatcaaggaaagggaagtctttcctgaaccttggccctggttccgcaaggaacttgaagccagaaccagcaagaatcctgcctttttcatacgggaaatgaaattgccgacatatacagaagcggaattggaaaaactgcatgaaccatttgtatcaaggatgccatgccacaaagtgcgcggggcaggacacaaggaaactatccgtagtccccgcttgcgtgaggaagggaggtctgtgacgaagaaattacttacggaattgaagctcacgaaagacaaaagaaagatagaggggtatgtcaatcctgagagtgacaggctgctatatgaggctctttatgaacgactttgtatgtttgatggtaatgctaaagaggcgttctcagaaccattttataagccaaaagccgatggaggacaaggaccattggtaaaaaaggtgaagatatcagaagtatctaccttgagtgttcctgtgaataatggtaaggggatggcggatagtgaccgtatgctaagagtagatgtattttatatctcagaaggaaagaaaaaggggtattatttggtgcctatatatgtggcggatactctgaaatctgttttacctaaaaaggcagtaaaagcacataaatcttatgaagagtgggatgaaatgaaagctgaggattttgttttttctctgtatcctaatgatttagtctatattgaacataaaagtggattcaagttgaagttaattaacaagaaaagcaccttacagaatgaaatgtatagaaaggatggatatttttattattgttcgatgaatatatcaacaggggttttaaaccttgaaaattttgatggaacttatcaagtggaaagtttaggtgcaaagacattgatttgtttgcgtaaaggagaaattgatactctgggaaataccaggcttttagagaaagaagaacgtcaggattttaggcagatgaaaaaggacagatacaagaaagtgtgattgaatatgtatcgacaagtgatagtacaaagggaggcaaggatatatcaaaaggaaaaccagttaatcatagaaaatgaaacagcttacaaaatacctatagaggatatagacactctggtcattgccaatcgcagggtcaatatctctgcctattgtctggatagtttggtggcaaatggcagttcggtggtaatttgcggaaagaattatcatcctgcgggcatagtcctgccttttgctggatattcccgtagactgaagatgattcgtgtccagattgatcagcccaagccacgattgaagcaactttggcgtacgatagtacagcagaagatattgaatcaagggaaatgcttacagttggcgggagcaaaagatgtagtaagtgcattggctgaaaaggtgcgctccggggataaggggaatgtggaaggttgggctgcggctagatattttcctgccctgtttggcgatggatttgaacgtcacgaggaagatttcctgaatggcgtgctgaattttggctatgctatcatgcgcagctccctggccaggtttttggcggcatacggctttgagccaagcttgggtatttttcaccgcagtgagacaaatgccttcaatcttgcagatgaccttttggagccatttcgtccggtagtggatttgtatgcgagcacctgtgaaattccagctatggaagaattgactcccaccataaaaaaggatttggttggtttgctatcagctgatgttctgtatggaaaggagagggtgagcgtggactatgcagcagagcaggtagtgcaaaatttgcgaaggtgctatttggagccggaggagcagcttcagctgccgcagctgctacctctgcaaatgcacaagtatgagtaggtttatgcggttgttggttatgtttgatttgcctgtagtgagcagtgaagatcgtaaggcggcagctgaattccgaaggttcctgctcaatgatgggtattacatgatgcagtattcggtctatgtaagaatttgcaacggctatgaagcggcgcagaaacatatcggtaggctcaagcagaaattgccggagcatggttctgtgcgtgcattgacggtgacagagaagcagtttatgtctatgcagatattatgtggacaacggcaccaagattttgataaaaatcatcaggagcagatggttttagacttgtgaagaatattttacagcaaaatcccccttgataaagctaacgctatcaagggggattttgtattgagattgtaccatagcgaggaatattagggaactacaacnnnnnnnnnnnnnnnnnnnnnnnnnnnnnnnnnnnnnnnnnnnnnnnnnnnnnnnnnnnnnnnnnnnnnnnnnnnnnnnnnnnnnnnnnnnnnnnnnnnnnnnnnnnnnnnnnnnnnnnnnnnnnnnnnnnnnnnnnnnnnnnnnnnnnnnnnnnnnnnnnnnnnnnnnnnnnnnnnnnnnnnnnnnnnnnnnnnnnnnnnnnnnnnnnnnnnnnnnnnnnnnnnnnnnnnnnnnnnnnnnnnnnnnnnnnnnnnnnnnnnnnnnnnnnnnnnnnnnnnnnnnnnnnnnnnnnnnnnnnnnnnnnnnnnnnnnnnnnnnnnnnnnnnnnnnnnnnnnnnnnnnnnnnnnnnnnnnnnnnnnnnnnnnnnnnnnnnnnnnnnnnnnnnnnnnnnnnnnnnnnnnnnnnnnnnnnnnnnnnnnnnnnnnnnnnnnnnnnnnnnnnnnnnnnnnnnnnnnnnnnnnnnnnnnnnnnnnnnnnnnnnnnnnnnnnnnnnnnnnnnnnnnnnnnnnnnnnnnnnnnnnnnnnnnnnnnnnnnnnnnnnnnnnnnnnnnnnnnnnnnnnnnnnnnnnnnnnnnnnnnnnnnnnnnnnnnnnnnnnnnnnnnnnnnnnnnnnnnnnnnnnnnnnnnnnnnnnnnnnnnnnnnnnnnnnnnnnnnnnnnnnnnnnnnnnnnnnnnnnnnnnnnnnnnnnnnnnnnnnnnnnnnnnnnnnnnnnnnnnnnnnnnnnnnnnnnnnnnnnnnnnnnnnnnnnnnnnnnnnnnnnnnnnnnnnnnnnnnnnnnnnnnnnnnnnnnnnnnnnnnnnnnnnnnnnnnnnnnnnnnnnnnnnnnnnnnnnnnnnngtgtattgtaccatagcgaggaatattagggaaccacaactgaatccttctaatagtattcttatgtggaagtgttattatatgttcgtatttttaataattgacaaggaatggaaaggagagcgttatgggggattttggcaaatatgcttgccctgaatgtggcagtgaaaatacgatggctatgtctatggtttataaacatggccatgcctacaggaaatctgataggaaatactgctctgggcataaggttgatgagaacggcaggaaggttcctgtctttgaaaatgtgacatacggggtctatatggaatctgatttggcggcagagtcggcgcctcctgagaagccggaagtgcccaaggaggagaaaacaggctgcctgatgggtggcatgattttcctgacggcggcaggaattgcagtagaactgaccgctgatatagctgctcttttaggctgggagggaagtttcaaggctgtgatgcaggtttttggtacatggtgtgccactgcatgtgccattggctggcttatggataaagtctggagttatatcagcggcaaaaagtttaggtatgccagagcaaaggagcagtataaaactgatatggatagataccatgaggagtatgattattggacacatatgtatgtgtgtatgcgttgtggcaacaaatattatatgggagaggattttgaagaggctgatgctgtttgagttcgcagaaagacattgatattagaaacttgctcagagagaatcgggcagaatttgaaaagatttcagcaatagcatgaatgaatgggttgccgcacatcaagcaaatgtgcagcaacccatttttcgatatgtttcacgtgaaacatcatctcttcctgctggggcagtccttttggccacagctttggcagccttgtttgccaacggcatcgctgacctgctcagggcggtatagtccgatgatggcggtgacgcttttgcggggggagagcatcatgctttccgtgagggtgatgcctatttctgccgcacaggtcaggggcatgaactcctgctgggcttccaggggccagtcaccatagccgggggagaaccgccagcggctggcaaagccttgggctttgatcttgggggagagcattttctccagggcattggctgcttcctccactgcctccgtggcggcggcatccagcagcacggagtgggcgtagcgtccttcgtcgaagtgctgggtgatggcttctactatatcgggaccgatggtggcagagatggccagcaccttttcgcagccggccagatgtttcttgatggacttgcccgtgagggcaagttccacatctgccttgataacgcctcgctggcagtcgtagtcatagacggcataggcacttctgggggagatgagcagcagggcttcctgggctgcttcctctatcatcttctcatcgaaatccgccctggcaagacctgcatagcggcgcacttcggacaggtccagttctttcaggctggcattgtagatgggcataggcatcctcctttgcaattctgtggcaggttatgtctcttagtataccacttctgccagttgatgatatcgttctttttaggcaagcttaggtgagccgcccgccgttataaggcaattgttccagttttgccgaaggcaaaacttcctcttggcctttcaacgaggcgggagatattaactcgccgcctgttagtaagttaccgcccccacttatagaagtgggggacatcttgtactcgttatagattttattacccgctcctttcctaagtcaggcctcattatcttcttggcaggaaaaaacacactgcaaggcgaagataactgaagaacaaatcattctggaaaggaaggggattgctatgaaacgccttattatcctgctgactcttttggcctggtgtctgggcactgtcatcgcagctgccgcaggcaatatcataggcagtgtctatcctgcgcgttttgaggatggcagtcagttgcgcgtggccaggggggaaggcagcggaggtctgatgtgggatgtcagcgcccccaagcacggcaagaaatctgccgcgccagagatttggctgattcggagcgacataaattttgacgccattccctatgctgccgttcagagatggtatcaggaagggatcattcctgaaaaccaacccctctactacactaaggccgatgaaaaaggtcatttcgcctttgagaatatccccccggctgtctattatgtcctgattcttgatcccaaagggaaagaagcttcacagacactggccgagagaagcaaccgggaagagttgtgggcaaaactgccaaatgtgactgaatttgagtttttcacagtgggcaccaagacctgcctggtggaaaaagtcaccctgcaagagggacacaccgtcaaaatacgcccggggataatttgaaaaatgattaaacgggggaatgtttcacgtgaaacattcccccgttttttactctggtatcaggatggctgctatggttcccaccaacatgaagaaggagaccccgaggatgaagaggatggggccacaggctgccagttccttgaattccttgaggcgggtgaagaaggagacgttcctgtcctggtctgattttacccgttccagcttgccgtccgggaagacgcggtggaggatggggtggttgtagaccctgatgcggcctacagccacccagaaaatcaggctggcgggcacggagagaaccagccagacggcgaggtagctgtagtctgccgtcccctcaatatccagcggaaaggccaggatggcaggcaggaagttgaagaccagcagcaggagcaaagtcttgaagatgcgccccggggggtagaaggcaatctttaccggcactgtctcgccgttcactggctcggtgaagacggcctggggggtggtatcttctatggtgttttctccttctgtcactgtgagcttgctctggacgcgctcggcccggctctttttggtcttgaagatcacccgccgccattcttcgccccgtccatcgctgaaggcagtgaagaagatcaggccgaagaccaccatggacatgagtcccacgtatggctcccaaagggccagcaggccgccgaccagcagggtcagcaaggtgggctcaatgagccaggacaggactttttcctccttctccctggagacagccacccgtcctgtctggccattcaccactgccagtacagggcctaaagagaggacatagacaggcagcagggcaggcagccgcaggatattgcctgcctgcatacgcatgatgatgcctgtagtctgcagctctttctctgcttcgggacggaagcctgcctccacttcctccagtaccctcttcttcagggctttggcaccgatatccgagagcttcaccctttggccagccaggaaggaaaattcaaaggggcgggaggcggtccattcaaagggctccatggcatcaagcaccagattgtccagctgtttagaagtattcacggcgatgccgttcaggaagcctccgcagtggtacttctgtcggagaaggtctccatgcgctctacttcggcagtgaccggtccgcggattagctcgtaggggaggtagtagcccctgagtttatcaatggcactgagcactgtccgtgcttctttttccttctgattggcattggcccattcctgcagcctttccctggcctcttcctctgtcagcacgaaaggaatgatgacttccggcagctcatctgactgggcaaactcccggcgtacaaatttgccgccgcagaactcgcagttcccagtggcctccccggcgggtatcatgacctctgccccgcagttggagcaaacgtgcaagccctcggcagagttttcttccgcgaaaaagctcttccgatgggcatcccgccactgtcccagcttttgtaccggttccctgatatctgtccgggccccgcaatatttgcagtggtagtcctgcttcacaatgtcgtagacggcaggcgccccgcaggaggtgcagtaaatggctaagggatggttgtttttatgcatgcttccatcacttccttacagaaaaatacagaaacttttcggcaggttttctcttgaactcacttcgtcaaagttttgggtattcctgcctggcaagtgagaccggggggaggaatggagggttttatgtagaatagaggagtgtgacacaattctggaaggaggttttttcatgaacaacagatatataaaaaaaatgacgggagctgctttggctgctagcctgctggtaggcggcggtggattcctgccccagggagttatgcctctgcctgtcagctgtgtggcggtggcagaggctgcggcggtgaatccggcggatgcttctggttttgtggtgctggcagacgtggtgccggatgtgatacaggaaatccgctactactccacctataatttcgtaggggacaggattcgcggctatgaggagcccgtggccctgatgaccaaagaagcggcctttgccctgaaggatgtggcagatgagcttagggaaaaaggatatcgcttgaagatcttcgacgcttaccgtccccagatggccgtggaccatttcaaagcctgggcggaaaacctgaaagatacccgcatgaaggagtatttttatcctgacctcaataaggatgtgctctttgagcagggctatatcgctgcctactccggccatagccggggcagcacggtggacctgacccttttcgatatgaataccgaaaaagaagtggatatgggcggtaccttcgactacttcggcgagcgatcccacccggacttcaagggggacctgactcccgagcagctgaagaaccgccgcatcctgcagcaggctatgttccgtcatggtttcaaaggccttgatacggaatggtggcatttcaccctgcgcaatgaaccatatcctgacacttatttcaccttccccagcggcaaggcttctgtgcaggaggctgtggaagttgtctacagtcctgcctgggtggcgaagctgcctgccgcctccactgccaaacagatggtagtagtgggaggcgtagcccctcagtctgcctggatttctatgcatgagaaagacagtgacggcaactgggtgcaagtgctttccactcccggtttcattggcagggagggcctgggcaagacaaaagagggggatgccaagacccctgtgggcacttaccacttcaccaaggctttcggcattgagaaagacccgggatgcaagctgccttatacccaggtagatgataatatctactggtcaggggacagccgccctggcatgcactacaacgagatggtggacatccgcaagctgcccaatctgaacaaagaagacagcgagcatattgtggactacaatccccactacctctactgcctgaatatcagctacaatgaggaaggaaagcttggtgcaggctctgccatcttcatgcactgcttcggcgtgaacaagccctacacaggaggatgtgtctctctgccggtagacaagatgcgggcccttatgcagagggtaaaacctgactgcgtggtagtgattgacactttggagaatctgggcgggaagttctaaggaccaaactgacaagcgaaatgaaggcagccctgcaaatgtttcacgtgaaacatttgcagggctgctgtgcatcttcctgccggttgttgcagatgggaatagatggtaaaattgtatttagctagattgtgtagattataaaggagagtttatcatggaaaatacgaccgagagagccgaactggcagcagaattaaagaaaaagcataactgcgctcaggcagtgatgatggccttcaaggatgagatcggcatgagcgaggaggacctgctgtccctgggctccggcttcggcagcggcatgggaggcatggaggccacctgcggagctctctgcggtgctgccatgaccattggctggctgaacaagagcggccaacccaccaagatgatgactaaggaaatgctcacggagttcaaggaacaggccggcgccaccatctgcaaagagctcaagggcgtgggcacaggcaagatgctctgttcctgcgatgattgcgtgaggattgccactatggcggtggagaagcgactgtaagtttctttcataaactgatgttagaatgaatgttgtgctgaattgctcactgtggccaatagtatttttctttcacttgagacctgtggaaatggggtattgatttgcataaaagattattaggagcgttgacggctttttgcctgggggctatgaccatgatgccggcggcttcggcggctgaggtgaacgtcaaggggccgggggctgggaagaagattgtctacattcccatcgacaaccgtcccgtgaatgacagccagacggtggaggtggcggaaaaacttgggtataaggtgctggtgccgcccaaggagatgctggggggcatcaaggattacgggcacccggaagagctgctgaaatggctggaggaaaactctccgggggcgcaggcggcggtggtgtctactgatgccatgctctatggcagtctggtgggctcccgcaagcatgacctcaccgcagagaaaatcatggagcgggcggaggccttgaagacttttcatgagaatcataagcgtctgcccctctatgctttcggtacaattatgaggacaccacggggcgcggcttattccagcgaggagccggcttattacaagacccacggtgaccagattttcgcctacaccgccctgttggataaggaagaaatgcaggggctttcccgcaaggacaagaagcagctggcgcagctcaaggctgagattcccgctgagtacctggatgactggctccagcgccgggccaggaattacgatgccaatgagcgtttcatgaccatggctgaggctggtgtgttcaactatttcctgctgggctgcgatgacagcgccgtgccctcccagacccatcgtgagagccgtcatctggaagaattgggggagaccttgggcaagacacgctccgtggtcacctccggggcagatgagctgggcatgctgatggtatcccgggctatccatgataatctccgggatgtgccctttgtctatgcggagtatgccaagggcaagggggctgagactatccccacctataccaatgaaaaaatcggcgattctgtggaaaaggccattgcggccctggggggcatacccgtaaatgatcccaaacgggccgacctggtactgctggtcagcaccaatccagacggcaagacctcagaggccaactttcctgtgaatacgacgaaattccgcaaggggaccaaagactttgtcaaaaaggtaaatgactatgtgcagaaggggtatcccgtggccgtggcagatattgcctatggcaatggcgctgataatgccctgctggaaggcctcaggaaggacggcctgcagttccgcctgcagggctatggcggctggaacaccgccaccaacagcagcggcttccttttgggagctgcttctctggcgaataagatgagcaaggacgatgtagctgacctgctctttacccgttatgtggatgactgggcttaccaggctaatgtccgccagcaggtggccaatatgctgggcggctggccgggtgaagggggctatggcaagctggatgcgaaactggaacctgcccgggaaaagactgctgccctgctgaaggatttc

SEQ ID NO: 2801 - DNA, 23297 bp, synthetic construct
  variation 14583..15408: note = n is a, c, g, or t
  source 1..23297: mol_type = other DNA
  misc_feature 1..23297: note = Synthetic
atcggcggccttctgctgcagggtatccgcgtagctgttccggctgctgtcgttgctgctgttgctggtactgatactgttaacgctatgctggcatccattcctgaagttatcacccgcggcctgcaggtttccggtggtttcatcgtagttgtaggttatgcaatggttatcaacatgatgaacgccaagtccctcatgccgtacttcttcctcggtttcctcatcgctgtgttcaccaacgtcaacctcatcggtttcggtgctatcggtcttatcgctgcttacttccacatccgtggcctgcagcgtgaactgaatggcgcagctgctggcggctctggtgacccgctcgacagcattgacgattctgatttgatgtaaggggaggttcgactcatggaaaaacagctcactaaaggcgatctcgtatcgatttttatccgttccaacttcctgctcggctccttcaacttcgagcgtatgcaggctatcggtttctgcgtgtccctgattccggcactgaagaaactttacaaagatgatcctgaagaatataagcgttctctgaaacgtcacctcgaattcttcaacactcagccgttcctggcaactccgattatgggtatcattgccgctatggaagaaaagaaggctaacggcgccgatatcggtgaggacactctctccggcgttaaggtaggtcttatcggtcctctggctggtgttggtgacccgattttctggggtacgctccgtccggtactcgcagctctcggcgctggtgttgccctgactggcagcatcgttggcccgctgattttcttcatcgctttcaacgtaattcgcctcctgaccaactggtacggcgtaatgtacggttatgacaaaggtacggaactcgttaacgaagttggcggcaaccgtatgcgttacctcacggaaggttcttccgtactcggtctgctcgtaatgggtgccctcgttgctaaatggaccacggtcaacatgcctctggtactgtcctcctatacgaacagccagggtgagcaggttgttaccacggttcagagcctgctcgacagcctgatgcctggcatcgtgcccatgctcatgactttcgcctgcatgtacctgctgaagaagggtgttaatccgctgattatcatcctgggcctcttcgcccttggcattgctggctacgctgttggtcttttcgcctaagataagtccagtagtagtctacatacacattccattatatcattcccaaaagccccacacagtcgatgctgtgtggggcttttaggtgtaaaaaggtatgaagttacgttcaaatccacatatgccggaggcacagggcaatgaaacaaacaatggatatgccaaaggtaaaatactctacgcatttgaccggataggcatagtgcagcggtatgtccagtacccggggcacattgctggccagcagcgatgacgctatagatacgtaaagcagcacgttgataatcggcagcgtcaaatgggtagagaaggccctaatcaggaggtacaccgcaaaggcgatgaagaaataggcgattttgtcgccgtgcagtttcatgttcataatatcacatccttgtaataacttgcagaaacgtttccgtatattagttgtttatttcattcgtgatggagaggtgattttcctgcttgggcaggatttttatctgtatacagcgaaatttacgtttggtaattatgctaagcgttgaaagttacaaatttaacttgaaaaatagataatatatgttaaaatgtaaagcatatctgattgctaggttttatatttatcattattttatgtaggaaagaaggaattattatggcagatgaaaacaagtccgtggcagaggccagggaggcggccttgaaggcgcataatcccggggccaccagaaaacagctggtgctgtggttcggcgccttgcttgtcggcggctttctcggtttcctggagatagcaccgctcaatgagctctttaactttattgctacagtctttacccggctcttccagtttatcgctgtacccaccattgccctggcggtgattaccactttggcagccttgggcggcaaaaaggagacagggcggattttcgcccatgctgtcagctacacctttttgaccacgtttgcggcagcggctgtgggcctgctgctctacattgtcgtagcaccgggcaacctgccggcggaagtcgtgggcgctggtgccagcaatgtacctttggataaggtgggcaagctgacttattatgaccatatcctgtcggtcattcccaacaatgttctgcagcccttcctggccggtaatgtgctgtcggtaatgctgattgcggcgtctgttggcctggggctggcttttatgcccaagacggaaaaccgcgaagtgctgttaaagggcctgcagggcttgcaggaattgctctttacgctgataagggctatcctctgggctttgccgcttggtattctggcctttgccggccagctgtcggcacagattgaggccggcgtaatcgtcggtgctttaagccagtatgtgctggtggtcatgggcggtaatctcattcagatggtagttgtcctgccgctgttcatgctgctgcgcggccttaatccgctcacggtgttccgcaaaatgtcgccggctttggctgtagccctctttaccaagagctcggccggtaccctgcccgtgacactggcgtcggcggaaaacaatcttaaagtgaatcccaaggtttcccggtttgtactgccgatttgcaccactatcaatatgaatggctgtgcggcctttatccttgtgacgtctttgtttgtcatgcagaatgccggatttgaactgacgctggggacgatgattgcctgggtattcattgctgtgctggcggccgtgggcaatgccggcgtgccgatgggctgctacttcctgacgttgtcgctcatgagttctttgggagcgcccattggcctgatgggagttatcttgccaatttatactataattgatatgattgaaacagcggaaaatgtttggtccgatgccagcgtctgcgccatgactgaccacgacctggcaggcaagctggaggattcgccggcagcggccaaagctgtatcataaggagtataaattgaaaaggctaagaggtttttgtctgatggtgcttttctgtgcagccctctgttcttggggctgcggtgcggataagccggtgcaaaaaagcgatatggtcatggacacggtggtgacactgtcggccagcggcgcggaggccgaggcggcagtgacggagggcatggcccggctccacgagttggagaaaatggtcagccccaatctgccggccagtgatgtgagccggctggagcaaatggccggctccggccattgggtggtgctccacccggaggtatatcacctgctggcggtcgctcaggattacgcagccaaaaccaatggcgcctttgatataacagccaaacctcttgttgacctgtgggggattggcactgaccacagccgggtgccggcgccggccgagattgccaaagcgcaaaaactcgtgggctggcaaaaactggagcttaatgaaaagacgcacagcgcccgtttgctggaggccggaatgggggtggacgccggcggtatagccaagggcatggcggccgatgaagtgcggaaaatctaccgcaaacatgggataaaaaacggcctgataaatctgggcggcagctccatgtatgctctcggggtaaataatgaggacaagccctggcggataggcctgcggcacccccgtaaggacgatgccaaggaaaaaatcgctgtgctgcccttgtcagatgaggcgttatctacctcgggcgattatgaacgtttttttgaaagcggcgggcagcggtatcatcatattatcgacccgcggctgggacgtccggctccgtccggactgatgagtgtgaccattacggcggcggataagctggaggacgccggcatgcttacggatctgttgaccacgacggtgtttgtgctggggccggagcagggcacgagattcctgcgtaccctgccggccggtatcagcggtgcgcttgtggataagcgctatcagttatggacaactcacgacatggcccagcggctggaggaagtgtccaaggaattgcaattttggcaggaaagtggagaactgcaatgatgaaaaaagaattacaggcgaaagttgctaaattacaattactgctcaaaagctatggttcggctgccatagctttttccgcaggcgtggattcaacggtgctgctaaaggcggccaaggaggttttaggacctgagcaggtactggcgctgaccgtgcaaagtgtgctggtgccggtagaagaagtagctgaggccaaggctttttgtcaggctgagggcttgcggcacacagtgctgacacttgacccgctgctttactatgatgtacgcacgaatccgccggaacgctgttatttttgcaagcggctggtaattgataaactgcgggaggcagctgcccgggaaaatatcgcccatttgctggacgggacgaatgccagcgatgggcaggattatcgccccggcagccaggccctgcgtgaactgcgggttatcagccccctgcaggaggccggtatggataaggccgatatcagagcctatgcccgggaactgggactggctgtggcggacaagccttcggcagcctgcctggcctcacgtatcccctatggggaggaattgtcggccgcgaaactgcagcggattgaccaggcagaaaccttcctgcgtacggagggctttgtgcagttacgggtgcgcagccatgaaaatatagcccggatagaattactgccggcagatatggccaggtttatggcgtcaggactgtatgaaaagaccgtcagcaaattcaaggaactgggctttgcttatgtgacgctggatttgcagggctatcgcatgggcagcctcaatgaaacattgaaaggaaaatgacatgtcaaagtcgaatctcaccacgttgtgctatatcgaaaaagaaggcaagtatctgatgatgcaccgggtgaagaaggaacatgatatcaataaggataaatgggtggggattggcggtcactttgaaggtgacgaatccccggaggagtgcctgctgcgcgaggcccgggaggaaaccggccttaaacttacggattaccgccagcgcgggattatcacctttatttcggacaagtggcagacggaatacatgttcctgtataccgccacaggttatgaggggaaaatcggtgattgcaacgagggcgtgctggagtggattgacaaggataaagtctatgacctgcccctgtgggagggggataaaatcttcttccgccttatggctgccgaacggccgcatttttcgctgaaactgcggtatgtgggcgaagaactggtggaggctgtgctggacggcaaggacataattaactaaaaagaacgcccgtgacggggtaatatttttccttcgggaaaaacatcactccatcacgggctgttttttatatgtttctattttctaactctggccggaattacgccgagcccggcgcagagggcgaaaataagcagggcaatttccagattttgcagcagggccgcctgtggggcaaggccgtgccaggatagggagaggattaagttcatcatggcgacactgagcacctggccgaataatcttgtggtgctgagcaggctggtggccagaccgtagtgctgtttttccacggaactcatgatggcgttgttgttgggggcggcgaacagggcaaagcctgtgccggtaatcatcagcatgggaatgagcagatagagggagagggtatggacggtcagggcaaagccgataaggccggcggtgatgacagattgtcccagggctgccagtttggtgggggcgtacttatcggacagccgccccatgataggtgacagcgcggccatgaggacgggctgggccagcagaataattccggcactgtgcgatgttagtcccagaatggcctgcaggtacagggagagcagcaggctggtggcaaaggtggcacagtagttgagcagtgccgccaggcaggacagggaaaaaggccggttgctgaacagcaggtttacgggcagcaagggattttctgtacgtagttcatagcgcaggaatacaccaaacagcagcaggccgccagttaacagcaagggggcggccggctgactgagcagctgggacaagccgtaaataatgagcatgatggcgccaccgtacaggagggcgccttttttgtcccagtccggactgctgtcggcgtaccattcgtcctgcaaggtatgacgggcggtgccaaaggcgagtgcaccgaggatggtcagcaggatgaaaatactttgccagccgtaataatggttgagaaaaccgccgacagccggccctaaggtgagtcctgtatataccacggccacattccagcccatagcccagccccggcgttctttgggaatcaccaaggtcagaatggacatggaagtggcaaaggtcatggccgagcccagaccttgcgcggcccgggcggcaatcagccagggcagactcggggcgaagatggccaaaaaggaggtcagggcaaaaattccgttgcccatgatgaaaaaacgccgcttgccatagcggtctgccagtttgccaaagggcagcaggacaacgatggcggccagtaaaaaactgcccagcacccagcccaaagctgccggacttgccccatattccgcgcccagcgaaggcaatgccagatttaaggcactgccggtgaaaggcgtaaggaaggaggtaagcatgatggtaaaaagtattctatattccatggcgatggctcctatgtttacgtttttctaagtatactattgatattagtttgacaaaagagtaaaatacccttttgttacatgatataactgcaaaagagatgataaaattgaaaagacatgaaggattaaatcgcacctttatagaacaaattaagaagtaagttggagaaaggaagtgaatagattatgagaacaacaagaaaggccagaaagcggctcagaaataaaagcagctgccaggctaccagatgtattatggcagcacttatatctataggcggagggcaagggattttgcctgcggcggctgtggcgcaggagactacgatagatgaagatacttacagtaatgacattgtttacggaaatcatactggcacgactcctacaaatcatgatggaaatgccagtaacaacagcattaccatagcagaaggtcactctgttaaacaagtatatggtggacaaagcacagacggccaaaacgccgactacaataccgtaacggttgcaggggaggctcctgatgacgtttatggtattgcagcaggcggtaaaacaaattataacggcagcgctaatcataaccgtgttactattaaatcaacaggcaatgttggagaatatgtgtatggtggctggacagagcgtggccctgccaagcataacatcgtcgaaatagaaggaactgaaatatcacaaggattagtaagccacgaagtttacggtggccacagcgaaagtggcgatgttgaagagaacaaggtcataatcaatggttttgttaacggcaaggtcacggctggatattctgctacctacaaggcaataaacaataccgccatactaaacagcaacggaaatgttgccaatatcgctggcggaggcagcacttcaggcacagttgagctgaacaataccattataaatggcggctcaacctttatgacttcaggtggttataacgcaaacggaactgtgaagaaaaatacactgaccatcaaaggcggcgtaattgtagatggcgcctacggcggttttatcgaacctactgccaccaacaagggcaatgcctatgacaatatcgtcaatatttctggcggcactatctataccacggtagcaggcggacaaactagaagtggcgatgcctacaataataccgtcaatattcatggcggcactctcggcgatgatatctgggggctcgctatggtcgcagggggaatcgctgacggcggcaatgccaccggcaacactgtcaacctctacacattaaaggacaacatcaacggaagcatttatggcggcaaagcaggcgcgggcaaaacttccgcagacaacaccgtcaacttcctcggcactgccattctccccaacgccacccttgaaggtgacaccatccagaacctcaatgtctacacaaaaggcaactatgtcaaatccataaccggcaatataaagaatatgaatttttatcttcctgccggaacaagtaacggggacactatgctcactgttgacggaggaacgggaacaaatctggataataccactattacctggactccgcaggcagaatttaatatgaatgtgggagataaagttacgcttatacgtgatgcggcaggtctttctaccaatggcacggtgctgccggaggcggaaaaatatacggtaactacaggtatatccacggatagtatttattcttataatacattgagagagggaacacaggccattgttgttacgtttacagccgaacccgttgttcatgaaagtaccctgccggagcgtactaagtcgcttacggaaaccagtacggctgtgacggctttgcttaatggcggttctgattttttgacggcgcatggtatggaggaggccgaggcggtagcccttgacccggaaatatccgttgtctatggccgcctggttccttttgtggccattggcggcggttcgttggaattagacaccggttcgtccacggacctcaaagccttctatgctaatctggggctgaccaaggaaatcaaaaaccgtaacggcagtttgtttgtagggccgattttagaatatggccggggcaattatgacagctatctggacaacggcgttcatggctggggcaccggacactatgttggtgccggtggatttgcccgtcagcggaatcatgacggcttatactatgaaggcgatttgcggttcggccggtttagttccgattacaggggcgatttggcctccggccttactgctgattatgaccttggcggcagctacattgccggtcatttgggcctgggcaaaatctataaagttaatcccacggacacggttgacgcctacataaaatatttctacagccgtaccagtggtgacgaggtaactgtccatagcaatttgaacaacgaggtttataatttcaacagcgtggacagccatcgcctgcgcctgggcgccagatattatcatgcgaccaatgcgcgcagcaagatttacgcaggcctggcctatcagtacgaatttaatggtgaggccaaagccacccatgacggcctctgcacaccggcaccgtcgcttaaaggcagcagctacatggcagaaatcggctggcaggtaaagcctgacaagaccaatatgactgccgatgtggggctgaccggctggaccggcaaacagacaggtataacgggacggctgaaattaagctgggcattctaaaagaaatacacagactaaaggggctgcggcataagtacttttcaacttatgccgcagcccctcgttttagtgatggtataatataaaagtgataaccatggttaatatgttgacagaataatccatttattctataatatatctgtaattacttattgtatcatagcgaggtatattaggttattacaataaggtctagctgttagctagcaccgcaaagctctaacggcttgccttacggcaagccgttatctttttataaatataattgagatagggagaatagatatggaacagcgatatgttttgggattagatattggtattgcctcggtaggttgggcagcattggctttgaacgataaggatgaaccatatcggattttggatatgaattctcggatttttcctgaggcagagcaggcaaagtcaggtgaatcattggcatctccacgccgtaaggcgcgaggaatgcgtcgtagactgcgtcgacgccgtcatcgtttggacaggttgcgcagtctgttggttcgagagggagtattggataaagcagcattagcagctctttatgaaaagccgatgacggatatatatgcagttcggtgtgaaggtttggaacgcaagctcacatcagatgaatgggcaagggtattattgtattttactaaacatcgcggttttaaatcaaataggttggcagaagcagaaaatgatgatgaaggacaggtaaaggatgccctcaaagcaaatgcagaattattgacctgctatcgtacagtgggggaaatgttgtataaagatgtaaaatttcaagctcacaagcgtaacaaggctgcagattatcaaatgacagtcagcagagatatgttgctatcagagataaagcagttgttcgcggcacagcgagcgtggaataataagcatgcatcggagacttttgaagaaaaatatgtacatatattttcatcacaacgtaattttgatgaaggcccgggaggcaatagtccttatgggggaaaccttattgaacgaatgattggtgtttgcacattggaacgggcggcaggagaaaaacgtgcgcccaaagcaagtttttcatttatgcggtttactttgttggaaaaacttagccatataagaattacggccaatggtataacgcgcagtcttacgaatgaggaacgccgacaattggaacaattagcttggcaatctccgtccttgacatatgcacatttgcgtaaggcgttggggttgcaggagtctgagcgattcaatgatttgtactataccaaggattatatcgaaacagagaaaaagaaaaaatttggctttgtggcagcatatcacgaggtgcgcaaggctttagacaaacttgaaaaggattatataaaaaaactgtcgcaggatgagttggatgttatcggctatgctttttcggtgttcaagaacgaggggaatttgcattcgtacttaataaataatggcattgcggaagaagtatgtagtatattactggcaaatttgaaaccgttccggaagttcggtcatatctccataaaagcatgccgcaatattataccatatttggagcaaggcatgacttatgatgctgcttgtagggcaacaggttatgaaccttcgggatataatggctccagacaaaaaatcctgtctggagcgatggaagaagtacgtgaaataccaaatcctgttgtgcgaagatcaatatcacagacaatcaaggtgttgaatgcactgataaggcgttatggcagcccggtggaaatacatgttgaactggcaagggaaatggcgcgtagtttccaagatcgtaaggaaatgcagaataaaatagaaaataatcgcaaggccaatgagaggataatacaggaattgcgcgaaaatggcctgttgcagccaaatggcttggatattgtcaaatggaaattgtataaagaacagcaaggcgtttgcgcttatagccaaaagccttttgatgttgagcgtttactgcatgatggcaagtatgcggaggtagaccatattctgccttatagtcgatcctttgatgatagctatgctaataaagtattggtgctggccggagaaaaccggcataagggtaatcatacgccgttggagtatatggctggcaaggaagaaaagctgaatgcttttgtgtgctgggttaatacttttataagagatttacgtaagcggcagaatttactgcgtaaaaacttccatagtgaggaaaatgagtggaaggatcgccatcttaatgatacaaaatatatcagcaggtttgtttataacttgttacggcagcatttggagtttagcacttttatgagtgagcgcaagcgtcatgtgttagcggtaaatggcagtgtaactgcttatgtgcggaagagactagggataaataaaattcgcgcaaacggagacttgcatcatgcagtagatgcggtaataattgcctgtgtgacgcaaggtatggtcaatataatagaacaatacagcaaagcacgagagttgtgggatatttctgcaaaagagccttttccagaaccatggccagggtttaggaaggaactggaggctagaacaagtgatagtcctgcagataatttgcgtagaatgcatctggaaaattatacagaggaggaacttcaagcagttaaacctatatttgtttcacgaatgccgcgtcgaaaagtacgagcggcagcgcatgaagaaacaattcgcagtgcaaagcatctaaatgaaggggtggcggtagtaaagaaaaaattatcggacttgaaattgacgaaggataaaacggcaatagaggggtatttcaacccaacgtcagatactttgctgtatcaggcattattagcaagattgcaggcctttaatggtaatgctccaaaggcctttgctgaaccattttataagcctagggctgatggcactactggcccattggttaggacagtgaagattgcgtctaaatcagtgttgcaggtaggtgtgaacggtggcaggggtgtagctgataatgatagcatggtgcgtgtcgatatattctatcgtgccgaaggtaaaggaaaagggtattatcttgtgcctgtttatgctgcagatacagtgaaagaagaattgccattaaaggcagtgacgcgaaataaatcgtatgtggactgggtggtaatgaaaccggaagaatttaaattttctttatataaggatgatttattactagtaagttctgcaaaagaaatggatatgaaggttaacgaaaagcgtggggaaattactacgctgcctccgatttttagaacacgagaagttttgacatattatcaaggaacagatagctctacagcaagtttgaccgtttgcaatcatgataatacctacaccaaaagaggaatgggagtaaaaacgattggaaagttgaaaaaaatgcaggtagatgtattggggcaagtaagtgaagctccattagagcaacggcacggatttggacaaatgaagaaggatcctcacaggaggcgtgggcaatatgtatcagcatcttatgattgattcaagggccaagatatatcagcgaaatttccagttatatgtggataatggcgagatacatcatttccctatagaggatattgatacattgatgattgccaatagggaaagcagtattacggtgagttgtttagatgcattgactgcaaatggtagttcggtgctaatatgtggtgcaaactatatgccggaaggaattctactgccttttggcgcttattcgcgtaggttgcggatgataaagtatcagatgggacaggctaagccagcaatgaaacaattgtggaaacggattgtacagcgaaaaatagagaatcagggacggtgcttgtatttagcagggaaaaaggacaatgtttcagtgttggctggcaatgtccagtccggggacaaggggaatgtagaagcagccgctgcggcaagatattttaagacattgtttggggaaaactttgttcgtcatgaaatgaatataatcaatagtatgcttgattatggttatgcagttttacgttcctcgattgcacggtacttggcaggctatggttttgagccgtgtttgggtattcatcatcatagcgaaacaaatgcgtttaatttggcggatgatttaatagagccttttcgtcctgtggtggacttgtatgttagtcggcatacgggaatgcctgaaggtgaattgccaaaggacatccggcaggatttgattgggctgttgtcgaccaagatactgttaggaaaggagtgtgttcgtgtgaataatgcggtggagagtgttgttcaaggattagcacgttggtatcaggataatgggaagctggtggagctgccacaactacttcccttaaactgccatacttatgagtagctttatgcgtctgttggttatgtttgacctgccggttacatcagcgaatgagcgaaaggcagcagcaaagtttcgtaagtttttgctaaacgatgggtactatatgatgcagttttccgtatatattcgtatatgcaatggtaatgaagccgcacataagcatttggcaagactgcaaaatcatataccgtcagcaggttctgttagggcaataatgattacagaaaaacaatatgaggccatgaagataatgtgtggtgcgaaaaatgcagattttgataaaaacgcagctaaccagcaagttttgagtttctaaatcttgttttttacaaaaaagagccttgattttccgaagaaaatcaaggctctttgggtgataagattgtaccatagcgaggtttaatagggaattacaacnnnnnnnnnnnnnnnnnnnnnnnnnnnnnnnnnnnnnnnnnnnnnnnnnnnnnnnnnnnnnnnnnnnnnnnnnnnnnnnnnnnnnnnnnnnnnnnnnnnnnnnnnnnnnnnnnnnnnnnnnnnnnnnnnnnnnnnnnnnnnnnnnnnnnnnnnnnnnnnnnnnnnnnnnnnnnnnnnnnnnnnnnnnnnnnnnnnnnnnnnnnnnnnnnnnnnnnnnnnnnnnnnnnnnnnnnnnnnnnnnnnnnnnnnnnnnnnnnnnnnnnnnnnnnnnnnnnnnnnnnnnnnnnnnnnnnnnnnnnnnnnnnnnnnnnnnnnnnnnnnnnnnnnnnnnnnnnnnnnnnnnnnnnnnnnnnnnnnnnnnnnnnnnnnnnnnnnnnnnnnnnnnnnnnnnnnnnnnnnnnnnnnnnnnnnnnnnnnnnnnnnnnnnnnnnnnnnnnnnnnnnnnnnnnnnnnnnnnnnnnnnnnnnnnnnnnnnnnnnnnnnnnnnnnnnnnnnnnnnnnnnnnnnnnnnnnnnnnnnnnnnnnnnnnnnnnnnnnnnnnnnnnnnnnnnnnnnnnnnnnnnnnnnnnnnnnnnnnnnnnnnnnnnnnnnnnnnnnnnnnnnnnnnnnnnnnnnnnnnnnnnnnnnnnnnnnnnnnnnnnnnnnnnnnnnnnnnnnnnnnnnnnnnnnnnnnnnnnnnnnnnnnnnnnnnnnnnnnnnnnnnnnnnnnnnnnnnnnnnnnnnnnnnnnnnnnnnnnnnnnnnnnnnnnnnnnnnnnnnnnnnnnnnnnnnnnnnnnnnnnnnnnnnnnnnnnnnnnnnnnnnnnnnnnnnnnnnnnnnnnnnnnnatgatattgtaccatagcgaggtttaataggaaattacaaccctgatgctctcctagctgaactgcatctttatattttggtaaattataccgcgttttgtattgttttacaatatctgtgaggtaaatgtacaattttcgtcagagcctggggaggtaaaatgttttttcgtagcaggagaaagccggtgcggtggcgaagtaaggacacagtagacctatggaatatgggtgtgattagtcctgtttatcaaaggatattcttgctttattgccatagcgaataaaaaatatttatggtgaatctttgtaataatagatatagcattttgtattttttcggcgtataataaatggtatcactgatagatgttttttatagtatcaccaacgagccggtgacgtaagtctatagcaatacatctgcaaggataacatgaggaggtaacaaagtggacaaacgggagagtatgtgggatttatatctcaaaaaaggcatgagccgccgcagctttgttaaaagctgcattgcgctgacgtccctgatgggcctcggcacggaccaggtgtccaaggtggtggaagctgccgagaagaagcctttgccggtagtggtctggattcatggacatgaatgcacgggctgtgatgagtccttcattcgttccggggcaccgctcgcatctgatttggtgctgagccagattgcgctggagtatgaccatctgttaagtgccgccagcggcgagcctttcgaggcacatttggaagaaactatcaacaagtacaaaggtcagtacatcctctgtgtagaaggtgctgtctgcactaaggagaacggcatttactgcatgtccggcggcaagccgttcattcagacgttgcagcatgctgcccataatgctgcggcagttatcgcttacggtacctgtgctgtatccggtggtattcaggctgccaaaccgaacccgactggttcctccggcattgcgcatttctgtggcagaacgccggttgtcaatgtgccgggctgtccgccgattccggaagttatgacgggcgtggtcatgcatgtggctctctttggcacggtgccgccgctcgataacgaaggccgtccgaaacagttctacggcaatcgtatccatgatacctgctatcgccgtccgttctttgatgccggtatgtttgcagaacgctttgacgatgaaggcgctaaggctggctggtgcctgtataaactgggctgccgcggacctgaaacctacaattcctgtggtaatctgcgctggttccagggcatgagttacccgattcagtccggtgctccctgcattggctgctccaatgcacatttctgggacgaagacccgatgaccacccgtatgccggagtatggtccgttgggcaacgtggataaaatcggtgctgctatggctgtggccacggcggcaggtgtggctgcgcatggcgctatgagcgttgtgcagaagcagaaacgcgaagcagagaaggaataagggagcaggtgaataaatgaaacatgtagtagtagatccggtaactcgcattgaaggtcatcttcgtgtagaggtgcaggttgatgaagcaacggggaaggttacagacgctgtttcctccggtaccgcctggcgcggcctggaactggttatgaagaaccgtgacccccgtgacgcctgggcttatatccagcgtatttgcggcgtttgcaccacggctcatgctttgggctctgtccgtgcggttgaggacgctttgggtattgctattccgaagaatgccaattatatccgcaacatcatggcggcaacgctgacggtgcaggaccatatcgtgcatttctatcatctgcatgctttggactgggtaagcccggtagaggctttggctgctgacgccattgccacggctaatctgcagaatacggtgctgaacacttacaaactgccgttccgtgcgccggaaacgtccgtaacggaagcctatgagcatgacttcccggcagctacgccccagtactttgaacagattaagaataaggtaaaagctatcgtagaaagcggccagctgggtattttctccgccaactggtgggaccatcccgattacaagctgctgccgccggaagttcatcttttggctgtggcgcattatctggaaatgctggataagcagcgcgagctggttacgccgcatgttatcttcggcggcaagaatccgcatccgcattatgtggtgggcggtatgccctgctccatttccttggaggacggcaatgctccggtgaatacggcacgtctggaaatcgtagacagagccatcaacatggggcgctcgctggtaaacaattattatctgcctgacctgctggccattggttccgcttatgtgaaagccggccgggttgatggcggcggcatggctaagacctgcgtgcttggttatggtgcatatccgattgaaagctacacgggcaccagtgatggcggtttcttcaagaacctcctcattcgctgcaacggcgtagtggaagactttggcaagggcctggctgctgcgaagttcacggaggtaacggcagaagatgttacgacggaaaatattacggaaagcgttgaccacgcttggtatgagtatcctgccgggaagaaagaccgtcatccttgggaaggtgttactgcagctaagttcaccggtcctaaagagggcacggaaacggattggaaagcgctcaatgaaaacggcaaatattcctggctgaaaacgccgaaatggaaaggcaaactttgtgaagttggtccgctggcccgttatatcatcatctacaccaaggctaagaagggcctgctgccggatatgacctgggcagaaaagatgatgcttgaccagctcgatgctgtttccaaggtcctgggcctggctccggaagtatggctgcccacgatggtaggccgtacggctgcacgtgctctggactgccagctggctgcggaaatcaacaagttcttctttgataagctcattgccaacctgaaggccggtgataccaaggttgctaattccgataagtgggatccgaatacctggccgaaggaatgcaagggtgtgggcctctatgaggcaccgcgcggtgcactgtcccattacatcaccatcaaggatggcaagacggacaattatcagtgcattgtgccgacgacctggaatgcctgcccgcgtgacgataatgccggcaatggcgcctacgaaatggccatgaaggacacgcaggtgaaggttgccgataagccgctggaaatcgtcaaggttatccgttcctttgacccctgcatggcttgtgcaacgcatatgtttaatgccaagggtgaaaagattaacgtcattactacggacccgtactccggtacccgggtggacaaataatctgcagaaaggaaaaagctatgaaagaagtagttcgcagggaatattacctgtttagtccttggctgcggatctttcattggattatggtggcagccatctgtgtcctgtttattacaggcctgatgattaccagtccgtggaatatccatgcgtcggaaccgactttttccggcatgacgctggataatatccgcaatatccattttctggcagcctatctgttcagtgcctcgtttatctttaagatttacgggtttatcatcaatcgcggtgaccggctgtttccgcatgtctggaaagggtatttttacagaaataccattgatgtagccatgcattatatgttcctgaaagcggaacatgcgtcttatctgcgtaatccgctggcccgttgctcctacgcgttcctgtatgtgctggtacttatcgaaatcatcacgggtttcggtatttactatatgacggaccccttcggcattggcggcacgctgtttggctgggtaattcccctgttgggcggtgaaatgatggcgcatctcgtgcatcactatgtggcctggggtattatcctctttgctatcggccatgtttacatggttatccgcgctgagttcatggaaggtgaaagtgaagtatcctccatgttctccggcagcaagattttggcgcatgagccgcgtgatgccggccatctcgatggtacgctgaagtaagtattgttatttgaccactgggcaatttgtactagcggtttgctcatattgatgaaataaaggaggctttgcccatgtgtaaggaatgcggctgcggacacgagggtggcaacacccgcttgcagttcacggtgcatggctatacggcggagagtgcgcaggcaatggaaaaggagcttttgggattaccgggagttctgtatgttcatatccatgcgcatgacggtgaaaccaccgtggattacaatcctgagaaaacgaaactcggggatatcctgcagagttttagtgctcgcggtctggaggcagttttataactgctgcttgcttattacgccttccctgccctattagtgttggcggggaaggcgttttcattatgtatcggctggggggaacgctccccaaagatgcaaacgaggtgaaaaatatgcatgaaatggccattgcggaaggaattttagatatagcgcttgattatgccaagcagaatgacgcgcagaaaatcaatgaaatcggcctgcttattggagagatgtccggggtggaagttgattccctggagttttcctttaatatgctggtgcaggggactatggccgagggggctaaactggtcatcaaaaatgtaccgcttatggggcggtgcagcaaatgtggcaaggagtttcatatcgagcattatgatttttggtgtcccgagtgtaaggacggggtactgactaccttgtcaggccgcgaaatgcaggtagaatatttggaggtagactgatggagattaaggttatcaagaatattttaggggaaaatgacagattagccgcagaaaatcaggctatgtttcaggataaaaaggtgtttgtactgaatttcatgggttcgccgggggctggcaagacttcggtgctcgaaaagaccatggaacggctgaaggataaaatcaagatggcggttatcgagggcgacctctttacgagcaaggacgctgagcgaattgataagtatggtgtgccggtaattcagattaacacagccgggggctgccatctggacgccaatatggtgcagaaaaccgtgaaggaaatgaatctggacgagctggatctgctggtggtggaaaatgtgggcaatctcgtgtgtccggcggagttccccgtaggggaagatgcccgggcagtggtgctgtcggtcacggaaggtgatgacaagcctttgaaatatccgctgatgttcaaggaaagtgagattgcgcttatcaataaggtggatttggcaccttattgtaatttcaatatggattcggccaagcaggatatcacgagtctgcaccctggcattgaggtgctggaggtttcctgcaccaagggtgatggccttgaccactggtgtgactggctgctgcaaaaggtggcggcgaaaaaggggaagtaagcatggcagatgtatttgcggctggtggcacgtcctgtctggacaatgtgctctataaaaatgaagtaacgattctggggattggcaatgtgattctgcgggacgaggggtttggcgtccgggtggcagaatatctggataagcattatgaatttccggagtccgtgcagattgtggacggcggtactttaggtattgagctgacgcagtatgtcacggggacggaaaagctgctggtgattgattcgattaacggcggtgctgagccggggacgacgttccgttttcacaatgatgatgtaatggagcattttcaggataagttgtcggcgcatgaagttggcattcaggatgtgctgggattgctcacggtcacggggcataagattcctgatgtggtggttattggggcgcagccatatgatgtggaggccggcgttgagctgtcggatggcatgatggaattgctgccgcagatggtggagcaggcgctggcagaactcaaaaactgggggatagtgccgaaactgcggaatgtggcagaagatatggactacaataaggtggcagaggatttctcgtctgttcgctaatgcttggggcggcggtggtattgtgctttcgcttagactgtcagctaaaagtatttttgccttgtgtccgtaaaatgcctaaactcgctgcgctcagacagtaggcattttgcggacggcaaaaatactttcttaacgctgacagtcaaacgctgcagcccaatatcaccgccgccctgcggcgcgtcaaatgatatttttttacgttgagtagtcagcaaaagcctttccgctaagaaacgaattagttgttaggaggtaatactatgtgtttggctgttcctgccaaagtagttgcgataaatgatgctatggggacggtggatattgccggggttacgcgtgatgtgagtcttatgctgctgccggaaactaagctgggggattatgtgcttgtacatgccggctttgccatgcagaaggtggaggagaaggacgcgcaggaaacttatgcgctgatggcagaaatgcgtggagcgcctaggacggtggataagctgtgacgggacaggagaaactgacgaaagctgaggaacgggagtttgcccgggaactggtggctaaaatcggtgagctggcggcgtctacggggcgtaaattgcgttttatggaggtttgcggcacgcatacggtggcgatttttcgcgccgggctgcggcagatattgcctgattcggtggaacttgtatccgggccggggtgtccggtatgtgtgacgccggatgattatatggataaggccattgcctatgcgcagcgtgatgatgtgattattgccacttttggcgatatgctcaaagttcccggttcgaagtccagtttgaatgaggctaaaaccaatggggcggatattcgtattgtttactcgcctatggacagcattcagattgccaaagataatccggataaaaaagttatttttctggctgtaggctttgaaactacggctcccacggcggcggctacggtgctggcggctgagcagcagggagtaacgaatctttatatgttgtcggcgcaaaaactggtgccgccggtgatggaaacacttttaaatgatgaggaagtccatgtggacggttttatcctgccgggtcatgtgtcggtagttacggggacaggcgtctatgagccggttatcagcaaatatcatgtgccgggtgtggtcactggttttgaaccgctgcagattttgcgcgggctttaccggctggtgcagcaggtcgtcaagggtgaggctaaggtggaaaatgagtacaccgatgtggtaaaagccgaaggcaatcccgtatccatggcgattaccagcagagtttatgaaccttgtgatacaggctggcgcggcatggggattgtgcctttgtcggggctgaagatgaaggcggaatatgcttgttttgatattgagcaggtactgccggtggccgtggagacggtgacgaaaaagacggcctgccgctgtggtgaggtgctcaggggcatagttacgccgcaggagtgtccgctctttggcaaggcctgtgtgcctacgcatgctatcgggccgtgtatggtgtcagtggaaggtgtatgtgcggcctggtataaatatggtcaggggaggtttgaatatggcaaatgatagggtaaccctggcgcatggggccggcggcaaagtgagtcaggaattgatggagcaggttattttgccggcttatggcaatcc

SEQ ID NO: 2802 - DNA, 23270 bp, synthetic construct
  misc_feature 1..23270: note = Synthetic
  source 1..23270: mol_type = other DNA
cttccggtcccgtcacattgcctatcagacagctgatggcggcggacttcccctgaccgtgacggggacactgtctcccggggcgtatacactgccgggtaatgtcagttcccagttctttacagggctgctcctgacgctgccgcttcttgcgggggactcctccctctatagctcgacgacactggaatcagccagttatgtcggccttaccctggatacgatggcccgtcatggtgtacatattgaagaagaaaaaccaggtgtgtatcagattgccggtggtcagtcataccggccgggccagtacgaagtagaaggggattattcccaggctgcattctggctggctgcaggatgccttggacatgatgtgaaactgaccggactccgccgtcacagtgcccagggtgatgaagtcatcattgatatcatccgccggatgggtggcaggataacagaagaaccagacagcctcatggccagtacgtctgctttgaaagggacgacgattgatgccggcgactgcccggatctggttcctgtgctgactgttcttgcaacggctgctactggtacaacccatattgtcaatgcagcccgcgtccgcctcaaggaatgcgaccggctccatgctatggcagaagaactgaataaactggggggcagagtgacagaagaaccagacggcctcatcattgaaggtactggtcatcttcatggcggccgcgtgcaggcctggaatgatcatcgcattgccatgtcactggcagtggcttcccagattgccgaaggaccggtacaaatcgatggggcagaatgcgtcaaaaaatcgtatccccggttctggcaggatgtatcagctatgggtggaatgtatacggaggaggcaggcagcaatgaataatacctttggttatcatgcaggactgacaatttttggagaatcccatggaaatgccatcggggctgtcctcgacgggcttcctgctggtatttcgatagactgggatgctgtacggcaggaaatggcccgtcgtgctcccggaaggaatgccatgtctacggcacggcaggaagccgatgcctttgaaatcgaaagcggttatttccatgatcatacgacaggaactccgctgtgtgtcctgatacgcaatacggatcagcacagccgggattacgaccagctgcgtcatatgatgcggcccggtcatgccgattacagcggcaaggtacggtatgacggatacaatgattaccgtgggggcggtcatttctccggccgtattacagcaccgctcgtctttgctggtgccatagcgtcccagattctggccagagaaggcatttgcattggtgcccatatcctgcgtatcggatcggttgcagaccgctgttttgctccctgtggcgaatcggcagccctgtttcagaagttgaaacagcagacgcttcccgttctcgatgaaacaaaggctcctatgatggaacaagaaatcctgacggccaaaagccagcttgattccgtaggtggcatgatagaaggtcaaatactgggattgcctgccggcttcggtgaccctttctttgattccattgaaagccgtttgtcccatatgtttttttctattcctgccgtcaagggagtggcttttggtgatggatttgatatggcactgcaccatggatccgagacgaatgattccttttactatgacggagcagaggtcaggacacggacgaaccataatgggggaatcaacggtggcatcaccaatggcatgccagtcaatttccatctggttatcaagccgacagcatctatttcaaaagaacaggatacgattgatacggatacgaaggaaaattgcaaactggttataaaaggccgtcatgacccctgcattgttcagcgtgccgtaccagttgtagaagctgctgcagcctggacgatactggatattttcctcggcagcagaaagacgggtggacttcatgactaagacgatgcctatggtcattgcctgttttggcctgcccgggtcctacacgtatgaggcgatgatggcctattttgacgggaaggatatagaaccccggtatgcttcgcagtttgaagatgtggttcaggctgtagcccggaggcaagtacattatggtgtcctgcctattgaaaattcctcgactggtggcattaccgatgtatacgatctcattcaccgctatgattgccatattgccggtgaaaaatacgtgcgtattgaacataatcttctgggattgccgggggcgtctctggccgacatacaggaagtgtattctcatccgcagggtattgcccagtgccgggaatttttgaaagaacacgaaaactggctgctccatccctatttcagtacatcccagagtgcggaaaaggtgcatcagactggtgatgtccatatcggggccattgccaatacgatagctgctgacatgtacggacttaccatattggcacgccatatcaatgataacaccatgaactatacccgctttttcatcatttctgccgaaatggaagaaagcgatgatatggataagattaccctggtattgacgacgaagcataagcccggtgccctgtaccatgttttaggccatttcttttataatgccatgaatatgacccatctggaatcgcggcctatcaaggggcgtccattcgaatatttcttccatatcgatgtcatgggtaatatacgaaatccggcaacgtctatcgtgctgcacaatctggaggaacattgcaattattttaaaatcctggggaactatccgtctgacaaagggggtaatatacgatgaaagcaggccttataggaaaaacactgggccatacggcatctccggctatccatgaaaaaatctatcagattatgggaataaccggaacgtatgatgtactggaaatgtccccggatagtctggcagaaaatctgaaacgactggcacaggatggatatacaggctgcaatgttactattccctataaaagggatgtcataccctatctgacggatatatcccgggaagcacggattatcggggccgtcaatacgatttattttaccgatgaaggagtttttgggtataataccgattatagcggatttggccggtctttggaacatgccggtatcagaattgccggacaggactgtgtcgtcctgggaacaggaggagccgccagggctgtcatccagtatctggcagacaagaatgccaagtcgattacggtcatttcccgccatcctcatttcaaaattgaattcgatgagttcacgaagaaaaccggggcatctgagacagattaccagacttttgaaacagtgcaggcaggagatgtgctggttaattgtactcctgtaggcatgtttccgcatattgacggatgtcctttgtctgaacaacgtattgctgctttccctgctgtcgtagacctcatttacaatcccaaagacacaggacttttaaaaatggcacgccgccacggtgcccggactttgaatggcatgtatatgctcgtggcccaggctgtgggatcagaagaaatctggatgggacgggaaatcccttcttctgtcattgaacaaattgctaaggagatggaacgcctctatgaatgataaacagaatatcatcatcatcggcatgccgggctgtggcaaaagtacattgggaaaagctcttgccagccggctgggccgtccgttttatgatgctgacgacgttattgtccagcaggaaggaaaaacgattcctgaactctttgccatcagtgaagactgcttccgcgatgcagaggtacgggccagccgcttcctggccgataaaaaaggcatcgtcgttgcctgtggcggtggtgtcatcaaacggcaggaaaatattgccatattcaaaaaaacgggaacggtctttttcctggatcgctcgccggacgatattgtcagcgatgtcgatgtctccgtacgccctctgctgaaagatggcagacagaaagtgtacaatctctataaggagcgtatcggcctgtaccgggatgctgccgattattgcattgataataataaggatatagaagacgttctcgatgagtttgaaatactgattggaaacatacggtaatataaaaaccgactgtcaggtggagcagaaattgcttcatgcggcagtcggtttttgtcgtatgctgggaagaagaaaaaatgggcagtgtaattcagctatggagcgcctgtaaaatctgatgtaatgtcgtcacttccagctggccaggagctgaagctttttttgctgaaccgaaggtaagggccgaaccgaagatttccccgctgatacggctgatggtgccgagtttccccatagacatggtgataatcggttcatcgggatactgggatttgacatcttccgttgctgataagagggtcagtacgtctttggccgattggggcatgcaggccagtttagctacatcggcaccgagttttttcatgcccaggagacggcctgtgatttcatcgaatgacggggtcttatcgaagtcgtgattgctcatgatgacagtgacgctgtgttctttggcgatggtgaggattttttcgatgctggtgcggttgcggaaatattccacgtctacggcatcgactttccccgttttgatggcataagtgatgaggtcgaaatagtagctttcaggaacttctgtttcgccgccttcttctttggtacggaacgtaaacaagattgccccgttaggcaattcctggcggacagctgccagagcctggccgacggcatctagggacgtgacatcttttaagaagtcgatgcgcagttcaacgacatcgtagattttatcctgaagatagagacattcatggatgagctcatcaagagaacggccgacaataggaacacaaattttgggcataccgttgtcgagggtaacattaccgattttaaccataatagtatattcctcctagcgcaagatgatgcagtggattttttctattgacgatattataccgtacggggctgatgcaggcaatgtaagactgtcagaatatggcccggatgacagagagggatgatacagatttttttcatgcagcatttttttcttgacaaacagggcggcattaactataatgaataaaaattcaataaacattcattaaaataaattaagctgcacatacagcatctaaggagtgtcaccatgaaaacgaaagtatttatcgacggtcattcaggtacgacaggtctgcgcatccatgaacggctggcagcgcgtcaggatattgaagtattacagatttctgaagaattacggaaaaatccggaagaagtaaaaaaatacatgaaggcggcagatattgcatttctctgtctgcctgatgcggcagctgtcgaagcggccggattggctgaaggagctgacgtaaaaatcatcgatacgtctacagcacaccgtattgcgccgggatgggtctatgggttcccggaattatcgccgcagcagagcggaatgattgcccatagcagccgcgttggcaatcctggatgtcatgccagcggcgtcatttctcttgtccagcctctgacggcatcggggatcatgcctgctgactatcccgtcactgccttttcccttaccgggtacagtggcggcggcaaaaagatgatagccgcttatgaaggagaaaagacgacagatctcctggcaccccgccagtacggactgggacagacgcataaacatctgccggaaatcgtcaccatttgtcatttggcagataaaccgctgttttcacctatcgtagacgattattacagtggcatggaagtgaccgtcccggtctttacgaagctgctgaaaggcacgccgggtatacagtctgtatgggaggcactggcagctcactatgagggatgtgattttattcatgtgcgtcctctgggagaagataaaggcggtttcctggcagccaatgacatgagtggccgtgacgatatggaaattttcgtaacgggcaatgatcagcggatactgctcacttctgtttttgataacctgggaaaaggtgcgtcgggggcggccatccagaacatgaatattatgctcggcatcgatccgaaaacgggtctgaatctgggagaataaggagaatagtacagttatgacaacgacaacttttatagatcacgatatacaggaagtgagcaatgcccagaaagcacgcatattgcgcgatgcccttccttatatccgggaatattacggcaaggtagtcgtcgtcaaatacggcggcaatgcgatggtcaatgaagaactccggaaagccgtactggcagatatcgtgctcctgcatctcattggtgtcaaagtcgtcctcgtccacggcggcggcccccatatcaaagaagccctcaatcaggtagggttggaatcgaaattcctgaacggcctgcgcgtgaccgatgaagcgacgatgaaaattgtccagatggtactggccggccaggtcaataaggatctggtcaaccttttgggggcactgggaggaaaagccattggcctgtgcggcatcgatgatgccatgatccaggtacaaaaacaaagtgatgaactgggactggtcggagaaatcacacacatcaatccggaactcatccatgacagtctggccaatggatacatccccgtcatttcatctatcggaaccgatggaaaaggtgtttcctataatatcaatgccgatacggccgcggccgaaattgccggtgcgcttcaggcagagtgcatgatttccctgactaatattgacggagtgctccggaatcccgatgattcgtccaccctgttccacagcctgactatgcaggacgtgcagcagcttacggacgaaggaatcattgccggcggtatgattccaaaagtcaagtgctgcaccgatgccattgactgtggtgtcaaacgggtattcatcatcaacggtacggtaccccacgccattctcatcgaaatgctgacagaagaagggctgggaaccatgtttgttaagcaataatgcctctgtagcggctgtctcagccatcgcgattacaacggggcatctgcaatataggaagttgttttgaaggaggaaatggatatgtctgcagaaacagaaaagaaagaatttgaaaaactggataaagaatatattgtcaacgtatataaccgcctcgatgccgttctcgatcatggcaaagggtctctggtatacgatgtcaatggcaaagaatatatcgatctcagtgccggtatcgccgtcaatgtgtttggcgtctgcgatgacgtatgggaaaaagccgttatcaatcagctgggaaaactcagtcatatgtccaacgtattctatacggaaccgcagattatcctggctaaaaaactctgtgaaaaaacaggcatgaagaaagtctttttctccaattccggtgctgaaactaacgaatgtgccattaaagcggcccgtaaatattctcacgataaatatggtgatggccgctataccatcattactctgaaaaatagcttccacggccggacgatggctactcttacggcttgcggccaggaatcgctccatcaggattttgggcccttcctgccgggattcgtgtatgctgaaccggataattttgaatcggtcaaaaagctggctgaagaaaataagacctgtgccatcatgatggaactggtccagggcgaaggcggtgtccatccactgaatccggatttcgtacatcaggtcgctgactatgccaaagcacacgacattctgctcatcattgatgaagtacagactggcaacggccgtacgggcgctctttacgcttatatgagatatggcatccatccggatattgtaacgacagcaaaggccatcggaggcgggctgccatttgccgtaacgatgtttgccgattcctgccagcatgccctgacggatcatacccatggctctacctttggaggtaatcctatctgtgctgccggggcgatttccattattgaccgccttgacgacgacctcatggccgatgtcctcaaaaaaggggaatacgtgaagaaagaactggaaagctgccagaatgtagaatgggtatccggcctgggactcatgataggcgtcaaattgaagaaagacctcatggaagtcgtcaacggatgtgtcgatgccggcgtcctggtcctgacagccaacggtctcttgcgcctgctgccgccgctgaatatccccatggacgtactgcagaaaggtatagaaaaaatcaaagccgtcattgatggctgataaaatctaaaacagaagctgctgtgagaggcagaagttgtttcccggtaaacggactcttacagccgcttctttttttatattgttcatgctataatatgtcatagtttataaagaaaggaaagtttctatgataacaaaaacagaacgaataaagaaagatataacgacgattgcccggtttcagtcaaagaaaggacggggatgtaatcgtttttcctatacgccggcattccggcaggctgctgattatattgcagaggaaatgaaaaaagccggacttacagtacgggaaaatgccgtaggtgccatattagggaccctgcagggagaacaaccggaacttgcccctgttgtttcaggcagccacctcgattccgtgccagaaggaggcaatttcgatgggattgcaggtatctgtgccgcactggaagcggcaagggcttttcacgatgcagggatccggccccgccggtctttttgctgtatagctattccggaagaagaaggacctcagtttggctctggcttgtttggcagccgggctatgtgcgggcagctttatgacgatgaaattcatcgttttcgcaacgctcaggggaaatcgatagcagaggtccttacggcctatggtaagaatcctgaaaagattgccagtgagatgatacacaaaggcgactgggctgcttttttagaattacatatcgaacaagggcctgtccttgaccgggaacatcttgaactgggaatcgttgaagcaatcgtaggattgaaatattattttgttactatcaaaggaatttctaaccatgcaggtgccacaccgatgacaatgcgggctgatactgtattagctatggcaaacgctgtatcggccggcgctgatacagcgttgacattgggagacggtacagtctttaccaccggaataatccagactcaccccggggcaggtaatattatcccggataagacggtattttccattgattgccgaagccggaacatgaatagtattgaaacggtcatgaaggctgtaaaagcctcactggaaacgagtaagaaacagaattccggcctttcctatactatcgaagagcggttacatgccgatcctgtcgaaatggatcagtctttgcagagccttctggaaacacagacacagctgcttcatattccatacaaacgcatgtgttctggagccggtcatgacacgatggttttcaatcatctgatgccgactgctatgattttcgtacccagtcgggatggacgaagccatgtgccggaagaatggaccgattacaagtatatccaacagggggccgaagtcctctatcagacacttcgacatcttacggcacaataaagcatgaatgaaatgattggtatttttctgaaatcttatatattatgtcttattgacaacactacaatttttagttatagtaaatatgtaataattatatcttagcgagggatattaggttattacaataaggtccaacaggagtgttggtaccgcaaagctctaacggtacgcctattggcgtaccgttatctttttatacggactattttatattcaaataatagatcaggggtgacgggctatgcattatgtgttgggattagatattggtataacgtctgttggttgggctgttttagaattgaacatacaggatgaaccaattcgtattgtagacctgaactcacgaatttttgagagagcagaaattccaaagaccggggaatcattagctgctccgcggagagtagcccgtagtagtagacgacgaacccgtcgtcggcgctttcgcttataccgaattcgcaggtatctacttcggaatcaaattataacgccatccgatatgaaaatattgtatgataattgtggagatatgaaggatatctatacattacgccatgaagcactggatagagctgtaacttcaaaggaatgggctagacttttaattttttttggtaaacatcggggattcaaatctaatcgtaaatctattattgcttctggtgacgaaggagtaatgttacaagccgttaaagaaaatcaagaattattaaaagcatatcgaacggttggagatatgttgtatagtgatacaaaatttgcgaatgctaagcgaaataaaggagaatcctatacatttacagtcagtcggcgtatgctgaccgatgaaatacggacgctattttgtattcaaagagatttgggacaatcttttgctacaccatcgttagaggacgaatatctttccatttttttggcacaacgaaattttgatgaaggaccgggtggtaatagcccatatagtggaaaccaaattgaaaaaatgattggtaattgtgcatttgaaaaaaatgaaaaaagagcgccgaaagctagttatgcctttatggcttttaatctcttgcagaaaatcaatcatcttcggattgaaagaaaaggaaagcaacgctttttaacacaagaagaacgaaataatattgcagggcttgcttggaaaaaagaaaacttgacgtttaaagatatccgaactgcgatttcactttccggagatgaattatttcaagatgtccactatgcatcagaggtatcactagaagaatgtgaaaagaaaacgaaatttaacttagttcgctcttatcatgctatgcgtaaagcattagatgcagtagaaaaaaatcgaattcagaaattatctcatgagcaattggatacaattgcctatgcttttactgtatataaaaatgatgataagatttcatcttatcttttggctcatagtatagaacagcaagatgtggaagctcttttagcgcagttaaggacattcaataaatttggtcatttatcgattaaagcttgttatcgtattttgccatatttaaaagaaggaaaaacttatgcggcggcttgtaccagtgcgggatatgattttcgaaatagtagtttggaagagataaaagatattccgaatccagttgtaaagcgtgctgttagtcaaactttgaaagtgatacgggctattataaaaaaatacggatgtgagcctgtagaaatacatatagaattagccagagaattggcgcgaagttttcaaaatcgagtaaagatgcaaaaaagtatggaagagaatcagtcacgaaatgaaaaaataaaagaacgactggttcaagaatataatattttatcaccaaccggaatggatattgtaaaattcaaattatatgagcagcaacagggagcttgtgcatattcacagaaaatgtttaatatctatcagctttttcatgatccatcatatgctgaagtagatcatattattccttatagccgatcatttgatgattcgtatagaaataaagtacttgtttttacagcagaaaatagaaacaaagggaatcgtactccgatggaatatctgaaaaatcaatcagaacgaaaggagcagtttattacatgggtcaaaaatactattcgagattataaaaaaaggaataatcttttacgagaaacgtatacgtccgaggacgaagctgattggaaacgacggcatttgcaggatactcaatatcttagtacatatctttataattatttatgtcatgtgatgaaattaacaccaggctgtacagaacgcaaacgacgcattattgcggtaaatggagctgtaactgcttatgtgcggaaacgtttaggtataaataagattcgttccaatggagatcttcaccatgcagtggatgcagttattattgcctgcgttacgcaaggcgttataaatcgtatatcaaggtatagtaagataaaagaattgcaaaattttcaaactaatgatggtcaagtcgtagattcagtaacaggtgaaatgttaacattgaaacacgtgcataaaaaagatccatttccagagccgtggcctcattttcgccaggaactagaagcacgagtcggtaaacagccacaagaagctattgctgcactacatcttccgacatatgaaaatgtagaatcaatttataccccgtttgtttctcgtatgcctaatcggaaggttcatggtccagctcatcttgagacaatacgcagtagtaaactgctttataaaggaattactattgtcaaaacaagcctaactaaccttaaattgaaagatggagaaattcaagggtattataatcctgatagtgaccgtattctctaccaggcattaaaaagaagactgatacagtttgatggcgagggaagagcagcttttaaagaacctttttataaaccacgttcagatggaagtccaggaccaatggtcaaaaaagttaaaattatgactaactcaagcttgaacgttctgttaaaccatggtagaggcgttgccgataatggtgctatggtgcgtattgatgttttttatgtttctgagaaaggtaaaaaagcttattattttgtgcctatatatgtggcagatacagtaaagaaagaattaccacataaagcagtggtagcatataagccatgtgaagaatggaaaaatgtagatgatgatgattttattttttctttatatcctaatgatttggtatatgtcagacataaaaagtcgattcttttaaaagcgtcaaagagaagtacattatctcctcaaataaaaattaaagaaggactgttttattataaaggtgctaatatctcagtaggaagtattagtattattaataatgatgatacatatggacaacatagtttaggcatcaaaactttggaatgtatgaaaaaagcaaatgtagatatcttgggaaatgtgacctttgtggggagagagaatagacaaccatttcaactgtcaaaaaagtgagtcaggaacagaggtgataaaaaatgtatcgccatgttattattgaacacggtgctcgattatatcaaaaaaattcccagctttatattgaagcagatgaaaagcatcatataccaatagaagacatagcgaccttgcttttggcaaacaggcagatatctataacaacatattgtcttgaaactctggcggagcaaggaacggcagttatactttgtaatggcagtcatcttccggctgggatgcttttaccttacgcaactaattcgcgtcggttaaaaatgattcgtctgcaaataagttagactcggcctcatttgaaacaactttggaaacagattgtacaagaaaaaatccgcaatcaaggccgctgtctagtcaattgcggaaaaaaagatactgttacccatttggtagatagagtaaaatctggggattttatgaatgtggaaagtacagcggcatcactgtattttcgaactctttttggggataattttacccgtcatcaagatgatttacttaatgatattctcaattatggatatacaattattcgtagtgctattgcgagatacttagctatttatgggtttgaacccagtttaggaatatttcatcacagtgaactaaatacatttaatcttgccgacgacttgttggaaccgttccggccagtggttgatatgtatgccagccgttttgtcggagtgaaaataaaggagatggtacccgctgtacgtcatgaattagtgcaattattaagttttaatatccaatcaggtaatgaggtacatgcagttaactatgcgatagaacggacagtacagagtcttgttcgttgctataagggaaaagagtcaacattgcttttgccggagcttatgcctttgcaaatccattcatatgagtaaatttatgcgcttattggttatgttcgatttaccggtcaaaacaaaaatggaacgcaaggcggctaatcagttcaggcattttttattacatgatggatattatatgatgcaattttcagtttatgttcgtatctgtaatgggagagatgcagtagaaaagcatcgtcaacgcattttacatcaactccccccgcaaggatcggtgcggatgttgactattacagaacgacagtttgaggcgatggaaattctttgtggcaggaaaattccggaattagatgaaaagcaacaacaaaatactgtgatgatattatgaaaaaatcgccagcaatggcgattttttcatgtttgtttttcgttttttttgcagaaataaagtcgttgaagtgagttgtttcaacgactttatcagatagtattataccttagcgaggaatattagggaactacaacctgtcgcaagtttttgtgcgtatagacgcgattataccttagcgaggaatattagggaactacaacttcggctgtgcgatactgtttcagcaattcattataccttagcgaggaatattagggaactacaacagcattgctgtaggcatagagttgctctgcattataccttagcgaggaatattagggaactacaactctcagcatgtcataccgtaagatagcctgattataccttagcgaggaatattagggaactacaacccatacggaaccatatttattcaacgtatgattataccttagcgaggaatattagggaactacaaccgtaacagcaccggcctgaatcatccctttattataccttagcgaggaatattagggaactacaacctggtcttgcgtgaaatccgcaccactcttattataccttagcgaggaatattagggaactacaactcggtacagcatacaacaaattcaacggtgattataccttagcgaggaatattagataatgtaaggatgtgatagatttatttaattgcatcatgtcttggtgcaggaaacgtaacatgtctgattcttttaactattttactttagataaaaattgtctgtcaagtcttgttattcttacatattaagactaaaatagggctatcaaattgaaaggaagaggataggagagaaaacatatgaaacatttaaagattgcgtacagttttgacgtgcagtattattttgtggacagcgaccgggaaatcgtgcctgtggaacagacagattttactgatgtggctgtcgccgttttatcggatcaggattacgactacattgataagattgatgctacggggtttggtgtccctatcatggtcatcatgccaagtggggaaaagctgccgtcccattatctggacaaggtagatatggtcctatcggaagaaatggtcaataagagccgctgcattgaaacggcagaacggctggccagtaattatgaacagaccgtattacctccgtttttcggggagcttgtcgaatacgtcagcgaaaagaataacccgttcgactgcccgggccatcaggatggcgcctttttcaaaaagcatcccgcaggccggtatctgtacgatttctttggttctcatatttttcagtcagacatttgtaatgccgacgtcacgttgggggatctgctcatccatgaagggccggctctcgattcacaggattttgcggctaaggtctttcatgcggataagacgtactttgttctcaatgggtcgtccgcatccaaccgtgttgtgaccaatgctcttcttactccgggagatctggtgctctatgaccggaataatcataaatccgtggctatcggcgcactcatacaggccggagctacgccggtgtacctggaaacggcccggaatccgtacggctttatcggcggcattgatgctcattgcttcgacgaaacgtatctgcggcagctcgcggccgaacgggatccggaaaaggcgaagcagccccgaccgttccgcctggcagtcatccagctggatacctacgatggtacgctgtacaatgcccgttatgtagtagaccgcatcggacatctctgcgattacatcctctttgattcggcctgggccggatacgaacaattcattcccatgctcaaagacagtagtcccctgcttctggacttgggaaaagacgatccgggtatctttgtcgtccagtctgtacacaaacaacaggctggtttttcccagacgtcacagattcacaaaaaggatagtcatattcacgaccagccgcgttatgtgaatcacaagaccattaataatgcattcatggctcaggcgacgacgagtcctttttatccgctctttgccactctcgatgtcaatgccaaaatccatgccggcgatgccgggcgcaaaatgtggcgggactgcgtgaagatgggaatagaagcccgtaaggatattcttcgtcgctgccactatatccgtccctttgtggcacctgtcgtgcatgaccggccatggcagaagggaaatacggaagccatggctgatgatatcgattatttcacctttgaacccggtgccagatggcatgcctttgaagggtatggtcccaatcagtatcgcgtcgatccatgtaaattgttgctgacaacgcctggaattgatgccgaaacaggggaatatgaaaacttcggtatccatgccaatattctggccacgtatctgcggggaaatggcgtcattccggaaaaatgcgatctcaactctatcctgttcctgctgacgccggcagaaaacaagaacaaactccgctttcttacgagccagcttgtacgcttcgaacggtttgtggataacaatgtccctatgcaggaagtcctgctgggagtatacaataagtatcccggccgctatacgggatatacgctgcgccagctttgtcaggaaatgcacgatttcttcaaagaccggaatgtcaaagatctgcagaaaaaactgttccgcaaagaatttttcccggaatatgttatgcgtccccaggaagcccattacgcctttatccggggggaacgggaactggtgcctctcgatgaaatcgaaggccgcattgccctggaaggagcactcccatatccaccgggcgtcctttgcgtcgtaccgggggaacgctggtcccatacggctgtccagtatttcaaggcattggaagaaagcctgaatgaactccccggctttgccctggaaatacagggggtatacctggaacacgaaggtaatcgcatccgtgcatatggatacgtattaaaagaatagaataagacatccctcgctttttattgggcggataagatatcagaaaatgagaagggctgtaacaagatggacaaaaagttcattttgttacagccctttcaattagaaattttttatttgactaattcattagagcatgctcccgttgtcatatatgaatatgcattttccattgttgtatcagacatgtttctatctgcttcatcagtataaaaagcggagtggctagtataaataaaattttcataagttaaaagttcttttaaaatagatataggacaaacatcctggcttatattttttagtgcattttccccttcgattacatccatggcgaccccgcctaatttccctgattttattccactcaaaatgctatcattatcaaacaattgtcctcgtgcaacgttaatcagaaatacaccgtttttcattgttttgatggaatcattatttaccatgtgatatgtttcttttgtagcattgcagtgaaaaactataatatcagattgtgcatataattcatttaatgtaacataactggcaattttttttacttcgtcattttggtatggatcgtaagccaatattttcttaggaccaaatccactgaggcatttcattgtagtaaagccgatacggccggctccaacaatacctattgtctggtttcggatttctttacccattaatccataaagtgtaaaatctcccttatcaattcggtgtatctgctcccggaacttacgcaataatgcaaaaataaaacctacagctgtttctgaaatagcattaggggaatatcgaggaacgttagcccctttcagaccatattttttcatggctgtcaagtcgaagtgatcatagccctcggtgggtgttaacacatatttgatgccggtatctgctagcgatttccaaaactcatctgttgtttttcctgcaggcgtatagatgagtgcttcacaatcttttagtaaactatgatttttgattgtaggcagacaatcaaagtagcacaattctaattttccatcgtatttttttacgctttcgttaaagcgtgtattaccgtcgcgaacggtattaaaaataccaattttcataaggttacctcacattgtaaaatatttatttttttataaattagttataataaatttcctttttcatcaaaaggcatgtaatccggttcagtttcgatgataaggtccggattgttcatggcttctttataatatgcttcagaaagccagatatgctcaatatgaaggctgtttggaatccgtacaatacggggattttttttcgtcaatttctgtacaaacttttacacatacttgaatagcttctttgtcactttccataacgatgggaatgcggacaacacttagtattttagctgtaatagcatttgggtacatggcagcgacgtcaagctgattaaatactcgtgttgttgtggcgttggcattgccaatgccaatagcatttccgtggctttccgggcttacgtccagaacgcatacctgttgagctttgattccgccactggcataaggtgtgctgaatgtgccagtgatattgggattcatgccactgccggcgtaatttttaccaatctggtcaacaaccagaatatcgtaagagtcaaccaggatacgcggcatataatgaaaagcttcttttaaaaatctgggcttttctctttctatttcatcggcatttaatacaatgagcttacgagtttcatcaaaggcgttttctagtgtagcaacagcaaaaagaatgggagcatgtttaatgatggctttaccaaaaagagggatgttcttagccatgtttttgaagccttctctatggcagacttcagcgccgtgttgttttccgagcccaatcgccatcatcttcataataccgctttcatatttcccccggaagcctgtgtgtggcttgattctgcagctaataataatgccatcggcttctgcggcgtttttgtcgataaaagtatcttcaccttcctcggtaacgccgattttttttacttccatggaagagataatggggcatcccatgcttttttctgtaaatcccagtgtttccaacattgccttttgtccttcagctgttgcgcctccgtggcttcctatagccggtacaataaaaggctttgatccatgagacttgacgacatctacaatagaacgagtaatgagtggcatattggctataccacgggatccggctgtaatagcaatgcgcatacctggtttgatttggttagaaaatttgggagtagataacaacgctgtgattatttcaggaattttggaagaatccagtttttcgtggggaaagtgctgtgttactttaaacatcctgggtagatatacatctcgaacaatatttgaaactatcgggcgttatctaatcattgtaccatcttcatattaccttctaaaagcaataaggaaacctgttacggcatttgccgacagcaggtttccttatttacaaaaagaaggaaatgttattttaataggctgcgggcaataacaagctgctgaatctgactggtaccttcatacagcgtcgtaatgcgcgcatcacgatacatgcgttcaacaggatagtctttgatgtagccgtacccgccatgaatctggacggccttataggcgaccctatttgacatttctgttgtaaaatacttgcacatagagagtttggcagctacgtctttgcctgcatcaaattctacagctgtattgtaaatcaattcacgtgccagtgttatttccgttgccatatcagctaacataaagctgatagcttggaattttgccagaggacggccaaattgttcacgttctttagcatgcttgacagctgcttcgagacacccctgggcaatgccgagagcttgagcggatacaccgagacggccaatgccaagtgtcttcatagcagtggaaaatccattatgcaacggaccaagcaaatcatttttggaaacgcgtacatcgtcgaatacaatatcactagtcggatatccattgatacccattttcttttctggttttccaaacgatacgccgggcagtttcaagtccacgataaacatggagatgcctttgctgcctttttgtgttggatcggttttagcgtaaacgacagcataatcggaaactggagcaccagaaataaatgtcttgcggccattgatgatgaagtcatcaccgtcagcgacagccttggtcgtcgtgccaccggcatcggaaccagcacccggttctgttagagcaaagcagagtttctttttgcctgttgcaatcaagggaatatatttctttttctgttcttccgtgccacaggccataattgggccgccaccgagagaattcggtgtgttcggataaatagccagtacagggcagacacgggcaaattcttccatcatgaggacgtaagtcaaagtatcgccaccctgacctccatattcctctggaatacgcgcgcccatgaatccatactttgccatttctttatgcatgtcccagtcgaattcaccagttgtatcgagccgttcctgcaattccggagtaaattcgctttcggcgaaatcacggaatactttttgcatcattacgtgttcttcatctaaaatcatgagtctttaatcctttctgcgtagtaggtcagagtaattcagccaatgtttcaatacgtgtacgggcctggtcatagttgttgggttgttggtctatatcgatggaaagcaccttgataccagcttctttgagtgccgaattatatgcgacgaattcatattcttccggatcgcagaatttcataagacatactaaaattgcatcagcattattttctttatacagtttttctaacagattaacgcgatcgatatggtcatcatgtgccatagggtcactacggtccagccattgttgtgccaagctggcaagagacgaggtatcttccggaatatctgtacggtactgacgcatttcctgagcaacatcatcaccgacaacggcaaagttattgtcagaaagaatgttgagcaggctgcacggttctgccgtgatgcctgtgagaatcagccggtgtccggtgaaattgtataccggcagggctttcagttgattgatgatttcttcaactgccgcaatatgctctgatttggacataaaccatgcactcttaaatacggaatgacggacggccggagtgatgatatcaaggtgatcattggcaatagcagcaaattcacgcataaccgaattatgcttattgtagacagcaatgcttttttgcatggcttcttccgtaatcgtgacgccataaattttttcaatttgttcttttacataggtaagttcctcaatcaaatattcttttgctgcagctaatttacggttctgaggcaatgtataagcgattgtggaaatgtctttaacacctgttttaaaatcttgtgtgacgtcgcggagtgtatcgcacatagtcggaatcatgacagccttgacgccagcatatttgccctgcagtcccaattccatgcaggcttgcatgatagggcatgcaaaggggacgagatatttctttgccagggaaaattcggtttgggcgccccacatccccattgggatgattcctgcagcatcggccattacttccggcgtgtaatacggaaaagcgcctataacttgctttccatcagaaagatacgtatctagctgtttttttggattatgggaaatattccgtagtttttgtaaattttcatgtaaatcagccatttttcaaagcctccttgcggtttctcatcgtttcagcaaatgcttcgattctttgttcaaactgagcttcactaaaattgcgataatctgcctggtctccatcaaaactcatataaggaagaccgccacaggcttcggaaacctgtctcattaattcctgctgctggcagaccatgactttgcatgcgcggttaacgtgataaattgtgccatcgatatggaatttttcattccattcttttctccttctgacactttcttccagaagaatattattggagctggtgaacgaataggcagcagccaggctatcaagatccccaggggtataatccagcgaccaggcgcgggcataggcggtagcacagacgttgatgccgtattttttcaaggtcttcaagttatgtgacagataaggccagcaggcgattccttcccagaatacgcggaattcttcttttgctgggaaagtggatttgccatttttaatattttcttctgtttctgcaatcaattggcggaggacatcagctgtttctgtgcggccacgggtaaaaaccataggtcccatatagttgaataaatcaaaaccgctgatcgggctaggtacgattgccagataatctgctacttgttcccaaagattccggtttattgtggaaatcttcatgatttcagcgaatttgtcagggtcccatgtttggcctgtcagttcgcaaaggtcagtgatcagttgttctagttgggcacggatatacttcgtacgggattttgtaacatgatcttgatggttgtaggtcatatctaccataaagagaggaatattatatttgcggcttaataattcgaaccattttgtgatttcgttgcagccattattgccgacgagcagaaaatccggccggggcatattgctggcatcgcaatcaaggatatctgcatatgccagatc

SEQ ID NO: 2803 - DNA, 23270 bp, synthetic construct
  misc_feature 1..23270: note = Synthetic
  source 1..23270: mol_type = other DNA
cgacgggcggtttaagccccgcgccggcgccaacccctttatcggctccatcggcacggtggaaacggtacgggaagaacggatcgagacgatcgtaccacagccgaagctgccggcccttttggcggcggtcttgcaagtccatccctatgaggaaccggcgtacgacgtatatcccctggccaatgaaggccatcaatatgctatgggacgagtcgggctctggccgacgccggaaccggcgggcatcgtcctgcagaagataaagcgtgcgctgaagcgcgacgtcctgccctttgctggtgacgccgatacgatggttaccaaggtggccctcctcggcggcgctggagccggattcatgaagctggccaaggaagcgggggcgcagctttatctgaccggcgatatccgctaccacgacgctcaggaagcggtgaagttaggcatcgtcgctgccgacggcggccatttcggcacggaataccccattgtcagcgatttgcaggaacggctgcgggcggccggacgggaaagaaaatgggctattgaatgtatcagcgacccgacgagccgcgatatgttccactatataaagtaaacgaggcgataggacatgacaaaagaagaacatatacgacaactgatgagcgaccctatctacgcgattatggggaacgccgagttatccctgggacggagcaatatcgacgcggcgcggcagctcatagaggccggcgttacgatcatccagtaccgggaaaagcataagacatggcgggaaaaatacgctgaagcgacggccattgccaaattatgccatgaccataaggtgacgttcatcatgaacgactccgtcgatctggcgattgcctgcggcgccgacggcattcacgtcggccaggacgacgcgccggcgacggtcgtgcgccggctggctggccccgacgtagtgatcggcgtgtcgacgaatacgattgacgaaatgaagcaggccctggccgacggggccgactatgtcggctttggccccatgttcccgacggcgtcgaaaaaggacgcccacgaagtcgtgtcggacgaagcgaagcactttgccctgcatttctccctgcctgtcgtgaccatcggcggcatcagcctggaaaatatcggctcattatataaggaaggcttccgttcctttgccatgatatcggccattgtcggaaaagaagacatgacggcggccgtgcaggagctgcgtaatgctttgaaggcgtaattgcatattgacttctgcgctgaattaatgtaagatttctagatgacgagtatgaaagacaatcgctagtgcttgcattagaggaaagtccgagctccgcagggcaagatgccggataacgtccggcgaaggtgactttagggatagtgccacagaaatgtgtaccgccgcgcaagcggtaagggtggaacggtgcggtaagagcgcaccagcagtaaggtaacttactggctaggtaaaccccatctggagcaagaccgaataggggagggatgaagcggcccgctgatcttccgggttgtgtcgcttgaacatgccagcaatggtatgtctagatagatgattgtcgctgccatcggcagaacaaaactcggcttactgattactcgtctcatggtctataggaggctctctgttgcggcagagagcctttttttgctttacaattttatgacgacatgatattattcaattatatggtcaaaaaattatactccatgacgcatacattttaataaagcgagggatttgagttggctttaatcgtaaagaagtttggcggcagttctgttgcgacgccggacaaaatgcgcgctattgtacagcgtgtcttgaagggcaaacaagagggggacaaaatcgtcatcgtcgtgtcggctatgggggatacgacagacgaattggtttcgttggcaaaacagataacgtcaaaagcatatggacgtgaaatggatatgctcctttcgacgggcgaacaggtatcgattgccttgatggctatggcgttccaggaagccggccagaaggcgatttcctttacgggcgcccaggcaggcatcaagacgagcgacgcctttaataagggccgtattttggatttagaaccgaaccgcattatggaagcgctggacgaaggcaacgtcgttgtcgtcgcaggattccagggcattacgggccacggcgatattacgaccttgggccgcggcggctcggatacgacggctgtcgccattgccggtgcgatcaacgccgacgtgtgcgaaatttatacggacgtagacggcgtatatacgtcggacccccgcgtcgttcccaacgcgcagaaaatgaaggaaatcacgtatggcgaaatgctggaaatggcaaagctcggcgccggcgtcatgcagccccgggccgttgaaatgggaagccgcttcagcgttcccatccacgtacgctctacgttttcggaagatgaaggcactatgattcaggaggtttgctcaatggaaattaaacagtatttgattcgcggcgtcgcttcggataaaaatgtagctaagattacggtattaggcatccccaatcagccgggacatgcctataagattttctcgatgctggccgacagccatgtcgacgtcgatatgatcgtgcagagcgtccgcgtcgctaaggaaggcgttacggatattacctttacgattgcccgcacggaattgccggctgcgaaggatattctgaaccgcctgcgcgaagaaatgccggtcgaagatatcctcgtcgacgacaagatggccaaggtttccatcgtcggcgccggtatggccggccatccgggaattgccgccggcatgttcggcgtattgggggacaaccatatcaacatcgaaatcatttccacgtctgaaatcagcattacctgcctgattggcgaagaaagcgtcgatacggccgtcaaggcgatccacgcccatttctttgacgaacactgaggtggataatgtctgtattggatagttttgtagatgaaatgctgcagccagaggttccgaagcgggtgctcatcgaccgcatgatacgggggctgatgatcgagaagccgccccagtttaaggtgccggcgccgaagtatacctttgagtcgaacctgcacggcctgatttacgattatcagaagcagcaggttacgttgtcttataaggttgcaagctccgtgtatgacgacatggaaatgtccttcgcgtcgttccgggcgctgctggaaggcctggccgtttgtatccgaatgcagaaatggtaaacatactatgccgcagttcctgttggggggattgcggcatttttttggaggtgtatgatgaggtgcggaattgatatcgtgcagattagccgcatagaggacatggcctgccgccacgaacgatccctgggaaaattttttacggaagccgagctggcgtactgccgccggcggcagcaacagcagtatgcttcgctggccggcatatttgcggcaaaggaggctctttttaaggccttgggtacagggttccggcagggaaaatggacggacgtggaagtcagccatacggagctgggagcgcctgtatttattctgcacggttattataaagaggcggctgcggcgatatgcccgacggcgccggcattgtccgtcagccacgacggggattacgctgtcgctcaggtcgtcatggaaggatacatacataaggaggaagaatgatgcagaagttgaacacggcggcgcagatgcgccagatggattatacggccatgcacggcaaatacggtattcagccggccgtattgatggaaaatgccggccacgccgttgccgaacgggccgacgaatacattcacggctgggccggcaaggacgtagtcgtcgtctgcggaaagggcaataacggcggcgacggcttcgtcattgcccgccatatcgcagcggccggagcccgggcttacgtgtacatcctgggacaagccgaagaatacagcgatgaatcgcagcagcatttaagcacgctgcaggctatggaagacgacgaatcgtgcctgctgacctatttcggcggcacggaacgggagtggcgcgtactgcggcagcggctgcagagctgccaggtcgtcgtcgacgctatgctgggaacgggatttcacggcaatctcagagagcctgtttcgtctatcgtcggcctgattaatgaaatcgccgcggccggcgcgctgacggttattgccgtcgacgtgccgactggcgtcaattctgatacgggagctgtcagcggcagtgatgaagaagaaaacgggcccttgtttgctgatatgaccgttaccttcggcgctctgaagcgggggctggtcttgtatcccggccgtacctgcgccggccatgtagagctggacgctatcggtatgccggctccgctgctggtacagcctgaggagaaaccggcatatttgctgcaggagtcggatattgccgaagtcctcgtgccgcgcagccccgacagccataagggaagccacggtacaatcggcatcgtgacgggatgcagcgacatggccggcgcggccctgatggcggcgcacggcgcggtgcgcagcggcgccggcaaggtattcctgcgcgtgccggcgcagacggcgccgtactgcatcggccggcagccggaaatcatggttcgcggcgtaggccagggcgaatactttacggaggcagacgcggtgtctgtcctggatgaatgcgccgcctggtcggtcatcgcgatgggtcccggtatgggaagacatgaggaaacaaaggcttttgtcaaggcgatattagctcatggcgaatgccctgtcgtattggatgccgacgccttgaatttgctggcaggagaaaaagacttcgtctcttccttggaccggcaggtcattatgacgccacacttggctgaattcagccgtctcagcggcctgtcggtcgccgaaattcaggaagatccctttgcggcggccgtgcagttcgtcaaggaatggcgcgtcacgttagtcttgaaaggcgcgccgacgcttgtcgtatcggctaagaccggcaacgtatacgtcaatccgacgggcaacgccggcatggcctgcggcggcatgggcgacatcctgacgggcatgattgccgctatatcggccagggaaagccgccccgatatttgcagtgccgcctgtgccggcgtgtacctccacggcgctgccggcgacgcctgccgccgtcagatcggctcgtacggctttacgccgatggaagtggccgacgccgtgcccggcgtgatccggcgcatggaagaagaaatggcagtgccgctgctgcaggcgccgatgatcttggattaagatgaaagggcgcgcggcagcgctgcggacggctcttgccggttgttgtcttatcctgttggcggcgtgccttctctttgcggcaggctgcgggcggggagcggacgcagaggcggagcagctgcaagtccatttcctcgacgtcggccaggccgacgcggccttgctgcagtacaagggacagcatatgctcattgatacgggagacgtagacggccggtcggctttggtacagaggctcaaggaaaagggcgttcatacgctggacgtcgtgttgataagccatccgcacggcgatcacctgggcggcatggccgccttgttcgaccagtttcacataaaacaaatatacgataacgggcaagagtcccgaacggcgatgtataaaaattacgtaaaaaacatcgtgcgtaagaagatttcctataaagccttaaagaggggagataaggttacctttgccggcgacgtcgtgtgccatgtcctttggccggcggcagaaggagcggcagcgatgactgcgtcggaaagcggccggactaataaccagtccgtcgtctgcaagatagccttcggcagcttttccgtcttgtttacgggggacgcgcagcgggaagcagaggaacagattctccgccatgtccggcgaaacgatctgaaggcgacaatactcaaggccggccatcatggcagtaagacctcttccagcccggcgtttatagaggccgtgaggccggaagctgtcgtcgtttcctgcggcgccggcaattcctacggatttccccatacagccgttttggcggcgcttaaaaagcaaaaggcggacgtataccggacggaccgggacggcgccatatctgtcgtcagcgacggccggggatatactgtgataaaggagcgataatatgaagacgcttatcggcagcgtcgaccgcattaccgggacgactgcctatatcatgctgaacgacgatgcgcatgtcctgcagattccggcagagctgctgccggatggcgcagcagagggcatggcctatacgattaccatagagcgcaacggcgcggaagaacggcggctgcgcgacgacattgcggcgctgcggaaggccttgaaggattagataaaatacgaataggaattttgtcacaaaaagatattatccggcggcgacatgtgatataataaacaggtcaatttttgcaaaggagagatatacgtgatgaagagactttttatacttccgctcctgatgctcctgtgcctggttcccatgctgccggcgcaggccgcttctaaggcggaaatcaccagcgtccgcacggcgacccgcaacgacgccaatgttcctttcgtacgaaccgtattggaattggacagcaaagtcacgccgcgcctctttattgacgaggacgggaaatatgttacggtgacgctgccgaacgccaaaattgccaaaaatgtagaaaagaagtacaatgcggaccgcaacgtcgtgtcccgcatcagcttgtctcagcgttcgtccggtacagatgtcaacatcaaggtcccccgggccgtgaccaagagcgacgtcaacgtctttaccctgccgggaacggacaaggctaaaaaggaatgccgcgtcgtcatcgacgtcaacgacaagtcgggcaaggtcaagcagtggatgcactggaacgacgctaagatcggcattgacaatacgtccctcagctcgacctattccgtcaaggtgccgtcatacagcagcagccgttcgtacaagctgaccaagggcttaaaggataaggtcatctgcatcgatccgggccacggcggtaccgatgtcggcgcgatcggcaagatatcccaggaaaaaaatatcaccctggcaatttctaagaagatcgccgatttgctgaatgatgccggcgcgaaggtcatcatgacccgcacgaccgacgtcgacgtatatgctccgtacgatgccgcggcagaagagctgcaggcccgctgcaatatcgccaatgcggcaaaggccgacgccttcgtatcggttcacatcgactccttctcttcagccgacgcccgcggcgtgacggcgtattacaacagcaagacgcctcatgattacagcctagccaagtacatccacaaccagaacatgcaggcgacggaattccccgacagaggcacgcggacggctaatttctacgtgctgctccacaccaatatgccggccgtccttttggaattgggcttcatttccaacccgacggaagaacgggccctcaattcggaaaagcagcagcagaattttgccgaaagcatcgttaaagggctggccgattattttaaccataacggcagataaagtggtctgaaagaaatagctgtaaatcttgaaaatttctattgacagtttaccggctgtcatgtatactagaaaagtcgtagcataagtggctaggataagccgcatggagaggctcgtaagtccctgcaaagggcgccgtattcagcgagtatatgtatgaggaggtgtcactcatgtacgctattattaaaacgggcggaaaacagtatcgcgttcaggaaggcgacagcatttttgtcgaaaaactggctgctgatgttgattccgaagtagtatttgaccaggttttggcagtcgtaaacgacggagacgttaaagtaggcgctcccgtagttgaaggcgctaaagttactgcgaaagtattggaacagggcaaacagaagaaaatccgtattttcaaatacaaagctaaatccaactaccgtcgccgtatgggtcatcgtcagccttacacaaaggttacgattgaaaaaatcgaaggctaatgattacgattacattgcagcgtgataaggagaagcgcattacggggttcgatatatccggtcatgccgggtacggcgaagctggaagcgatatcgtatgtgcagccgtatcggcactggcacagtcggcgttgttaggtctgcttgactacgatgccaagcacgtgcagtacgacgtaggagaaggctctttatccgttcatgtgatgaaagacggcgttgcgccgcaggctatactgcgcgcaatggaattaggcttaacagaaataagcaagcaatacagcgagtatgtaatactccattcatagacgtcaggaggtggacgggatgttcaattttaatttgcagctgttcgctcacaaaaaaggtaccggctccacgcgtaacggtcgtgacagcgaatccaaacgccttggcgtaaaatgccatgacggcgttctcgtaaaagccggcaacattatcgttcgtcagcgcggcacgcatttccatccgggcactaacgtaggtatcggcaaagacgatacgttatttgctacggctgccggcaaagtcgctttcgaacgctccggcaagtacaaccgtaaggtaagcgtatacccggttgaagctgaagcttaagtatgagtataaaaaatcctgcagcatggctgcgggatttttttgtattctgaacctgttatgatacgcagtaattgaatgatcaggaggaacagtatgcgcatatatgtaaatggagaagaacgaaatctgcatgtgtacgacaaaattgccggcgtagattatgccaaaaacgtcatctgtgcccaggaccgtctggatacggacgatttcggcgcgtttacgatgaccgaggaagaatttgaatactggcgcaagcttctcgtcaccttgcaggattcggaagatatccgctttgccattaaggatctggtcgatgaagaagaattaagcgactatgtttacgaagaaacgaaatacgtcacccagacgcagcaaattattgaagtagaaaacctgagccttaaagatctgcagaaggccctgacggaaaagaatacggcttggctgaaggaaaacggtttcgtcaagaccttggaaaaatagatatttctgcaagagaatactactgctggcatgttgatactatgcggcgttgttcgcatgaattacggctttgacgtgaccatcgacgcgatggacgaaacgccagctattcctgaatggattaagattgcagtaaaataagtgtcaaggaaagggactgttgcatgaagaatcattatcctcttcgtgtgacagtcccattttattatgcattgcagcacaaaagctccgcagcagaatatatctgtcaacggagcttttgtgcagtgaatgcatcactaataaattatttcaatccacaattatgcttctgcataatggctatcttattataacaaacaaattgaagtttttgaattttcccgtatagtattgactattctttttgtatatattaaaatttaataaactaataaattgaattaaaatataaacagcttttgatggcattgacgttaggtcttatctattgtatactataaatgtagtaattatatcttagcgagagatactaggttattacaataaggtccaacgtagttggtaccgcaaagctctaacggtatgccttttggcataccgttatctttttatacagacttattttggagacagggagtgatcatatgaattatgtattaggcttagatattgggattacatccgtggggtgggctgtcttggaattagatacacacgatgaacccatacgtattgtcgatttaaactcccgcatctttgaaaaagcagaagtgccgaagacgggggaatccttggctgcgccgcggcggatggcgcgcagtgctcgtcggctgacaagacggcgtcggtttcggcttcatcgcgtgaggcgatatttgattcgaaatcgtatacttgatgcgcgacaggttgaagagttgtatgttgattcgataggaaaaacagatatttacgaactgcggtatcaagcgttaagccaaccagtttccaactcagattgggccagactgctgattttctttgctaagcaccgcggtttcaaatccaatcggaaacatatcagcgacagcggcgatgaaggccagatgctgaatgctattacggaaaatcaagagattctgaacaactatcacaccgttggcgaaatgctgtataaaaacgaaaaatttaaagcctgtaaacgaaataaaggcggctcttatgcatttactgtcagtcgggatatgctggctgatgaaattcatgccttgtttgacgtacagcggagtctaggacaagcctatgcgtcagaggaattagaagaagaatatatggagctattttcagcacagcgcaattttgatgaaggtcccggtatgaacagtccatatagcggaaaccaaattgaaaaaatgatcggctgttgcacctttgaagacgatgaaaaacgagcgcctaaagccagctatgcttttatggcttttaatgtatggcaaaagattaatcatcttcgcgtaacctgtgaaggaacagatcgctctttatcacaggcggaaaaagaaacgttggctgcactcgcttggaaaaaagaaaatatcacttttaaagatattcgcaataagcttggactggatgatacagttcgatttttagatgtaaattataatttagacaaatataaaacggcagaagaagccgagaagaaggtaaaatttagctgggtcaaagaatatcatgcgattcgcaaagctttggataaggtgaaaaaagaccgtatttcagaattaagccatgagcagattgataccattgcctatgcgtttactgtctacaaaaatgatgaagccattaaaagatatttgctggaacatgctattgaactggctgacgctgaagctttattagaaaacatatcgggattcagtaaatttggccacttgtcggtcaaggcatgctataagctgctggagcccctgcagcagggccatgtatataccaaagcttgcgaaattgccggatacgatccgcagaaaagtaatcaggaaaatatcagtgatatcccgaatccagtagtaaaacgggcgttgagtcaggctttgaaagttattaaggcgattatccggcaatatggatgcccccctgtggaaattcatattgaattagcccgcgagctggctaaaagcgcaaaagaacggacagtgctagagaaggctatgaaggacaatcaatcccgcaacgaaaaaatcaaaactaagctccatgaactgaacgtcatgcagccgacggggctggatattgtcaagtataagttatacgaacaacaacagggcgactgcgcttattcgcagaagaagttcgatgtgaatcgtctgcttcatgatcccacctatgcagaagtagatcacattattccgtatagccgttcttttgatgatacataccgcaacaaggtattggtattgacgaaagaaaaccgggacaaaggcaatcggacgcctatggaatattttcaagataagccggagcggaaagaagcgtttatcaactgggtaaagcgtacgatttctgatgggaaaaaacgaaataatttactgcgcgtcaattattctgctgacgctgaaaaagaatggaaagatagacatctgcaggatacgcagtatatcagccggtacttatataattatttgaaacggcatattgaattaaaagaaggatatacagacagaaaacgacgcattattcctgtcaacggtgctgtgacagcatatgtccgcaaacggctgggtatttctaaaattcgcgaaaacggagacttgcatcatgccgtggacgccgttattattgcctgtgtgactcaaggcgtagtcaataagatttcccgctacagcaaaataaaagagctgcggcagttcatgacggcagacggtatgattgttgacaaagaaacaggagaagtactgcagactaccaatccgcgtaaaacagatcccttccccgaaccatggccgaaattccgtcaggaattggaagctcgggtcagcgacaatccggcagaagcgattgcagcgctggggctgccgacatataaaggcattgtcaatatttccgcgccttttgtctcacgcatgcctaaccgtaaggttcacgggccggcgcacgcagacactattcgtagtcctaaattgcgtaaagagggctatgtaatatctaaaacaacgttatctaaattaaaattgaagaatggcgaaatagagggctattataatccttctagcgatagacttctttatgaagcattgaaacaacgactagaggcttttggcggagatgggaaaaaggcttttaaagaaccgttttataaacctaaggcagatggaacattcggagcagaagttaaaaaagtaaagttgatagaagcggctacgttgttggtatctgtaaataatggtaaaggtgtagctcagaatgattccaacaatggaatggttcgtgttgatgtgtttggtgtcgatgaaaatggaaaacttggatactattttgttcctatatatgttgcagatacaataagagatattctgcctaataaggcgataattcaaggtaaaaaatatactgattggaaagttatgaaagatgatgattttctgttttctctatattcaaatgatttaatttatattgaatctgctaaagaaattgtcttacatactataaaagagagtacgttaccatctgattataatataaaaaaaggtttcttgtattataaagggactcacggacgtaatgcaactcttacagtagttaatcatgatggaacctatacaaaaggcagtatgggggccaaagggttactctgtctaaagaaatgtacagtagatgttttaggcaatatacattacgtgaaaaaagaaagacgattaggatttaaatgaaagtgtgatgcagaatgtatcaacatatcgtcatagaaagtggtgcaaagttatatcagaaaaacagccagctttttatagaagctgaacagattcatcatattcccatagaagatatcgctacgctgctgttagataatcgccgtattgcaattacggggtattgtttggaaacagtagtaaaaaacggcgctgtcgtcatattgtgcaacgagaaacacttgcccagcgccgttatgctgccatttgcggctaattcccggcgactgaagatgataaatctgcaggtagggcagaccaggccgcggaaaaagcagctctggaaacagatcatacagcagaagatttataatcagggacggtgtctggaactgtgcggaaaagaaaatgtagtcaaaaagtttatagataaggttaaatccggcgacagcacaaacgctgaaggaactgcggcggcagcgtactttaaagccttatatggagacgagtttattcgccatggcagcgatgtagtaaacagtatcctggattacggctatgcggtgcttcgcagttccattgctcggtatttggccttatacggattcgaacctagcttgggaatatttcatcacagcgagttaaattcattcaatttggctgatgacttaattgaaccgtttcggcctattgtcgatatatatgcatatcggtatgttggaacggaagaaaaggagatgagtgctgcagtacgtcgagaactggtccaattattaagctgcaatatctgttccggaaatgaagttcatgctgttcattatgccattgagcggacggtgcaaagcctgattcgtgcctatacagaaaaagaaaaatgcttgttgctgccggaactgctgcctttacaagttcatgcatatgagtaggtttatgcgtttaatcgtcatgtttgatttacctgttcgaacaaaggcagaacgacgggcagcaacgcagtttcgacaatttcttttaaaagacggatattatatgatgcaattttccgtctatgtgcgcttgtgcaatggtatggaagcagctaataaacaccggatgagaattttacatgcattgcctaaagcagggtctattcgtaccttgttaattacggaacgacaatttgaatcaatggaaattttatgtggggcgaattgtcaagctaagtgcaactttttagagtaatgtacttcgtatggcgttttgtatcctaaacattttcggggacggcgatttagttctgcaaaaacagcttgcacataggcttctggaacgagtgtgatgtccgtccctttcgggaaatactctcggactaggccattggtattttcgttgcttccccgctgccagggctgatgcggcggcgggaaataaaacggcacgccgttcaaggcctccgtgacagcggcatgatgggcgaactcttttcctctgtccggcgtaaggctttttacaggttgcccttgcagtacctgaagcaataccgtattgacggcttgtgctgtctttttggctgctttgcctcctaccagataccggctctttctatctaccaacgtaaccagacaggcttttcctgtctttcctgctatggtatcacattcccaatgtcctcgccgggagcggttagcggctcctgctggccgttccgaaatatcgtgagagatgggaatagaaccccgtcgttcctgatattgccgggtatgccgggattttccatgatgccgcaagcggcggaccgcaccgcgggacccatgggaggacgacgtttcatcaaacataccggcatatatggcgcggtaaatcgttgcatagctaaggagtgccttctgatgttccagctgcaagcgtccggcaatttcttctggggaccaatgatgcaccaggaagagatttttaaccaatgcgaatagctcggcattctctaaccgcttgtgaggcttgcatgccttacggcggcgggcatactgttgttgtgcggtgatgggcagatacttgccgttcactgtatttctgcgtagttcccgtgagatcgtggatttatctcggccgagggccgccgcaattcgagagatagaataggactgcgcgcgaaaaaagagtagattttctcgttcagatagagtaagatgatgatagtggcacataggtttcctccgagatatagattttgtttggtagcattattatatcagaaacctatgtgtcattttttataggtgttgcacttgtattgtaaattcgccggtgaaaaaattcccgatttagatgaaaataagaagaaaaatacagtcgttgttttgtaatttttgtgaaaaaagtgtctcgaaagaggcactttttctgcttttccgacgatttttttcatactaaaaagaacgtcgcagaaagtgtgcaacgtgctttttagcaggtatattataccttagcgagagatattagggaactacaaccattacctttatttcccgcacggaacagttattataccttagcgagagatattagggaactacaacatcacaacaaattataagtttgacaccgtcattataccttagcgagagatattagggaactacaacatgacactatacgacatttgcgccgcctggattataccttagcgagagatattagggaactacaactattctttgagtctacggacgagaatgttaattataccttagcgagagatattagggaactacaaccagcagataatgcaagtttctgcaagctatattataccttagcgagagatattagggaactacaacagttcacgttcatgggcgttagaaacgattattataccttagcgagagatattagggaactacaacccttcccgtaccggcagaatttccttgcgcattataccttagcgagagatattagggaactacaactaggacgggctctatcttcgcaatgtccttattataccttagcgagagatattagggaactacaacgaacgaacgtgaacgattgagccaaatccgattataccttagcgagagatattagggaacgataagaggacagaacagtttgacacgtcgtcattgatatattactgttcactatcattgtactgtaacatggcataattgtgaatatgtaaagttttattattttctctgtctgggcggttcttaccaaaataggatgattttatgccgttcatatggtataatactattttgtaaatgtgtattaaatttttctgcgaggagtgtctgtatgaaaatcagtgctgaagaaataaagaaaattgcactgttgtcccgcttggaaatcaaggaagaccagattgacgctgtcgggaaacagctgaacgacattttatcgtatatggatctcatgagtcaggtagatattacggatgtacagccgacggctcatgccgtatccatgtccaatgtcatgcgcgacgatgtgccccatacgtccctgcccaatgataaagcgctgcaaaatgcgccggaaccggaaaacggctactttaaagtgccgaaggtcattcaggattaaggagggatattgtggtaacgatacatggattacacgacaagctcgtcaaaggcgaactgtctgccgttgaattgacaaaagcctatattgcccgcaaagacgccgtagaaccgcaggttcaggcttttttgtcggataaccgcgaatttgcgctggaagcggctgctgccgtcgataaaaaaatcgctgccggtgaagcgattgccgatctggctggcgttcccggggccattaaagataatatctgcattaaaggacagtacgctacgtgcgcgtccaagatgctgaaaaatttcaaatcgccgtataatgcgacggttattgaaaagctgatggacgtcgattacgtcagccttggcaagaccaacatggatgaattcgccatgggcagctcgacggaaaactcggccttccagattacgcataacccctgggggctggattatgttcccggcggctcgtcgggcggttcggctgctgccgtcgctgccggcgaatgcgtatggtctctcggctccgatacgggcggatcggtccgccagcctgcggcttactgcggcgtcgtcggcctcaaaccgacgtacggcctcatttcccgctacggcctcatcgcctttgcgtcgtccctcgaccagatcggcacctttacgaacgacgtagaagactgcgccattgtgctgaatgccgttgccggtcacgacgcgaaagactcgacgtctattccgcaggctaaaaaggactacaagcaggccttggtcaacgacgtcaagggcatgaagatcggcattcccgaagaattcttcggcgaaggcctcgacgctgaatgccgcaaggccttggatgaagccattgaaacgtacaagaaattaggcgcggaaatcgtgccggtcagcatgcctcacgtaaaatacggcatcgccgcctactacatcatcgccccggccgaagccagctccaacctggcccggtacgacggcgtcggctttggcctgcgcgtcgaaggcaaggacatcgtcgatatgtatatcaagacccgttccgaaggcttcggcccggaagtacagcgccgcatccttctcggcacgtacgtcctgagctccggctattacgacgcctactatctgcgggctatgaaggtccgcacgcttatcaagcatgattacgacgaagcgctgaagcaatgcgacgtcctcctgacgccgacggctccggacacggccttcaagatcggccagaacagcggcaacccgctggccatgtacttaggcgacgtctgcaccgttacgctgaacctggcaggacttccgggactcagcattccctgcggctataaaaacggcctgcctatcggcatgcagctcatcggcaaggccctcgatgaagaaacgctgctccgtgcggcttacacctttgaacagaatagaacggacttgcgcaagccgttgcctatgggggaggttgaattataatgaaatacgaatccgttatcggcttggaagtccacgtcgaactgaaaacgaagacaaagattttctgcggctgcagcactgaattcggcgccgaaccgaatacccacgtctgcccggtctgcctgggcctgcccggcgtgctgcccgtcctcaataaggaagtgctccactttgccgtcaaggcagggctggcgctgcactgcgacattttgccgtacagcaaatttgaccgcaaaaactactactatcccgatttgccgaaaaacttccagacatcccagtttgacctgcctatctgcaagggcggctacgtggatatcgaagtcaacggcgaacagcgccgcatccacctgacccgcatccacatggaagaagacgccggcaagctcgttcacagcggcggcagcatcgacacggctgattcgtcctgtgtcgactacaaccgcacgggcgtgcctctcctggaaatcgtcggcgaaccggagctgcgcagcggcgaagaagcgcgggcctatttggaaaagctgcgttccattctccagtacttaggcgtatcggactgccgtctcgaagaaggcagcatgcgctgcgacgccaacatctccgtccgtcctgtcggcagcgacaagctcggcacgaagacggaattgaagaatatcaactccttcagcggcgtgcagaagggtattgaatatgaagccgtccgccaggcccagatcctcgaagaaggcggcacaattcagcagtgcacccgcggctgggacgacgccaagggtgttacgttcctccagcgcgtcaaggaaggcgacagcgattaccgctatttccccgaaccggatttgattcccatcgaagtatcgccggaatacattgaagaagtccgcaaggaactgccggaaatgcccgacgcccgcaagaagcgctttatggacgaattgggcctgcccgaatacgacgccaacctgctgaccttggaaaagcagacggcagactatttcgaagacgtcgtcaaatgcggcgtcgacgccaagacggcatcgaactggatgctcggcgaatttgccaagctcctcaatgaaaacggcgtaggcgctgtcgactcgcccgtgcagccggcggcgctggccgaactgctccagctcatcgccaagaacaccatttccggcaaaatcgccaagaaggtactgcctgaaatgtggaaatccggcaagtcggccaatgacgtcgtaaaagaacagggcctcgtacagattaccgatacgggcgcactggaagaactggtcaagaagatcatcgaagccaatccgcagtccgttgccgactacaaggccggcaagaagaaggctatcggctttctcgtcggccagatcatgaaggaaacgaaaggccgggctaaccccggtgtcgtcaacgagctcttgacgaaaaatttgcaatagtgtaagtactgcgcgttaacagaaacaccgcttatgccgtaatccacataagcggtgtttcttgtagttaggagatataatgaacattatagaaattaaagggaacagagatgcctatattgagcccttgacggaactgtgggaacagtcggtcaaggcgacgcacgattttttatcggccgacgaaatagcggccattaagaagtatgtgccgcaggctctgggcggcgtgcccgtattagtcgtggctcgcagcgagcaacaggccatgacggccttcctgggattggacggcggccgcattgaaatgcttttcgtctcgccggatgaacggggaaagggcattggaaaagccttgattcagcaggctgtggaacgatacggggcttgggaagtaacggtaaacgagcaaaatccccaggccgtcggcttttacgagcgcatgggatttacggtgtataaacggtcggatttggacgagcagggaaatccttatccgctgctgtacatgaagctgccaagataaggtatccataaagtatataaaaatctgccgccttacggaacgaacgcgtaggacggcagatttttttgcagattataaaaagatgtattttccaatgaagatgaccgccagaatgtacatgagcaggctgattttttctcgttttcccgtcaggacgttgaggatgacataggagatgataccgaaagagatgccttcggaaatgctgtagcagaagggcatggcaatgatggtaatgtaggccggaatggcttcgctgaaatcgtcaaagtcgatgccggcaacagaggtcagcatgaggaacccgacgatgaccagggccggcgcggtggcgaaggccgggatggccatgaagagaggtgacaggaacagggacagggcgaaaaacagggcgacgaacaacgccgtcaagcccgtgcggcctccttcgctgacgccggtagcgctttcgacgaaggtcgtcgtcgtactggtgccgaggactgcgccgaaggtcgtggcgacggcgtcagccatgagggctcccttgatgcggggcagcttgccgtcggcgtcgagcatgttggccttggaggatacgccgatgagcgtacctaaggtatcgaagatatcgacgaataagaaggcgaacatgacgatgaggaaatcgacggaccagaggcggctgaaatcgaggtgcccgaagatcggagcgatactggctggagcaaaggccgccgcgccggcagatacgtcagggattacgctgtacatgtgcagttccggattggggacgtacaggccggtcagttcgcagaggactgctaatatccatgtaaataagatgccccagaggacgttgccgcggacgcggcggatcatgaggaaggccgtaaacaagatgcccagcatagccagcaataccgtaatgcctacggtgtggaaggtgccgtcggcgacggcctgcttaaaggaaaagagggaaatcttcgtagccgggttggcgacgatgatttgggcgttgaacaggccgatgagggcgataaacaagccgatgccggcggacactgcctttttcagggtcatcggtatggcgttgaagatggcttcgcggacgtttgtcaaggataggacgataaaaatgacgccttctacaaagacggcggccaaggccatttcccacgtatagcccatctgcaggactacggtataggcaaaaaaggcgttcaggcccatgccgggagccagggcgaagggatagttggcaaagaaggccatgcacaacgtgccgatgagggacgccaaggccgtcgccgtgaggacggcgcccttatccatgccggcggcgctcagaatcgtcgggttgacggccagaatataggccatggtcatgaaggtcgtaatgccggcgatgagctcggttcttacagtcgtgccgttttgcgtcaaatgaaacatacgttcgaggaagttcataatgcaccccttttgtgaatttataaaaataaaataaaaacataggtatgattatatctttttcaggtcgaaatagcaatgaaaagggtgaaaatattttttatagtcatataaatttgtcgtatagaagatgtttttcggcaagatgctttggcttccccgtagcgggtatggtacaatatgagtacctataattggcaaacaaaggagagttacttatggcttctgtatataaagacctgttgaaacgaagaattgaagcggccaggggatcattccctgcgacttggttcttaaacactgccgtattgtcgacgtgtatacccagtctatacgggaaggggacattgctgtcatagacggcgtcctcgccggtatcggcggttcgtacgaagggcggcgcgtcgtcgatgccggagggcggtatgccgcgccgggcctcatcgacagccatatccacatcgagtcgtcctacgtcagtccggaagaattcggccgcctcgtcgttcccctggggacgacgacgattattgccgaccctcatgaaatcgccaatgtctgcggactggccggattgaagtatatggccgaagcggcggagcagactgttctggatattcagttcatggctccatcctgcgtgccggcgacatccttcgaccacagcggcgccgtcatcggcgcggaagagctggcccgggctctgcaggacagttacatattgggcgtaggggaatttatgaactatcccggcgtcgcggcagcccaggacgacgtgctggataagttagcggcggcccatgaagcaggcaagatcgtcgacggtcacagtccgggcctccatggcggcgggctgcaggcttacgccgctgccggaattcggacggaccatgaatgctccactgccgaggaagcgctggagcgaatttccctcggcatgtacgtcctcctgcgaaacggttcggcctgccgcgatttgccgaatctcatcggcgccgtcacgccgcagaacctgcgccggttcctgctgtgttccgacgatctgcatttgaaaacgatattttccaagggccatttgaacgagcacctgcggctgtgcgtgcggcacagcatttcgccggaaggagccgtcacgatggcgacgctcaacgctgccgaatgctacggcttgtcggaccgcggcgctctggcgccgggaaaacgggccaacgggccgacgtcgtcttgtttgatgatttgcaggagttttccgtttggaagacctttattgccggcgaggaggttgcgtccgaaggggcgtatattccgccttttacgcaggctgacaccagtgctgtccgtcacactgtgcatctggccggtttttctgccgacaagctgcgcatggccctgcgctcgccgtcggtccatacgatagatattatccccggcagcgtcgtgactcgcaaagggacggcgacagtagccgtcgatgaaaggggcgatttcgtatatgatgccgccgctgatatcgtcaaggtcgccgtcgtcgaacgccatcacggcacgggcaa

SEQ ID NO: 2804 - DNA, 23258 bp, synthetic construct
  source 1..23258: mol_type = other DNA
  misc_feature 1..23258: note = Synthetic
  variation 14571..15203: note = n is a, c, g, or t
ccagcacggacaatgtcgcgaactttgtcatcgtgaccaaggatgtcaaggcgcgggagaagctggccgaagagctgaaggcttctttcaatgaggagttctcggatgtacgggcgaagctgcagtacctgcagaccggcccgccgacggattatccggtcatgctgcgggtgacgggctacaatacggaaaagaccaaggaacttgctcataaggtggaagagatcgtagccgctgacagcaataattacaatgtgcatctggactggaatgagaagagcaaggtggtcaagctggagctggatcaggataagctcaaaagcctggggctgagcgcacaggcggtcaagcagatgatctacaccgaggttactggtgccaaggcggcccagttctacacgggggaccgtacgctggatatcaccctgcgcctgtcggttgccgatcgcgaggatttgggcaagattggcagcctgccggtctatctgggcagtgccggttatgtgccgctggagcagatcgccaagatttcctatggggccgaagatggcctgatcaagcgccgcaacctgctgcccacgatcacggtacaggctgaggtgcatgaaggcacggccaatgatgccacgaaaaaagcttatgaggcgacaaaggaactgcgggaaaacctgcccttcggctgtgatatccaagtggcaggagcgttggagaacagcaacaacgcttcccgcttcctgctggcgccggtgccggccatgatcttcgtcatcatgacgctgctgatgttccagctggacagcgccaaacagatgctgctgaccctgctgaccgcgccgctggggctgattggtgtggtctggggcatgttgcttacggattcggccatgggcttcgtggcggaactgggcatcctggctttgttcggcatgatcatccgcaactcggtcatcctcatcgaccagatcaagaaacatatcgcggcgggagaaactccttatgatgccgtggtggattcggctatcctgcgcttccgtcccatcatgctgacggcggcagcagccatcctgggcatgatccccctgatggccagcaccttctggggcccgatggccgtagcgatttccagcggcctgctggtggctacgatcctgaccttgctggtgctgccgaccatgtatgcggtggcctataaggtcgaaaatgatgtgcacacggactaaagttcatggataggcgttcaattgcttaaaatatacgcgatggagagacaatttaatccatttgtatgtaagtaaatgataattaatcttgttttttgtaaattgattgacaatttatgtatgccctttatataataagaaagaaggggtgctgtgcgttgacaaagactctcaattttgctatgataaagactgaaattgataatttttcttcattatcatttcgttctccaatggcagaatggggaagcaggttaccctatgaatgaattataggcgagccccactcgtttatgaagctttatgtttaaggaggatggattcgatgtttcagaagacagatttttggattggtctggctgtaggtgccgttgctggtatctttggttatcgtttcatgcaggagcgtgaagctcagctggctgctatgcagcaggttgctcccgctgctgaactgccggtagctgaactgcagcgtcagaaagaggaattggaagacctcatcgctgctcaggaagctaagaaggctaaataatcgtttattgacgagaaaagagactgccgctcttttattgcggcagtcttttgtagtatgaggaggaaaagatttgagtttcatcgggaatttccaaatccccaccaataccctggatttattcatccgctccgtggatatttcgtcctatctgcccggacgggtgcggctgtacagcaacaacctgattggcaataccgaactggaagcacagattcagagccagttgggggcttttgcagagattgacagcgtacagaccaatgtaacatcgggttccatactgatcctttatacgccggaaagactccgccagaatgcggatttgcgcaaggtggaagaatatattatgacgcatgcaaggaggaaataacgaatgtcttatgcatctggatttatgatgggcacagcgctggtacaggggctgggcagtatgttgatgggcggtggtgccgctggtgtaggtgccgctgctactggcatgatgggtgccagcaagatgatgggcgcaggccgtatgatgggctctggcagccgcatgctggggagccgcgggggagctatggggggcagaagtatgtcttctcagggctttgaaatgccggatatcaatctgggcaaattcctgaagccggtagaacctttcaagctggaatctgatctgccgggccgtcgccgttatcgggctgctgctgtttcggcagagttggccaaactgctggaggagaaactggcgaagctggattatatcgaaacgatcaaagtcaatgcggaaagtggcagtatcctgctgacttttgccgttgaggatgctgggaagattgatgccctggcaaaatggatggcggaaaaacttttcacggcgcaggttccgacggcggctcagcaggggggcgctgtcagcaagatgccggaggcgcaggcaggtatcattacccgcagcattcgtggtaccgtgcgggcaatcagcaactggataaaagaccatacgggtggtctctttgatatgagttctttggcttcgctcctgtttctcctgcgaggtttccgcaagatgttcctgaccgggcagtatccttccggttcccagatgctctggtgggcagtgacacttatgagaggatggcgcaccgtatgatgtacggaaattgttatttccatttacaggcggcccttaaccgtgaagaacgggcaaaactggccgccaagattcgccgtaaccgcaatatcgtggcggtgacggtggatgaacgcaaggtccatatctggtacaaacgccagatgacaccgttccagctgcaggaaatccagaagatgctgatcgagacggtcaagcgtctgcaggaagcagctatcacgccagccgaaagactggctgaataccgtcgtgatgcggtgatctccctggcaggttttgcggccatggaagtgctgaaacgcacgtcgccgcagctgttcgtgggcacgaagatcatgcgcagcctgctggtgctgggcattgcccgcaagttcatccagaacggcgtgagcggtgtggtcaaagaccatcagcccaatgccgataccctgaccgctacggcggttatcgcttcggtgctggccggcaagcctgagtccagcctgacgctgctggccctgtccaatggcgctgaaatgctcacgagctatgcggcagaaaaggcccgtacccatatctccggcctcctgtccctcgaccagcgctatgtatggctggtggaaggcggcacggaacgcaaggtgcctgtggaacacgtcaaagtaggcgacaccattgccgcccatactggcgaaaagattgtcgtggatggccgggtggtcagcggcgatgccgccgtcaatcaggcctccatcactggtgagtccaacccggccatgaagcatgcggattctcctgtctatgccggcagcgtggtggaagccggggaactcatcatcaaggtggagaaagtcggcaaggatacatctttggcgcatatcgtccatctggtggaagaagctcagaaccgcaaggcaccggtgcagaactttgccgataagatggccaacttcctcgtgccggtatcctttatcggtgcgggcattgtctacggggcaacccgtgattggcagcgcgtgctgaacctcttgttcatcgatttctcctgcggactcaagctgtccacggctacggccatgtcggcggcaatcggggctgcagccaaacgcggcatcctggtcaagggcggcaactatatcgaagccctggctgaaacggatacggtggtgctcgacaagaccggtacgctgacggttggcgtgccgcagattgccttcatcaagacggccaaaggcgtggaggaaaaggaaatgatcctgctggcctcttcggctgagcagcattccgtccatccgctggcggtggccatccagaagtatgtggaggagcaggcatggacttccccgcagcataagtcctcgaaaaccatcgtggcccgtggcatgcaggcagaagtaccggcctttgaaggctataagggcggcttgatccgcgtgggcagccagaaattcctgcgggaaaatggcatcgaggatacggaaggcatggccgatgggctggccttcaagaacctgctctatgtggcccgcgacaagcagctcatcggcgtgatcggcatcgaagaccccatccgccccaagatgaagaagacgttgaatcagatgcgccgtcacggtgtggacgagattgtcatgctcacgggtgacagcaaggctgtggctgccgaagtggcccatagcatggacatcgattcctatcatgcggaaatcctgccggaggacaagagccattatgtgaacaagctcaagcagcgcggcacggtcatgatggtgggcgacggcatcaatgatgcgccggcactggccttctccgatgtgggtgtgtccttaggcggacggcagacggatatcgccgctgaatcttcggcggtgaccatccattccgaagatccggaacgcctgattgaaactttgcagctgggccgacgtaccatggatctggtgcatcagaacttcatggctaccattttggttaattcctcggctatgcttttgggcgctttaggcaagatcagccctctctgggcagcggtcatccataataccgcgactctggctgtggtgctcaacagctgccgcattctgaataacaataagtccggtttctttgcccgcaataaccgtcgggcagcctgatgtggaaagagggatggatatgcaggcagattggaagaatttaccgctgggactgccaatgacattggcatccgtgggaacgctggccacgctctttgccgggaagaatctccatgccggtttcggcgtggcctgggcggcactgtctttctggcatggctggcagcatcataagaagatgcaggccgatgccaggaagctgacggactgctgccggacgaaagaagctgagacggtggaaccgttgcaggctttgctggacagctttcaggtggatgcttatgtgccgggacgggtacgcctgcgcagcacgctgctggcggcttatcctgagtgggcgcaggatttggaagcctatataagatcctttaccggcgtggaaacggcggtcatcaatacgctgaccgggtcgttgctcataacctatgatgcggcgaagctgcggcagaaaccgaaactggctgagctggaacagcagatagcaaagctggcatcagctaagtagcaaagtcggcggcaggtacatattttgcgggctgcactgaatggctggcatgatttgagaaataaattttttgacagtatgagttagacgcgttataattgaggtagattcaaggaactaacgacatagaaacacaaaaagaccctcggtagatgaatggcctggaaaactaatcatctccgggggtcttgcacgtttggcgaccgtgctcagtcggggctggctgcttaaagcaggtgtctgtcaagccacttgcaaatataatatgcgactatacttgccattacagacccaaagaaactaactaacgacatatgtccacacctcccctgctgccgaagcatagaggaaaagcagcagattaagtatagcatacgtctgataaagactcaatgatgtaaatttcgcatctgccttaaataagacatcattattagaaaaccttagaaaaacgatgattataattagtaaatggttttggttttatctcatttatatagagctgcaattttaagggatatgggtgggagctatgaataattcggtataaaaaggagctgtgagcaaaatgctttcgcattttgtcgcagctcgattttttacgtcacaggagaagcatattataaatttttccaagctctagtacgtaaaaaggttaagagtccataagttgtccaatcataaatatttacgtttttttcattaactttcaaaaattgacctttagaatttcggttgtaagtaccattaaatatatcatcattttggctattacgtatcatttctgtccaagacttatatttttgacttgaatatggagtagattcatctttattatataaaagaataatattggtatcagggttataatcaaaagtaatgcctaataatccatcttcagaaatcattttatacttaccaccaacgccgctggtatttctggagatagtcatggtagcttgtgaactcatcggtgacaggattttgttatcatgattatattgcatgatttcatcaattagcgatggataattactagaaacccattctaatatacgttcttcaacttccccacaattccagccgttttttatatttgaaatattaccagtccatcgttggggattatagaatttattgtatccttctaaagtgacaccaacgcacctttctatatcgaaaaccaaatgccaatcaccggtagttctctcgatatatttccatgtaaaagattggatatccggcgctttacgtttaaatctgatttctagatattttcgtccatcatattctatagcctttatagaattggtatcagcataaaaaatagtatagtcatcaaggctaaaacattttgcccaattttcgtttttcccagctgccaaacaagttgtgcacaaacacattatacacaataggcatagcgttaaggttttcattaattcctttttcattacaatcaccataatcctttcaatgattcaacactgcataaagcattatacgcttccccattagggctgtcaacttcccactaagcaattcagtttggcctttggcaaaactgggataattgcgttataatgtatacaagaataatgtagaggtgagatgaaagcctatgaagatagtggtaggaataaccggggccagcggcagcatttatgcgttgcggctcattgaggtcctgcggcagctcgggcatgaggtgcatgcggtggtgacggatagtggctggcaggtgctggactatgagtgcggtgtgagccgtgaagatttggctgcgcgggtggatgtgctctatgataatgccaatgtgggggcggcgattgccagtggctctttcaaggtggatgcgatggtcgtgctgccctgctcgatgaagaccgtggccagcattgcccatagcctgtcggataatctcctgacgcgggcggctgatgtcatgatgaaggaagggcgcaagctggtgctggtgccccgggaaacgcccctgcatgccatccatctggagaatctgctcaagctggcacagctgggggtaaggatcgttcccgccgcacccggcttctatcatcgcccgcagacgctggcggacctggtggatatgctggtcgggaaaatctgcgaccaattgggtgtcgagacggatctgtttgcgagatgggagggctgagatggctggcaagaaagtgtatgccgtgcggaatggacggaaaacggggttattcacgagctgggcagagtgcaaggcacaggtggaaggtttccccggtgcccgcttcaagggattcctggatgcgaatgaagctacgaaatggctgaatctggattatgtgccgccttatggcggcgggaagaaggcggcatccgggcaaaaaaatacgcaggctgagcctgcggtggatcatgatgatgcgccggactatatcatctatacggatggttcctgcctgcgcaatcccgatggccctggcggctgggccgctgtgattgccgaccagattcagggccagcttacggaactgcatgggggcgaggcttcgacaaccaataaccgcatggaactgacggcagccctgaaggcgctgtcctttgcccggcaaaacgcggtgattgacctctataccgacagtcagtatctgaaaaatgcctttacgaagaactggctggcaggctggaagcggaagaactggatgactgctgcgggaacgcccgtcaagaatcaggatctatggcagctgctggacaaggcctttgcagaacatcaggtgcggttccattgggtgaaggggcatgtcggtgtggcccagaatgagcgctgtgatgagctggccaaggctgaggccatgaagtatatgtgaggttgtgctgcgtggctgttcattggcggactttggccgggattacgcccagtccggacagcagcgcgaagaacagcagggcaagctgcaggttttgcagcagggtttcctgcaaggacagcccgtcccagctcagagaaaggatcaggttcatcaaggctacactgagcacctgtcccactaagcgggtggagctcagcaggctggcggccaggccgtaatgtttcttctccacggcactcatgatggcgttgttgttgggggcggcgaacagtgcaaagcctgtgccggtgatgatgagcatgggaatcatcagccagagcgcgagattatggatggtcagggcaaaacctgccaggccagcactgatgaccgccatgcccagagcggccagttttgtcggtgcgtatttatcggaaagcttgcccatcagtggtgagagcaaggccatgatgatgggctgggacaggagaatcagtcctgcgctgcgggaagtcatgcctaagatggattgcagatagagggagagcaggaaactggcagcaaaggtgccgcagtaattcagcagcgccgccaggcaggacagggaaaagggcagattgccctgcaggagcgtgatgggaagcaggggattttcctgccggagttcatagcggcagaacaggaaaaagagcacgaggcctcccaacagcagaccgggagccagaggctggctgttgagctgggacaggccatagatgatcaggagaatggcgccgccgtagaggacggcgccttttttgtcccaatgggggctggtatcctcataccattcttcctgcaggaaacggcgggcggccagaaaggcagtgccgccaatcatagccagtacgatgaagatgcttggccagccgtaataataattgaggaagccgccggcaaccggccctaacgtgagtccggtgtagaccaccgcgacattccagcccatagcccagccgcggcgctccttgggaatcaccaaagtcaggatggacatggaggtcgcaaaggtcatggccgagccaatcccctgtgccgcccgggccgcaaggagcagcggcagattcggtgcaaacgctgctaaaagcgaagtcagcgcaaagatcccgttgcccatgatgaagaaccgccgcttcccgtagcggtcagccagcttgccgaagggcagaagcaccacgatggccgccaacaggaaactgccgagcacccagcccaaagcagcaggactcgccccataggcttccccaagagagggcaaggccagattgagcgcactgccggcaaagggagtcaggaaagacgtgagcatgatggtaaagagtattctgcgttccataagataatgctccttgaattgtgatttttttcagtatactgctattaatattgtttggcaagaaaagcagatagaggatataataagtattgacagaatatttcatccgttttataatatgtatgtaattgcttattgtatcatagcgaggtatattaggttattacaataaggtctagctgttagctagcaccgcaaagctctaacggcttgccttttggcaagccgttatctttttatgaaaaagagtgataggggagagcattcatggaacaacgttatgtattgggattggatataggaattgcctcagtgggatgggcggcattggcattaaatgataaggatgagccatatcggattttggacttgaattcgcggatatttccgaaagcagaagttccgaaaacaggcgcgtctttagcttctgctcgtcgtactgcgcggggggcgcgacgcagattgcgacgccgtcgtcatcgcttagaacgtatgcgcggatttcttgtgagtgagggggtattgacaagggaggctatgttagagttgtattcccagccggtgcctgatgtttatgaaatacgttatgaaggattacagcgcagattaacaccagaggaatgggcaagagtgctgttgttttttgctaagcatcgtggtttccaatccaatcgtttagctggtgaaggaacagatgaggaaggtaaagtaaaagaagctctcaaggataatgttgagttattggttcgctatcgtaccgtaggtgaaatgctatataaggatgaaaaatttcaggcacataagaggaataaggcttctgactatcaaatgacggtcagccgtgctatgttgagggatgaaatagataaactttttgagatacaacgaaaacagggaaatccatatgccacgctggaatttcagaaaagatatttggcaatattttcggcacagcgtaattttgatgaagggcctggtggtggaagtccttatggtggcaacctgattgaaaatatgatagggctttgtactttggaaagggatgcgaaagagaagcgtgcacctaaggctagctattcgttcatgcggtttagcttactgcaaaaacttaaccatatgaaaataaaggaaaatgggggacggcgaggtctgaccgcagaggagcgtcagtgtttggaaaaattagcttggaaatcaccttcgctgaattatgcgcgtttgcgcaaggaacttgaattgcgtgatactgagctgtttaatgatttgttttatggacaggatattgaaagtaccgagaaaaaagcaagttttaattatacggtagcatatcatgaaatacgcaaggctttggataaagtggaaaaggggtacatacaacgtttatcttcggatgaactagatattattggttatgccttttcggtattcaagcacgaagaaaatttgcaggcatatatgaaaagtcatggaatagctgaagaggttattcgtattttgcttgcgaatttgaggccatttcgtaaatttggacatatatccgtaaaagcttgtcggaaacttatgccttatttagaacagggtatggtctattatgatgcttgtattgcggctggttataaattgtcaggtgaagatggggagagacgcaaatatctgtccggttatatggaagaagtaagggatattcctaatcctgttgtacgcagatctatatcccagaccataaaggtgttgaatgcgattattaagcgttatggcagtcctgtggaaattcatgttgaactagcaagggaaatggcgcgtaattttcaagagcgaaagcaaatacaaaagcaaatagatgacaatagcaaatctaacgaaagaataaagcaggaattgatagaaaatggtctattacagcccaatgggctcgatattgtaaaatggaagctatataaggaacagcagggtgtttgtgcttatagccaaaagccgtttgatataggtcggttattgcatgaagggaagtatgcagaggtagaccatatcttaccatatagtcgttcgtttgatgacagttatgtcaataaagtgctggtcttgacagacgagaaccagcacaagggaaatcggacacctatggagtatatggaaaatgatgataaacgattgatgacctttaccacttgggtagaatctactattcgtgattttcgcaaacgtcgcaacttgttacggaaaaattattcttcagaggaacaagattggaaagaacgtcatttgaatgatacgaagtatataagtcgttttgtgtataatttgctacgagaacatttgatttttaatagttttatgacagggagaaaacgtcatgtgttggcggtaaatggtgcaataacagcttatgtacgtaaacggttagggatttctaaaattcgagaaaatggagatttgcatcatgccgtagatgcagcagtgattgcttgtgtgacacaggggatggtcaataaggtacaggaatacagtaaagcaggagaaatgtggggacatgccaaggctgaacaattccctgagccttggcatggctttcgtcgtgagctggaagcgcgtgttggtgtgaagcctgctgagaaattgcgagctatgtgtgtgtcgaattatacagatgatgagttgcagacggtaaaacctatatttgtgtctcgtatgccgcaacataaagttcgagcgacagctcatgaggacactatacatagcccaaggctggtcaatgaaggtttttctgttcagaagacgaaactatctaaattaagattgactaatgatggaatgtcagttgcagattattataacccatcatcagatgtattattgtatcaggctattttaaaaagattgcaggcttttcaaggagatgcgaaaaaagcatttgcagcacctttttataaaccgcgggcagatggttcacaagggcctttggtaagaacaataaagacagtgaaaaaaacggatgctcaggttatgataaatcaaggaaaggggatggctgataatggacggatgttgcgtgtagatgtgttttatcgtgcagaaggcaaggggaaaggatattaccttgtccctatttatgcggcagatgtagttaaaccggttttaccgttgaaagcagtggtggcaaataaaccttatgcagattggatggaaatgaaagcagatgaatttattttttcgctctatcaaaatgatttattgttggtacgttcagaaaaaggagttgacttaagtccggttgacaaaaatagcgtattaccaaaggtgaagaaacaggtagctttattgtattatcaaacaacgaatcgaaatacgagtgcagttacggtgattaatcatgataacacatacggtcaaggttctatggggattagaaatattacagaaataaagaaaatgcaaattgatgtattggggaatataacggaggcaccccaagaggtacgcagagattttagaaggatgaagaaagatcctcatgcaaaggtgtgagtattatgtatcagcaggttataattgattcgcgggctaaaatatatcaacgaaatcatcagttatgtgtaaatactggtgaggtgtatcatattccgatagaagatatagatactatagtgattgccaatcgggaatccagtataacggtggcctgccttgattcattggtagaaaatggcagttcggtgttgatttgtgggaaaaattatatgccggaggggattttattgccatttggggcatattctcggcgtttgcgtatgataaagtatcaaattggacagggaaaacctgcggttaaacaattatggaagatgattgtgcagcggaagattgctaatcaagggcgttgcctgaccttggctggtaaacaagattgtgtatcggctatggtagatcgagttcagtcaggggataagggaaatgtagagtccatagcggctgccagatattttaaggcgttatttggttcatcatttgttcgtcacgatatggatatagtaaacagtatgctcgattatggctatgcaattttacgttcagctatcgcccgttatttagcagcttatggttttgaaccatgcttggggattcatcatcatagtgaggttaatgcatttaaccttgctgatgatttgattgaaccttttcgcccattggtggatttatatgccagtcaaaagggagggatggaagtaggtgagctaccacagtccgttcggcaagaattggttgggttactatcggtgaatgtattgatgggaaaggagcgggttagcgtgagtaatgctgtggaacgtgtggtgcaaggcttagcgcgttggtatcaggatgcggcagagcagttggtgctgccccaactgctcccgttaagtctgcataactatgagtaggtttatgcgtttgctggttatgtttgatttgccagtcacttctccagctgagcgcaaggcagcaacaaagtttcgcaaatttctacttgatgatggctactatatgatgcagtattccgtttatattcgtatatgtaatggcaatgagaccgcgcataagcacttggcaagacttcagaatagtattccgcttgctggctcagtgcgggcaatcatgattacggaaaagcagtatgaatccatgaagatactttgcgggcagaaaaatgtggaatttgataaaaatgcagctcaacagatggtgttggcattttgatttatgatttttacaaaaaaatccccctaagtcgttaagtgattcagggggatttcggtgtggtattgtaccatagcgaggtttattagggaactacaacnnnnnnnnnnnnnnnnnnnnnnnnnnnnnnnnnnnnnnnnnnnnnnnnnnnnnnnnnnnnnnnnnnnnnnnnnnnnnnnnnnnnnnnnnnnnnnnnnnnnnnnnnnnnnnnnnnnnnnnnnnnnnnnnnnnnnnnnnnnnnnnnnnnnnnnnnnnnnnnnnnnnnnnnnnnnnnnnnnnnnnnnnnnnnnnnnnnnnnnnnnnnnnnnnnnnnnnnnnnnnnnnnnnnnnnnnnnnnnnnnnnnnnnnnnnnnnnnnnnnnnnnnnnnnnnnnnnnnnnnnnnnnnnnnnnnnnnnnnnnnnnnnnnnnnnnnnnnnnnnnnnnnnnnnnnnnnnnnnnnnnnnnnnnnnnnnnnnnnnnnnnnnnnnnnnnnnnnnnnnnnnnnnnnnnnnnnnnnnnnnnnnnnnnnnnnnnnnnnnnnnnnnnnnnnnnnnnnnnnnnnnnnnnnnnnnnnnnnnnnnnnnnnnnnnnnnnnnnnnnnnnnnnnnnnnnnnnnnnnnnnnnnnnnnnnnnnnnnnnnnnnnnnnnnnnnnnnnnnnnnnnnnnnnnnnnnnnnnnnnnnnnnnnnnnnnnnnnnnnnnnnnnnnnnnnnnnnnnnnnnnnnnnnnnnnnnnnnnnnnnnnnnnnnnnnnngattgtaccatagcgaggtttattagggaactacaacacataagcgggcaccggttttgggcagcagattgtaccatagcgaggtttattaggaaaagcaaataatagccgaggatattttgtgaaaaatgttctcaattattactgctgacacatgactgatacaaaaatacggaacagctgaactattccagtcagttgttccgtactataaaccaaagccttcatacattagatgaagatctatgcgttcaaagtggtggagacgaaggggattgaaccctcgacccccagattgcgaacctggtgctctcccagctgagctacgtccccgatttaatcgtaatagtagttcatttctgaacctttttcagtataccgcgtttgttattgttttacaagagctggtcgggaaatttgtttttttattgctggatatcgtatttattttgcatgaaaatgttttttcgtagcaggaaaaaggtattatattggcgaaatgggaaaacagtagacctatggaatatgggcgttattagtccgatttatcaaacgatatccttgctttattgctttggaaaaataaataagatttatagcgaattattatagggatagatatggaattttgtattttttcagcgtataataaaggagttcgctaatagattttctttatgacatcgtaaacgagccaacggtgtaatgaatctaaagcaattttgcaaggatagaaatgaggaggtaaaacagtggacaaacgggagagtatgtgggatgtatatctcagaaaaggcatgagccgccgcagcttcgtgaaatcttgcgtagctctgacttccctgatgggactcagcacggaccatgtgtccaaggtggtggaagctgccgaaaagaagcctttgccggtagtagtctggattcacggccatgaatgcacggggtgtgatgaatccttcatccgttccggtgcaccgctcgcttcagacctggtgctgagccagattgcgctggagtatgaccatcttctgagtgccgccagtggcgagccctttgaggcacatctggaagaaaccatcaaaaagtacaagggtcagtacattctctgtgtagaaggtgctgtctgcacgaaggacaacggtgtttactgcatgtccggcggcaagcccttcatcgagacattgcagcacgctgcccataatgcagcagcggtcatcgcttatggtacctgtgcggtatccggcggtatccaggctgcgaaaccgaacccgacggggtcagccggtatcgctcattttgcaggcaagacgccggtcatcaatgtaccgggctgcccgccgattccggaagtcatgacgggcgtcgtgatgcacgttgccctctttggtacggtaccgccgcttgataacgagggccgtcccaagcagttctatggcaaccgcatccacgatacctgctatcgccgtcccttcttcgatgccgggatgtttgcggaacgcttcgatgatgccggcgccaaagctggctggtgtctctacaagctgggctgccgtggccccgagacctacaactcctgcggcaacctgcgttggttccagggcatgagttatccgattcagtccggtgcaccctgcattggctgctccaatgcccatttctgggaggaagatccgatgaccacccgcatgccggagtatggtcccctcgggaatgtggataagatcggtgccgctatggccgttggtacggctgccggcgtagctgtccatggtgctatgagcgtcatccagaagcagaaacgcgaagcggaagaacatgagaaggaataagggagcaggtgaataaatgaaacatgtagtagtagatccggtaacccgcatcgaaggccatcttcgtgtcgaggttcaggtagatgaagcaacgggcaaggtcacagacgctgtttcctccggtaccgcctggcgcggtctggaacttgtcatgaaagaccgtgacccgcgtgatgcctgggcatatatccagcgcatctgcggcgtgtgcaccaccgcacatgcccttggtgctgtccgtgccgttgaagacgcactgggcattgccattccgaagaatgccaactatatccgcaatatcatggcagcaacccttacggttcaggaccatatcgtgcatttctatcatctgcacgcattggactgggtcagcccggtagaagctctggcggctgatcccattgccacggctaaccttcagactacgctgctgaatgcatacagactgcctttccgtgcgccggagacttccacgacggaagcctatgagcatgatttcccggctgctacgcctcagtactttgaacagatcaaaggcaaggtaaaggctatcgtcgaaagcggtcagctcggtatcttctccgccaactggtgggatcatcccgattacaagctgctgccgccggaagttcatctcctggctgtggcacattatctcgaaatgctcgacaagcagcgtgaactcgttacgccgcatgtcatcttcggcggcaagaacccgcatccgcattatgtggtcggcggtatgccctgctccatttccctggacgatggcaatgcaccggtcaacacggccagactggagatcgtggaccgtgccatcaatatgggcagaagcctcgtgaacaattattatctgcctgacttgctggcaatcggtgcagcatatgtcaaagccggccgcgtcgatggcggcggcatggccaagacctgcgtgctgggttatggctcctatccgatcgaaggctacacgggcacgtccgatggcggcttcttcaagaaccagctcatccgttgcaacggcgtagtcgaagatttcggcaagggcattgcagccgctaagttctcggaggtaacggcagaagatgttacgacggaaaatattacggaaagcgttgaccacgcttggtatgagtatcctgccgggaagaaagacctgcatccttgggatggcgttactgcgcctaagttcaccggtcctaaagagggcacggcgacggattggaaggcgctcaatgagaccggcaaatattcctggctgaagacgccgaaatggaagggcaagctctgcgaagttggcccgctggctcgctatatcatcatctacaccaaggccaagaaaggcctgctgccggaaccgacctgggcagagaagatgatgctcgatcagctcgatgcagtttccaaggtcctgggcctggctccggaagtatggctgccgacgatggttggccgtacggctgcgcgtgcgcttgatgcacagctcaatgcagagatcaacaagttcttctttgataagctcattgccaacatcaagtctggcgatacgaaggtagccaactccgataagtgggaaatcagcacctggccgaaagactgcaaaggtgttggcctctacgaggcaccgcgtggcgcactgtcccattacatccatatcaaggatggcaagaccttcaactaccagtgcatcgtgccgaccacctggaatgcctgcccgcgtgacgataacgccggcaatggtgcctatgagatggccatgaaggacacgcaggtgaaagtgcccgacaagccgctggaaatcgtaaaggttgtccgttcctttgacccctgcatggcttgtgcaacccatatgttcaatgccaagggtgaaaagatcaatgtcattaccacggatccttattctggtacccgcgttgacaagtaatctgcagaaaggaaaaggctatgaaacaagtagttcgcagggaatattacctgtttagtccctggctgcggatttttcactggattatggtggtgagcatctgcgtgctgttcgctacaggcctgatgatcaccagcccatggattatctattccgcagagccgacgttctctggcatgacggtagataacatccgcaatatccatttcctggcagcctatctgtttagtgccgcgtttatcctgaaaatctacggctttatcatcaatcctggtgatcggctgttcccccatgtgtggaagggatatttctacagcaatacagtagatgtggcactgcattatatgttcctgagatcggagcatgcttcttatctgcgtaacccgctggcacgctgctcctatgcgttcctgtatgtactggtgttcatcgagatcctcacgggtttcggcatctactatatgacggatcctttcggcatcggcggcaccttgttcggctgggtgattacggtgctcggcggcgagatgatggcacatctcgtgcatcattatgtggcctgggcgattatcctgtttgccatcggccatctctacatggttatccgtgctgagtttatggaaggggagagcgaggtttcctcgatgttctccggcagcaagatcctggcgcatgaaccgagagatgctggtcacctcgatgggacgctgaagtaagtcttttgttactgaccactgggcaagattggctagcggttatagttagtgcgtaatttctgtacttttctttggtgcaaagaaaagtaccaaaagaaacagcggactgaaatcgcatcacgcgatttacgtccgccggcgctcttccttgagcgccgggcaacgataacgcacgatttgattcaataaaggaggctttgcccatgtgtaaagaatgtggttgcgggcatgagggtgctgcgaatacccgcctgcagtttacggtgcatggttatactgaggagatcgctcaggaagtggaaaaagaacttctggggatgcccggggtactgtatgtccatatccatgcccatgatggtgagaccacggtggattacaatccggagaagacgaagctcggagagatcctgaaggctttgaatgatcgcggattggatgccatcctgtaagtcacagctttggattacgccttccctgcccttattagtgttggcgggggaggcgttttcattatgtatcagatgggggaacactcccaacaagatgctttataaaaagggtgaaaagttatgcatgaaatggccattgccgagggcattctggatattgctttggactatgcaaaacagaatgctgccaaaaagatcaatgaaatcggcctgcttttgggtgaaatgtccggtgtcgaggtggattccctggaattttcctttaacatgctggtgcagggaaccattgccgaaggggcacagcttaagataaaacatgtgccgttggtgggcaggtgcagcaaatgcggcagggaatatcatatcgaacattatgatttctggtgtcccgaatgcgagaatggcgtgcttacgaccatcagcggcagggagatgcaggtggaatatctggaggttgactgaatatggaaatcaaggttatcaagaatatcttaggggaaaatgaccggctggccgctgaaaatcaggccatgtttgcggcaaagaaagtgttcgtgctgaactttatgggttcgccgggggcgggcaagacttcagtgctcgaaaagacgatggagcggctcaaggataagatcaacatggcggtcatcgagggcgatcttttcacgagcaaggatgcggagcgcatcgacaaatacggcgtaccggtcatccagatcaatacggcaggcggctgccatctcgatgccaatatggtgcagaagaccgtcaaggaaatgaatctggacgagctggatttactggtggtggaaaatgtgggcaatctcgtgtgcccggcagaattccccgtgggtgaagatgcccgggctgtggtgctctcggtaacggaaggagacgacaagccgctgaagtacccgctgatgttcaaggaaagcgagattgcattgatcaacaaggtggatctggcgccctactgcaatttcaatatggagtcagcgaagaaggatatcacgagcctgcatccgggcatcggggtgctggaggtgtcctgcaccaagggcgatggaattgatgcctggtgtgactggctgctgcagaagattgcggcgaagaaaggaaactgattatggcagatgtatttacggcaggcggcacatcctctttggataatgtgctctataagacagaagtgacgattttgggcatcggcaatatcatcctgcgggatgaggggtttggtgtgcgtgtggcggaatatctcgacaagcattatgagttcccggagcatgtgcagattgtggacggtggtacgctggggattgagctcacgcagtatgtgacggggacggagaagctgttggtgattgattccatcaacggcggtgccgagccgggtacgaccttccgtttccataatgatgatgtcatggagcattttcaggataagctttcggctcatgaagtcggcatccaggatgtgctgggactgctgacggtcaccgggcataagattcccgatgtggtggtcatcggcgcccagccatatgatgtggaggcgggcgtggaactgtctgacggcatgatgaagcttttgccggggatggtggaacaggcactggcggaactcaaaaactggggcattgagccgaaagtgcggacgggcgttgctgatatggactataataaagttgctgaggacttttcggctgtcagatgatgcgtggtggcttcgggcggcgggggtgttgtgcttccgcttagactgtccgctaaaagtattttttgcccttatgtccgtaaaaatgcctaaactcgctgcgctcaaacagtaggcattttggcggacggcaaaaaatactttcttaacgcggacagtcaaacgctccagcacaacacccccgccgccctgcgccaggcaaatttgctgtaaaatagctatgttgttcggcacaaagagaggctgataggcagaatttgtttgttgttaaggataaagtttgttagtaatacgctgaaagtagaaaatagaaagtttccccctctggggggaagtggtgcgaagcaccgaaaggggcaacaatgaatctgtatcgttgcccaccacaaatggaggtagataatatgtgtttggctgttcctgccaaagtgattgagataaaggatgccatgggtacggtggatattgctggtgtcacccgtgatgtgagcctgatgcttttgccggagacgaagattggcgattatgttttagtccatgccggctttgccatgcagaaggtggaggagaaggatgcgcaggagacttatgccttgatggcggagatgcgcggagcgccgaggacggtggataagctgtgacgggacaggagaaactgacgaaagctgaggagcgggagtttgccagagaactcgtaacgaagattggtgaactggccgcgtccacggggcgcaagctgcgctttatggaggtctgcggcacgcatacggtggcgattttccgggcagggcttcggcagatgctgccggaaacggtggaactggtgtcggggccggggtgtccggtctgcgtgacgccggacgattatatggacaaggccattgcctatgcggaacgtgatgatgtgatcatcgcgactttcggcgatatgctgaaagtaccgggttcgaagtcgagtttgaacgaggccaagaccaatggcgcagatatccgcattgtgtattcgcctatggacagcattcagatagccaaagacaatccggacaagaaggtcattttcctggcggtgggctttgagaccaccgcgcctacggcggcggctacggtgctggctgctgagcagcaggggattgataatctcttcatgctttctgcgcagaagctggtgccgccagtcatggaaaccctgctcaatgatgaggaagtccatgtggatggttttatcctgccggggcatgtatcggttgtcacagggactggtgtttatgagccggtcatcacgaaatatcacgtgcccggagtggtcacggggtttgagccggtgcagatcctgcgggggctttaccgccttgtgcagcaggtggcaaagggtgaggccagagtggaaaatgagtatacggacgtggtgaagcctgagggc

SEQ ID NO: 2805 - DNA, 23246 bp, synthetic construct
  source 1..23246: mol_type = other DNA
  misc_feature 1..23246: note = Synthetic
acaaaagcactattggaaaaagcaaaagatggaacatttacagggaaagtggatggcagtcacggaagctcggcagtgatgaccattaccattaagaatcacaaaattgtggcatctacctttgaaggatttgacaaaaacgggaatccgaaaaatgaagaatacgggaaaacgaatggaaaagtagaaaataaagtgtactataacaaagcgcaaattgcagcgaaagcattcaaatcttatgcggatgccttagtacaagtccaagaactaaacaaagtagacggaatctccggtgccacagctgcgtataaacaattttttgacgctgtacaattagcactggaaaacgcagggaagtaagtagttgagagatgaaataagacaatttattatatattgatatcttaaaaatggagacaattagtaagtttctttacagcatggaggctatctatattttgtgggtagcattcatgctgttttttgcagttatgatggctaaataatttcgtttgttatgcattaaaaatgcgaaactcctttattctattggagcttcgcatttttaactgtaaaaacaggggtataaatatcgaaagaaaatgtacacattcactcaaatttttatcgtcaaatcatcagatttatgataaaaggcagattgaatatgcttgctattccttaaacgcttcgtaaagttgttttagaccttgttctaaggttactcttggacaggcgatattcatgcggaaataaccgttgccttcttcgccgaacatgtcgcccatatccatccataaatgagcttcattgacgattttttgctccaatgctttgggagaaagtccgtaagcattgcagtcaatccaaagcagataaagtccttccgcttttgttaatttcatcttaggtaaatatttcgccaaaaaggattccgtataatttctattgtcgctgatatattccttgacttttataagccattcttctccgtgacgataagcggcttcacaagcgatgatgcccatgatattcacttcacaataaccgaaagtggcttcgatagctaagaatttgtcgcgtatttctttattggcaatccagatattggaaatttgaagaccggcgatgttgaatgttttgcttggcgcggtacaaatgatggcattattttccgccttttcccctaagctgccgaaagtggtgtgatgataacccggaagattgaaatctgcatgaatttcatcggcgatgatcttcacattgtgtttgacgcaaatatccaagtatgtttgtaattcgtctctcgtccaaatacgaccgaccgggttatgcggtgtgcatatgatggctaatttcacatcattgtcaatgattttttgctccatatcggcaaagtctatttcatagtgattatctttctttatcaagggactattaatgagacgacgtttattgttattgattccttccaagaaaggataatataccgggcgattaactaaaacagcatcgccttctttggtaagggcttgtatgccgatattgatagccggcacaatgcccggcgttttcactaaccattcactcttcggcgtccagtggaattgtttggtaaaccattgagatacagcgtcaaagtaactctcttttgtatcagaatagccgtaaatgccatgttttactcgttccatcaatgcttctgttattgcaggcgctacgggaaagtccatgtcggcaatccaaaagggaataaggccttcaggcataccgttttccttagcaaaatcatatttctttgaattggtgttttttcggttaattacttgatttaaatccatttgtagtaaactcctccctatggttcgttaaaagaataattccattccttttactcattatacttcgtttgaatgaaattgaataggagaaaagtgattttttgaaaaaataaaaagcaagaaattctttaccgagataaaaattgattttatgcacaaaaaaagcctccgcacgggaagcttttttattgctgattatcaaattaattaccaaaagggtctttgttgtctgccttaggcgtttcaggatttttgcaatatttgatttgttggcaaatacatttatctttcaatttatataattccggaaggaaatccatgattttggaaaaggtagtgtcattgatggaatatttcgtccataacccttctcgatgagcattcactacaccggcttcaatcaatattttcatgtgatagctgagtgttgattgagataaagtgaaattagataaaatgtcgcaagcagacatttctcggcaagacaacatatcgatgacacgaagtctcgtttcgtcggagagtgccttgaaaatagcggcaaattctttatagctcggttcaaaattcatagttagatctccttttttattgtactacatatattccaaacatatttataatactattagaatgagtgatgaaataaaaatacctacattcttacgcattatgtaattttaagtataatacttttacatcgatgtgtctacatatacttagtcttttttatattagaaaatttttattttttgatagtgatagattctgcctgatgatatatttcttttgcccataaagcggcgcgttgaaagtcttcttcgttagggtgtttttccgcttcttgtaatctttttaggcgctccggcgtgagggggtgcacttttttggctgattcatttctcgtattggtatgaaaggaatggactcttccttgcagaatgaggtttcctaagagtatattgtcttccggaagaagagcagcggcggcggttagataattttgcgcggccggtgaatcgggataagtgccggcagtggcgtatagtgccactttttggttgtgaatggatgataatacgtttcgagtttccatattagcgcctcggcgaaatgcccaaaatccgacaaaaactaaatcatattcatcgtagtttccgtgatagcgtccgttttcaatgaaatctttttcgcaaggaagcgcatcataaatcgcttgcccgacggattttgtatttcctgtccgtgatgaccaaagaataagtgctttcatcattcatagtgactcctttcgtttctgtttattgttatgataacgaatattttgaatttagtaaagaaaataatttgacattcgatgaaatcattcctactatgaaggggaggaggtatgtgatgaagcggtggattatgcatgtggatatggatgcattttttgcgtcagtggagcaaagggatcatccggaatggcgaggaaaaccggtcattgtgggtggaaaggcaaagcgtggtgtggtggctacggcatcttatgaagctcgagcatttggtgtgcgttctgctatgccttcttcaaaggcgcatgaactttgtcccgacggtgtttttgtcgcgcctcgtatggacgtatataaaagcgaatctgccaaaattcatgaaattatgcttcattacgcgccggcgattgagcctatttccttagacgaagcgtttatggatatttccggacttcgaaatcattatccatcggtggatgcggtcggccgtgcgattaaagaagaaatcagggaaaaaacggggcttatcgcatcagcaggcattgcgccgaataaatttttagcgaagatggcgagtgatatgggaaaaccggacgggttgtttattatcccttatggaaaagaaatagaaatattagcgcccttgcctattagaaaactatggggcgtcggacatgtgacagaaaagaaattcatagaaatgggcattgagaccattggagatttacaaaaaacgcccacgaacgtattgaaatcgattttaggcaatcaagccggcatgtttaagaaattgtctttagggattgataatcgtcctatcgagtcaaggcgcgcggcgaaatctatcggtgatgaatcgacttatgaaacggacatgacggacgagaatgaaattaatcggcaaattgcgttgcatagtgatgtggtcgcacaaagactgcgaaaacaaaaattagccgggaggacaatttctttgaaaatacggtttgcctctttccgtacggtaacaagatccattacgcttgaagtaggtacagatctacaagaagatatttacgaagcggccatgaaattgaaagagaaaatatatttcacggaaggcgttcgactgattggcataacggcatccaatttatgcccaccggtggaaacgattgatttattttccgataaacgggaaaagcaatctcgggcagaaagagtgatggacaagatacaagatttatttgggaaaaatgcccttcgccgagcgatttggttggaagaagaaaaacgaaaaaatcaatcggacgaaaaggaagaatagatagaaaaaatattttataaaaaatatcaaaggagaatgatgatggttaatgaagaacgaatcagacagactttcgaggaattagtacggatgtatgcgcccagtaaaggggaaagagccgtgtgcgattatctaaaaaagcggatgagagcgttaggggcagatgagattatagaagacaatggcggttctattaatggaggaaatagcggtaaccttattgcgaaatttgccgccaatgcagaaaatcttccgtctatcgcactgacagggcatatggattgcgttgaatgctgcgagaatatcgaaccggttcgccgtgatggcgtttactattccaacgggaataccgttttgggcagtgacgacaaatcaggagtagctgccatattggaaggactggaacttatcaaagagaagaacattcctcacggaaaaataacggtcatcttcaccgtgcaggaagaaagcggtcttggcggatcaaaaaatattgaaacgaaatatattgagggaattgacttcggatacactttggatggtgacggacatgcagggaatgtttatattgaagggccggcgcaatatacattgacattcactcttcacggcaaagcatctcatgccggaatggcaccggagaaaggaattaatgctatttctatggcggcttccggtattgctcaatgcccgaccggacggattgacgaagaaacaacatgcaatatcggagtcattgaaggtggtatagcgactaatattgtgccggaaacttgtgttgttcatgtagaagcacggagtcggaatgatgaaaaattagagcagattgttaaagaaatcattcacgcctttgaagacgggataaaatcctttgatggcggtacgatggatgtagtaaaaacaaaagaatatgaagcttttcgcgtgaaggaaaatgcaccgatgatgacacttttccgcaaagcctgtgacaatgcaggatttgaaatgaaaacggccgttagtggcggcggaagtgatgccaattggtttggggcaaaagggtttccgtctgtattagtaggcgtaggcatggcagatttccatacgaatagagaaaatttagcagaaaaagatctctatgaagccggtgaattggtgtatcgacttattgaggcggaaacgaaatagagaaataataaaaaaactcttatttgtgtgataaactatgaataagagttttttactgcggtgaaagaatttagtttatgataactatgtaataataaaatcatagtgaaatcaagtacaagggaaattttttgacaggaaatagaggagaaaatgatgggacagataacccttggaattgtgttatccattttgtcggcattgctatttaccgggatggatgcatttgtcaaagtattggataatttaggaaccggagaattgactttcctgcgtggtgttattggattagcctttattccccttgttttgcgtaaagaaaaaggccctttgttctccgggaaagaccattggcttcttcatgctcgcggtttctttggcggtttgggtatttgctctttcttttttgccttgaaaggcatgactttgggagatgcccaaatattgggacaattgacaggattcttcctttgcattttgtcccctatatttctgaaaacgaaagtatccaaagattttattccggcgattgtgggaattattttaggtacagccattgtcatgcaagtgtggaatttcaatacatttaacgcctacgcttggggcgctgtcgcttgttcctttttctctgcctgtgcctatacatgtatcggtaaacttaatgaaaacggaggacatgccgggacagaaatcgttttttacttccaaatgtacagtatcctttgcggcggagcgctgatgattttcgactttaccataccgcaaggaattgattgggtgttccttgtagggctatctttctgtgccatttttgcgcaaatgtcactgacgtggggttgcctctacatatcccctctcttagtgagttttttacaatatacggcgattctttttcacatcattgtgggttggatgttttggggcgaagtgcttaccatttacagttggattggtggcgcattcatcgttttgggcagcgggatgctcttgtggaagtcaagaaaagcataaataccgcaaaaaagacacatatttctttataaaaccatacacataccgagttttcgtgatataatagtagaagcgactacgtacggtttatatttatttaacaattgaataggaggttaatcttggcaaaatcaggattacaaatgatccccttaggtggattaggggagattgggaaaaatatgacggcgttccgttatggcgacgaaattatcgtaatagatgccggcatagcttttcctgatgaaacaatgccggggatcgatatcgttatccccgatttcagttaccttatcgaaaataaggacaaagtaaaagctattttaattacacatggacatgaagaccatatcggatcagttccttatttacttcgcgatgtgtctgcaccggtgtacggtacgcgcctcacttgcggacttatcgaaggaaaactgaaagaacataaaataaaaaattacaaattaaatgtggttaagaccagagaagaatttaaattaggttcatttcgctttggctttttccatgtttgtcattccgtcccggatgcaagcggtatttatttgacatcaccggtaggaactatcgttcatacaggagattataaatttgaccactctccgatggacggacaattaacagatatgtatacgttggcagaacttggtaaaaaaggtgttttggctctttgtgcggactctaccaatgcgatgaatccgggatacacaccatcagagactgtcgttgttaagtcgctcagagaagcctatgatgatgcacggggtcgtgttattttagccacttttgcatccaatgtatcacgtttgcaaatggcggtagacgcagccgtagcacataaaagaaaaatttgcgtattcggtcgttcgatggtgaatgtagtcggtattgccttagaaatgggatatttgaaagcaccgaaaggcacatttattgaaccggaagaattaaatcgctatcatgatgatcgcatttgcatactcaccacaggcagccaaggcgagcctatggcaggcctttctcgtatgggtgacggaagccatcggcaagtacaaattcatgccggtgatacagttattatttctgcccatcctatcccgggaaatgaaattggagtaggacgaaccattgataatctcatgcgtttaggagcgcgagttattacatctcatgacacaaaagtgcatgtatccgggcacggggcgcaagaagaccttaaagccatgcttgccattctcagaccgaaattctttataccggtgcatggggaatatcgtatgctctgcgcacacaaagaattagccgtaagcacaggcgtaccaccgcaaaatgtcattatcggagaaaacgggtcagttatcgaactcaccgcgaaaaccgccaaaattgtaggacatgtacaagccggtgccgtatttgtagacggactcggtgtaggcgatgtaggaaatatcgtcattcgtgatcggcaacaattagcacaagacggcgtatttattgtcgttttggcattagaaaaaggaagtaaccaagtgatcgccgggccggatatcgtttcccgtggattcgtatacgtccgagacagcgaagaactgatggcaggcgcgaaagaaaaaattgaacatattctctatcgattaagcgcaggcaacgtcaatgagtggagcgccatcaaattgcaaatcaaagacagcttaggcagatatttctatgataaaaccaaacgtagaccgatgatacttccgatcattcaagaagtaaaataatagtggacataagaaacagtaggaaaaatcctgctgttttttattgcctgtaccataaaaaggagaacaacgaaaaaatccgggaatttacgtataaagagaaagacaaaataaaatattatgatataatcgagataaaagatgagaaaaatatgagatgcgaagaaatgaacacaagaaaggagggcgaagagatggataaaaaagaaaataaaggaataatcctatttccggaatttgaaaaaataaaagaagaggtagaaaaaatccgcgtagaactatccatgctgcttttagagcgagatgaattgaaatttgtgatatgcaaaaacattgaaacggaatacatgctttcattagggtgtatcgaatataagatttatgaggcggaatgtgcagttctaagattgaaaaggaaaatggaacttatgcaaatacaaatcaatcaagaaaaacccattcaccttaaagacatagaaaaaatattagacaaagaatttgctgaatatcggaaacgtttagcggatcaattagagaaactcaatgacgcattgcgccatagcgaactggagaggttatctgataaagacacaaaagaactgaaatcactatatcgtaaaatcgtcaaatctcttcatccggatatcaatcccggcgtgaccgacgaagaaaaagaattacttcagcacgcggtagaagcttacaaaaacggtaatttactgatgcttcgtatgatttggagtatggtaaaagacgaagtattaccatcgaataaagatgatgcaatgagtcaactgctcaaagacaaaaaacagttagaagaatcctgtcatacgcttcggctggagatagaaaaaatcaaaaacgaatatccgtatacgatgaaagaaattttagaggacgaagaaaagaaagcaaataaaaagaaggaattagaagatattcttcagcaatacaaagaagcaatcactctgtatgaagaaaggatagcggaaatgatgaggtgcatagatgggtaatttagtcaaaaatgatgaaaataatttattgacactccttcatggaaggaacggaaatatgcctataccgaaacccttcgagagagatattttcctcttctctacctttgtagccggcacaacgcatgtcgaaggcatcaaagagttggagaaacatctacaaataggcgatcatttagatttttatcgtgaacctcaaaatgaatatgataagagagccattgtcattaaaacgaaaaatggcgtcaaaatcggttatgttccacgagcggataatatcgtattttcccgattgatggatgccgggaaacttctctttggtcgaattagtaaaaaagaaatactggattcgtgggtgaaaatcaatatcaagatttttttgcacgagtaaatgggacttctcattttatactattgtatgagaagaattgttttgatataataaaaatgtagtaattatatcttagcgagagatatcaggttattacaataaggtccaacaggactgttggtaccgtaaagatctaacggtgcgcctttgggcgcaccgttagagtttttttttaataaattttgaggaggcgatgatatgaattacgtattaggcttagacgtagggattgcttctgttgggtgggctgttttggaattggacgaaaaagacgaacctatacggattatagatttaagttctcgtatttttgataaagcagaagttcctcgaaccggggcatcgttggctcaggcgcgaaggattgccaggggtgttcggcgacgtcttagacgacgtcgatttagattgcatagagttcgttcttatttaattagacaatctattttgactaaagaagaattgcaaaatatatatcattgttctcatgaagaaagtatatatgaattgagatataaaggtttatcagaaaaacttagtgctactaattggggaagattacttttattttttgctaagcatcgggggtttcgttcaaatcgtaaaaatgatcaatcgaaagaagacgggttaatgcttaaagcaatcagtgaaaatgaagagttgctaaagaaatatcgaaccgtaggagagatgatttattctgatgaaaaatttaaggagtataaaaggaataaaggcgggaactatcagtttacggtaagtcggtcaatgttaattgacgaaattaaaatgttatttgaaacgcaacgaaagttaggtcagttctttgcagagcaagaactggaagaaaaatatttagatattttttctgctcaaagaaattttgatgaagggccgggaggcaatggattttattcagggaatcaaatagaaaaaaagattggtgtatgtacttttgaaaagggtgaaaacggtgagaacccaccaaaaagagcgcctaaagcaagttatgcatttatggcttttaccttatggggaaaaattaatcaccttaggattaattctaaaggtactcgtcgagccctaacgcaagaagaaaaagaaaaagtagcgaaactttcttgggaaaaggcaagtataaattttagtactataagaaaagaacttcagctatcaccggaagatcattttattgacgtgagatatacatacggtaaaacagatgaagaatgtgaaaaagggacgaaatggaattattgcgcttcctatcataccatgcgaaaggctttagacaaggtgtataaaaatcgaattaaggaattgatgagcgaacaggacgaacagaaacagcttgatgatattgcctatgcatttaccgtatataaaagcgatgaaaaaataaaaaattatttattacaatgtcaattggaggaaaaagatgcagaagctttattggcaggtgtaaataattttagtggatttgggcatttatcaaataaagcgtgctataagatattactccatttaaaacagggatatgaatatgcaaaagcgtgtgaaatggcaggttatgattttaaaaatatttcattggaagatataaaggatataccaaatccggtggttaaaagagcaataattcagacattgaaagtggttcgtgccgtagttagagaatacggaaaccccgtagaagttcatattgaattagccagagacttaggacgtaattttaaggatagagatttgattaagagtaacatggagaaaaaccaaaagaaaaatgatgagattaaggaaaggatagtaaatgaatttggtattatgcaaccaaagagtcaagatattgtgaaacttaagctatgtgaacaacaagataacgtttgtgtttatagtcaaaaatcttttgatcttcatcggctgtttgaaaaaaattatgtggaagtggatcatattattccgtatagtcgatcatttgatgatacttatgcgaataaagtactggtgtttaataaagaaaatcgggataaagggaataaattacctttggaatatttggcaaatcaacctgaacggaaagaaaaattcattgcttgggtaaagagccatattaaagatagaaaaaaacgagacaatttgcttcgagaatcttattcggcggaagataagaatgggtggaaacaaagaaatttacaagatacacaatacatcagtagctatctttatcggtatttaatgcagaatatcacgttagcaccgggatatacggatcgtaaagaacggattatttcactgaatggggtggtgacggggtatgtccggaaacgatggcgtattcctaaaattagagcgaatggtgacttacatcatgcggtggatgcagttgttattgcatgtatcaatgatcgcctgataaagcgagtgacggaatatagcaaagccaaagaattagaatatacaccgtctgattccggggcagtcaaaacatctatgaaagatggatttccggaaccttggtattgctttcgacaagaattaaaagcgcggctgagtgaaacgcctgacgaagctatcagaaatttacatttagcgacttattgtaatgttgggaatattaaaacgccttttgtatctcgaatgcttaaatgtaaagtgaccggtcaagctaataaagaaactataggaagtggacgattaaaagatgaagaatatgttatagaaaaaacattattgaccgaattaaaattagataaaaacaatgaaattgaaggatattatcggcccgaagatgacaaacttctttatgaagcactgaaaaaacaattgatgaatcatggcgggaaaggagataaggcttttcaagcgcccttttataagcctaagtcagatggtacgcctggacccttagtgaagaaagtaaaactgaaagtaaaattgaattcacaggtacatgtgtatcaggggaaaggaattgcccaaaacggtgatatgattcgtattgatgtattttgcgtaaataaaaaagggaaaaaggcttattattttgtacctatttatgtggctgatacggtaaaaaaagaattacccggtaaagcagtagtgtcagggaagccgtattctgcatggaaaccaatggatgataaagattttattttttctttgtataaaaacaatcttatttatatagagtttaataaacctaaatcgtttgttgccgaggaaggttgtactttaagtcaaacagtagatgtgaaaaaagcttttctttattatataaaagctgatagatttgctggaactattacagtagttaatcatgataatacttataaaaccagaaccggtataaaaaatactttacttcgttttaaaaaatgtgtagttgatccgttagggcggatttcttttgtcgaaaaagagaagcgccaaagatttcagtaaggagtagacctatgtatcagcaggtaatcgtagaaaacggagcttctatttcctcaaaaaataatcaattggttattcatacaaatgatgtgcatcgccttgcgatagaagatgtgtctactttagttttggataatccctgtattacagttacggtaccggttcttaatcagcttttgaataatggttctgcggtcattatttgtagtgaaaaacatatgccaaatggtttatttgtgccctatgccgggtatgctcgtcgacttaaaacattaaaaaacaaatgacgcaaacaaaaccacggttaaaacaattatggaaacaaattgtacaaaagaaaataaagaatcaagggcgctctttggaattatgcggaaaggaaaataaagtaaagaagtttggtgataaagtaacatccggtgatggtggtcatatggaaggcattgcggcagccatttattttaaggagctttatggggaagattttgtacgcgagtcttttgggctgattaacggtattttgaattatggatattctattttgcgaagtgccattgcacgttatttggctatttatgggtttgaaccggctttgggaatatttcatcatagtgaacttaatgcttttaatttagcggatgatcttatcgaaccatttcgaccattggtggatatatatgcgttttcttatatggatagtgaagaagagtttttgaccaaagaaatgcggtgtgatttagtagaacttttgaattgtgatattttattagataaagaaacgtatagtgtagattatgccatagaacgagtggtgcaaagtttgtcccgttgttatgacggaaaggcaaatgaattacttttacctgatttgttgtctttacatgtgcattcatatgagtagatttatgagacttttagtgatgtttgatttacccgtaactgaaaaagaagaaagaaaagtggccgctcggtttaggaattttttacttaaagacggctattatatgatgcaattttctgtatatgtaagaatttgtaatggtattgatggagtaaataaacataagatgcgattattacgagagttacctcgaaccggttcggtcagatctcttgtggtgactgaacgtcaatttgaaaatatggaatttttggtaggagagaaagtgttagatgcggatgaaccacggaaagaaaataaagtgattgtattttgaaaaaacggaaaattgagtaaaaatatgagaaaatttcttccatttttgggtatagaaaaagcacgatagtgactgactatcgtgttttttcaggtaggtattgtaccatagcgagaaatatcagggaattacaacttcgccttgtgctgtgtaattaatttgtgattgtaccatagcgagaaatatcagggaattacaactgcaatgtcatttttagctttaacagccccattgtaccatagcgagaaatatcagggaattacaacaacttgcttctccggtgtgacgctctcataattgtaccatagcgagaaatatcagggaattacaacttctccgttgtgcgtctatcattcccatttattgtaccatagcgagaaatatcagggaattacaactatgtttccaaaaatcccgatgattgggaaattgtaccatagcgagaaatatcagggaattacaactgaatggaaacgtttccgttcagttcttttattgtaccatagcgagaaatatcagggaattacaactaaagttttgaaagatgatgtctatatgttattgtaccatagcgagaaatatcagggaattacaacattacctccttaaatgactctttatagataattgtaccatagcgagaaatatcaggggattataatgctctttttggagagtgttttttattgcgccatagtgaaattgtgaggagtatttcatttttctttgggatgaaaagcctttttcgtggttttatgataaaataaaaataataaaagaataaaggagttattatgaacgagatacgtcggggtgaaacgaattcggtagtgcttgccgggatgtgtacggcgcttgctgtggtgctttcggtggcggggttttatttgccgttggtttccagtattatttttcttttgattcctcttcctattgcttacttgggtatgaaggagggggcatcttgggctgtcattgttttgtttggcgtgatggttttggattctttgttttttggtattatttctgctgcgtttttgtgcgctatttttggtatgctcggtgtggtgatggggatttgttatcggcatcgggtgtcggcgcaggtgacgcttattgtgggagcggtcgtggtgcttgctgctttggtcggcgaggctttggcggctttttatgtattgaatatgccacaggttcttttcggcggtgagatgattgatcggatggagtcgcaaatgcttgcgcaaatgggttctatgtatacgggtgagcttttggtgcaggcggaggcgaatgtgcatgcgatgatggatgtgattcgtaagtcgattccttttgctgctgtggcagcggctttgttttattcatgggcgtctatgactttgggtaagaaggtattccgccgtttgggtataacggatatcccggtgttgccgccgttggagcgttgggagtttcctcgtttgtttgtggggttgtatatccttgttgtgttgtcttcgtattttatcaaggataatgagatggtttctttgttgtcatataatggcggacttatttgcacttttgtgttttggttgcaagggttggctgtgttgtggtggtttccccggaagtatcctgtgatgaagacgtttcgttgggtcgtggcggttttgtcggctttcgttggttatgtacagctttttgtggttctcatgggtatggcggatttgttgcttcgttatcgtaagaagagaaattatgagtaggaccgataaaagtaggtgagtttatgttaaatgatatttgggtgtataagaagacatcgaaggttcttattgtagtccttttggcggcggttattttgcttgctacgcagaattggcagttggggcttttgcttttcattgtggtggctgcggtgattgtctggatgaagcgcagtgatatgatgcaggagaagttgttggtcgggtatttggatcatttgtctgccggtgtgacgacgggaacggcgtatgctattaagaatttgccgatgggtattgcggtgatggatgaaaagaagaaattggtgtgggcgaatagtgtttttcgttcatggatttctgattctgatgaggctgtgccgtttcgtgagttgattcagggacaaagggtgtcaaagatatggggtaaaacgggctggtttgattgttatgcgaaagggattttgtttcgtgtatttcataagttcattttgccggaggatggttcggagacaccgcttatggttttgtatttcatggatcgaagtgatgtggaaaagacggtgaaggaggcagaggagtctcgaccggttttttgtcttatccgtattgataatgcccaagaggtgacggtagatatgacggatgtggatcggtcggcgcttttgtctgatgtggctgagagggtattgagttatttcagtgattatcatggcttcattaagcagtattctacgtcggagtttgtggcttgtatttcgtctaaggctcttcaagagatgatggatggaaattttgaaatattggataaggtgcgggatattcatacggtgaatcgtatcccggtgacgctttctatcgggattgtgaagagtgaggatacgtttgctaagcagtatgaggaagcgcaggtgtctttggatttggctttggggcgtggcggtgatcaggtcatcgtgcgtttgggcaaggatgtgaaggcatttggcggaaaggcgccgacgtcggtgtcaggtacgcgtgtccgtgttcgcgtggtggcacaggcgttgaaggaggtcattcaagaggcggatcaggtgcttgtgatgggtcatgctcatgaggattttgatgctttaggggctgccgtaggggtgacgcatttggccaggttgtctcatgtggatgcgcatattattctttcgtcgcaggatgatacgtctaagaagatgattgatgcgattagaacgagtggcatggctgatggtcttttgattgatgagaatcaagcgaaggggtttttgacggataaaacggtagtcatcgtggtggatacgcatgtgcctacgttggtggcggcaccggacatattaaagaaggcaaagaagagggttgttattgatcatcatcgaaggtcaagtacaatgattgaaacgccacttttgacgtatatggaaccgtcggcttcgtcggcgtctgaattggtgacggagcttattcaatattatggcggtgatgaggaaatgaatgtcatggaagcgtcttgtctttatgccggtattgtagtggatacgaaaaattttgcggtgcaaaccagtgtgagaacgttcgatgctgccagttatttacggcgttgcggagcagatacggctttggtgaatcgacttttcgctgtggatatgaatttcatcaaggtaaagtcggaaatattatctaaattgacgcaagtggatgagtacatggtttttgctgaatgtccggaaggcacggcagattcgcaaattatcgcagggcaggtggcggatttcttggtcacggtgcaaacggttcgatgcagttttattttttatcatacggaaaaaggcctctgtttatcggcgcgttctaatggtacaattaatgtacaggtggtgatggaagcggtaggcggcggcggtcatcaaacggtggcaggtgcgcaatttggtgaagaaggaaatataaaggagattacaaaggcaattattcaagaagttcgtaaacagatggaggaggagaaagaatgaaagttgtattattgcaggatgtaaagaaattaggtaagagcggtgatgtagtggaagtagctgatgggtatggcagaaatgtgcttattcgtcgagggcttggcattgaaggaaataaggtaacgcttcaggaagcggcgcagaaaaaggaatctcgagaatttcaatctcaggtggcagctgatgaggcggagattatggcagcacagttaaagaaagtgaaagtgactattcctgtgcagattggtgaagatggaaaaattttcggtagtgtgacggggaaagatatttgtaatgctatcgaaaagcaatataaatttaagattgataagaaaaatgtcaaattgaaagcacctattaaaacggtgggggaatatgatgtagatatatgggtacatcaaaatattaccgccgaggtgcatgtgtcagtggtagcagagtaaagggataagccgttcgtaatgaatggcttatttcaatttatttatgactgatgttgcttgtgatgtgaagtttcaggagagatggatcaagtcgaagagatataaattttttagttcatcacggaatttatttttttagtcccccttaggatggaggttgcgatgaatttcaaaaataaaatgacggagattcgccggcggcatttggcaggtgtgacgaggtttatcagtgcgtctgtgcttgcgttgttgtttttcttggtgattcttgttcgtgtgttgtatgcggttctttttgataaggaagtggaacttttttctcagtcggtagagcaggttcttattgctgtcatgacgactctttttttctctgtggtgtggagaattgtcggggaacgtcgggggcaagtggggtttctttatgaaatagttaatgtccctgttttaggtggtttttatttcctttggaaaagcatgcctatgaatatgtattacacaatgtatgtggccggggttcttttggcgcttttttgttttacggtgtatttgctttggacggaagagacgaaggatattttctcggttctttttgtgtcgttttggaaaacggtgggacagatttttcttataggtgtattgggaagtatttgcctttttgccattgattgtctattgattgatgtattttatggttggtggtatgtgtggcttgctttttgttatgtgctggcgattcatctttttttgtcttatatacctcattttggcgaatatgtggagacgaaatcgcttcatttcttgttggagcgaatatttcttccggcgtacttggtgatgcttgtcattttgtatttgtatatggcgaaaattatcgttacggtgacgatgccggtgggaacgatgaattggtatgcgtcggtggcggtggctttgtatgctcttttctatttctgtctttatgaggagggaaatagtaggattcgtcgttttcttcgttatggcggtatagcgttgctaccggtgatggcgatgcaggcgtgggggatttatatccgctttgatgcttatggactcactacggcgcggtatgtttccatggtttgtaatttgtttggcttggcggtcattttgtcggggattggtaggcgctccgggaaatatttatttcttttagccggattattggcgatcatgatgactcttttgcctacgaatatgattgatgtgcctgccgctaatcaatggaatcgtttgtctgcttgtcttgaacggcatgggatgataaaggatggaaaagtcatcatgtctcatgaacttacggtaaatgaaaaaaatgatatcagaagtgcgtatctttatttggcgcataatccgggcaggtggaaatatcctttggtggatgtgatgaaaaaggataatgatttacggagttttttgaatgtttatcaaaaggaaaattggattgatttgatgtatcactgggaagcgattgatgtttcgggctatgagaagatgtacatgttcaacggtgggcgtgatgatatagcgccggatggtacattcacttttgatacggaggatggtaagaaaacggtgccgctcatgccttatatggagcggctgcggaaaggggaatcttcgggcgttgatgggacaaaagcggagatgacttatgatgtaaatgagtatcggcggatttatttcaatgatgtccgttttccgaaagagggagcatgtaaggatgcgcatttcagcggatttttgttggagaaataataattttactatttcttgaaaggtaaataagtaagataataaggagttctcatgaaatttattcatacatctgattggcatttaggaaaattattttacggcgaatatttgacggatgagcaggcgtggattttgagaaatcaatttttgccgttggtggatagtgaaaaaccggatgtgattttgcttgccggcgatgtatatgatcgctctatcccaccggaagaagctgtggcgctttttaatgagatgattgaggaaattgtggagaaacgccatattcctttcatcgttatcagcggaaatcacgatagtgcggagcgtatttcttttgccagtacggtattggaacgctcggggctttatatgtgcggtgatttaacacgtttgtcacctatatttctttctgatgcttggggaaaggtggcttttgtgcctttgccgtatgctgagccgggaacggtgcgtacggcgctttctgtcgatgtgcatagtcatgaggaggcggaaaaggctttgtcctctcatttgctgaagtgcgtgccggaaggtatgagaaaaatagctatggcccatgaatttgtggcaggggggaaggaaagcgattcagaaaggcctttgtctgtgggcggtacagatcaaattcacgggagcgtttttgatggttatcattatacggcgttaggtcatttgcatggtgcgcaaaaagccggtggcagtgatcttatccgttacagcggaagtcttttgaaatattcttttagcgaagcgacacataaaaaaggggtcatcatcggggaaatagatggtgagggacgagtgacgacagaatttcatcctcttgtgccacgaaaagatgtgcggattatcgaaggtacttttgatgaattgatggcaaaagacgatccggcgcccaatgattttctgatggcagagttgatggacgataagccggtcattgatgtgatggcacgtcttagaaagaaatatcccaatatgatgacgattcatgctaatcgacaacttagtgaagatacgggtggtcggcattttgatttcaataaacgtattgatcccttagatatgtttcgtattttttataaagaaatgcaagacaaggaatttaccgatgaagaagaagagtatatgcaaaaagtgtggaacgatgtaaggaaggaggatctatgagaccggaaagattgacgatgagtgcttttggtccgtaccctcagcaagaatttttggacttttcacagctcaaaggcgaggaattatttcttatctgcgggccgacaggcgccggtaaatcaacgattttagacgctatgtgttatgccctttatggtagaaccagcggagctgtaagatccggcgaatctatgcgaagtaattatgtagggcctgatagggaaacttatgtgcagtttgattttgccgtaggaaataaacattatcgcgtgcatagaaaccccacgcaatttttggagcggaaaaagggagatagtgataaaccggtagagaaaaaagcgaaagcggaattgtatgaaatcacgagcgaaggggaggaaatacaactcatcacagcgcgcgctgtatcggcggcagtagagaatcttttaggcgtaggactcgaacaatttcgtcaaattatccttcttccgcaaggagattttcggaaacttcttttagcggattcatcggatagacaagtcattatgcaacaattatttcagacgaaaatatatcttctttttgaagaaaggctaaaaaaagaagcccttaagctcaaaagtgattatgaggaaggaaaacgaaatcagggaatttatctggaaacgtgcgaagcggatagctatcaagcgttagaagaacagctgaaagcacgggaagcacgaatcaaagaaataaatattgctttagggaatgaagaaaagaaacaaaaggaatttcaaaaggtttatgatgagggtcgccggctttttgatgcttataaaagaaaagaagcggcggaaaatgcgttggcggtattggaaaagcaaaaatcacatatagaagaattgcgtcaaaaaacagataaagttaaaaaatttcaattaattatggatatctggacggaaacggaaagtatttataaacagcgtcgagcattggaaagttcaatcgaacagggaaaacaggatatacctaaatgggagaaagaaaagcaagaagttcagaaagaagcagaattatttcaacaaaaagaggaattatataaaaagcaaagtgcatggaaaacgcaattagaaacttatgccaaagacgctacggagtatagcgagattcttaccacagccaaaaatgcggaaaggaattatgtcaaagcgttggacgaaaagggaaagttagatatttctttagagaaagcaaaagagaaagctttacaggataagaaacattggatggggcaaaatgaattatttctccattctcaagcttatgtattggctgccaatcttgaagatggcgcgccttgtccggtgtgcggttctgaaattcatccgaaacctgcggaaagtagcgatattgtcatcacggaaaaggatgtggaaatcgccgcgaaggcaatgaaaatgtccgaaacggcggcggaagatgctgtcatgcggagagaaaattttcagcgtgaggtattacaaaaagcggaaacggaaaaagaaagagcaagcgcgcgtattgaacaaatggaaaaatccctacctgaaacgtatcgggatgccggttttataagaaaagaaatagaaaaaatagacgagagcatcgctcat

SEQ ID NO: 2806 - DNA, 23246 bp, synthetic construct
  misc_feature 1..23246: note = Synthetic
  source 1..23246: mol_type = other DNA
ggagcggtattgcccgcgggctcttttccaatgaatccggcttaggttccgcgccgatcgtggcagcggcggcaaaaacaaaatggccggctgaacaggggctcatttccatgacaggcactttcatcgatacaattatcatctgtaccctgaccggccttacgattatcgtttccggtgcatggcagggcgataccaacggcgccgccctcacacaggctgctttcagtcatggctatggcgatatagctccgattcttctcaccatttccctgacactcttcgctttcaccactatcctcggctggaactactacggcgaacgctgccttgtataccttgtaggcgtcaaagggatcattccttaccgcctgtgctatgtggccattatcgcggggagcgctttcatgcagcttgaagaaatctgggcgcttgcggatattgtaaacggtctcatggccattccgaacctgattgcccttcttgggcttaccggtatagtcgtcgcggaaacaaagcggtatttccagcaccttgctatccgcgatgcgaaattggtggcttacaaagcaaggcatatagggaagaagtgattgaaagtcagcaggcagacgatgcggcatatacgatgatttgtctgcagcccggacataaaaatgagaaaatgaaaatgcggtacctgtcaagcgtgatgggtaccgtttttgtattagcagttagcagttagcagttagcaactagcagctagcaactaggagctagtagctagccattagctgttagcggcaagacgtcatcagcgtaatagattcttcactcagtgttactgttccgtttcctgcctttctcaaacagcatttttgcatccattcagaatgacagcggacggcaaggcgtcataatgaggaaagcgtcagtcgtcatactgaacgaatgtaaagggtctgctattgtggtgaggaagtcggtaaggcgtcataatgagggaaacgttaagcgtcatcctgaacgaacgtgaaggatctattaccgtgagaaggaaggcggtaaaatgtcatcagtgtaacagattcttcgctttgtgtcatattgctgattcccgcttttctcataaaacatttttgccaaagctctgaatgacgggaagccggtaagacgccatcaaagtaataaattctttgctctgtgtcactgtctcgtctgccgtcttcctcacacagcattcttgctcctgctctgagtaactgggggcggaaagtgtgtccggggtataagggataattattctgccggagaaaaaccgcctctgaaggtcagattcaggtctgatggccagggcggtattttaatatttataggatgtatttttcagcaaaaacggcggtaaagtttttctgcggcttccacgtctgtcatatggaagcgatggagttttttggtaagcatgccgataaaagggtgggagcggaggaagcggaccgctttttcttttatcccatttttatctgtatcggtatagcctttttcaatggcatccagccagtctctttcttctgcgtagtttattctgcagattccgtggagaagaagaaggaaatcttgtattttctgcgtttctttcctgctgcagtagtgccggctttcccagtcgagaaacgtaatttttccgccggtgctgcacaggatatcccgcggcgcaggacggccgtggatgacatccgcgttgtggagtgcggcgagagacgcgcctatgcggtagagaagattctttttttcttcaaaggtgaaatcaggatcttccatccaatcttctatcgtggggccgccgtcacgggtgaccatgtattcggatgtgagaacttcgatttgcggaacaagctcggggcatgccttcgcggcgatggcaattcgggcgacttcgaaaagaaattccgtttccggaggctgttttaccagacggtttcttttattgctgtactttcttttgatccagaaaatggtatcatcaattttaaatcgtatattcttttgatccgggtagcaggcgatttctttttccgccgcttgttttatgatttctgtattcatgatttccctgtgtgacggttaaatacttttaatagatgtatccatcttagcacgttgacccgatttttcaagtttcatggaagagccggcggcttgaataatcggtttatatttcctatactggacgtagaatgatgagaggacacagggattggagcagtgcgcgggaggacatatggaagcggatgagtgggaaagaacggtttgcagtgaaagaggaaaagagaaatctttttttggagagaaattttcttctccacttggtttatgctgtttctttcttgccgctttggcgtttttcttccggagccctttagtttctttgacgcttcttttgcttccgcctgcctgggaggattggaagacggggtatgtttctgattattggagcgttttccttgcagcggcaggattggggcacaatgttttttacagccgtctgacggatggttttatatcctgcgcttttgttcttggcctgtacgggcttctctttctgctggcaaagcatgccatgggggcgggagacatatttctttcaggtgcggctgcattatggcttgcaccggtttccgtaccgcttttcctgtttctttccgcttcctccgcggctattgcaggcatggtgcttcttttccttggaagaatgtcccgcagggaggggattcctttctgcccgtttatcgcgttgggaggtgtggcggcgtatggcgcggaagtatttcagcttccgttctttccatcgtggcactgttttatttgaagtccttctggcagcggtaattttatcgcttgcggcgctggcagtgatccctctgtacacgggatggcggagcgagaaaaggctggaactggcagcggaggaagtggcttcggcgatacggcaggtggaaatccttgcgaaaaatgagtcggccgattacccttctatgtcggaagggctcacgttcttttgtgaaacgatgactgacggcacgggacggtattacacgaggaaagggacggagcgcgtgaatccgaaaggatatctgcccaaagggatccgcgtggacggagggaaggcctcgctccgtttccggaaagacggtttcgcaggaacgggagaagaatataatatatttctgaccaccgacaacgggaaatacgggcggatgattacggtagccatgtacacggggcgtgtccgtgtaaggaaaataaaatagtgggaaagatcggttttatggtagaatgaaaatgtatcagggagatctgatatatcattaaaggaaaggattctttccacggatcatgagctgatccatttagtatttgtcacgaattttcgtgcacctgttatttatataagaaaagaggaattttatatggcttattttattaccccgaatgttacggcggataattccgctttccctcttcggcaggcagaagggaaagttcttggccgcgtccgttcccttgtcaagggatccacgccgcgggcgggagtgaaggattaccgcttttttgttgatcctttatcatcgctgccgcctgaaatgggagaaggcccgcggttcggctttaccggatttatgagccgcagcggttacggtttcaatgcttttgccggtgaagaggaggcgcttgccagattgcaggaagatctgggcggttctttcgtgacattcacgcctgctcttagaaataataagtttttcgtccttgatgatttgaaaaaggaaggacgcacccctttcatggaacaggatgaagattaccgtcccgttcctgcttttggacgacagggagagccagcgatggaagggaatattaataagttctgccgccatcttttggaggggaaacctatacccggcctgtcaaaaaaatattggaataatgattttacgccctactttattgctgcggctgcggagcggcacgatggaaagttgggcgactttgttctttttgcacctttgaatggagatgcttttgaagagacagtcattgatgagggcggcgcgtattttcacggaggccgtctcgggtacaaagtgattgatatctctgacgaaatcatggcgggtcacgttctccgctgtgccaattcacccctttggtttgtaccttttgaatatatcgaacacttgaaagagggcatggaagaagtgccggctgatggggatattttatccgcccgcggcattgaagaaaggccggcagtatcttttgtgtctgccgcagaagcacctgcgggtttgggaaatatcttgccttcccttttggagaaagacacttctgaaagcgtgactgccggcgaggaaggaccggcaatcgatgagaaagtggaagaaatagaaatgtctgaagaaacggaggaaaaaccggacagggaagatgaattcctgaaccgtttttccgcgcttgcttcttcaaaaggacttctgtatgcggaaaaagatttgatcaatttccatatttccgtgaaatcttcgcgcctgacgatcctgtcggggatgagcggcacagggaaatcacgtcttgtccgtctttacggcgaagccatggggctgcctgatgaccgcatcgccgttgtgcctgtccgcccgtcatggatggatgacggagatatcctcggctatgcggatatgaaaaatatgatttaccgccctgccgacacgggccttgcggagcttcttcttgatgctgaaaggcatccggaggaaatgtatatcgtttgctttgatgaaatgaacctggccagagcggagcattactttgcccaatttatttccgtactggaaaaagaggaggatccggttatccgcctgtacaatccgtcgctccaggggcgcctttataatggggacgcctatcccgcggaaatttccatcggaagaaatgtcattttcaccggtacggtgaacgtggatgaatcgacgtaccgtttttccgataaaatcctcgaccgcgcgaacatgattactctccatcaggaacgattcagtgactggctcactgccgaaaaggcggagccgccggatctgaaggaaatatcctttgcccagtttgaaagttaccggaaaacgggggatatggaactcacggcgcgggaattggaattccttgatacgctgaatgatgccctttgggaaggcggtgtccaggggtgtatcggtttccgcgtggcgcgccaaatggacaggtacttaaagaatattcccgaaaatgacggttttgatcgggaggcgggactggactgccagctggtacagaggatacttaccaaaatacgcggctctgcccagcagctgtctgctttgctttctctctccgataaaggcgaagtggaagggcgtttagtcaaggtgcttgacagtttttccgatctttccgattttgaggaatcacgatgtgccttgcgtgctaaagcacaggaactgaatttgtatgattacacggtctgaacggtcaggagaaaaacggaaccggatattttcgccggggagaaggaaccgccgtgaaaagaaactgcccttcaggctttctttcattacaaaaggcgacggcggccgtgtttacccgtttacccggtttgtaaacggagaagcagcggttttagaagaaactgccggtgtgagtcttgtggaaaatcaggatatctggctccgcttcgacgggcctcccgatttccgttttaccatggacggactcgatgtggtgacgctgccccatgcggaaaagattgacggacagagttatctccgcccaggatggaaaggagagccgttccttctttttgaggggagagacttcccgcttgttcccggttactatgtgattaccgtgacaggcgcggggaaaatatggcgggggcttttggaaatcgcccccaagttcatgggacggcagagctggcaggctatgcgtgaggaactggtagaggaaataaaagatctttccttcgactttatgaaacggagtatccatatttcccgttccatggaaggcgaactggggctgaaatctgccatgctgctccgtttctatgccatcagcgaagagtcggaccgtgtcgtgcaggtgctgggggaactggcgcgtacggcaaattcccgcattgtccgcaaacagggtgtcgtaaggagcaatcgggatgccgcaggcgcccatatccgctgtgcagcgggaaagtcgcgggaagggacgcccgtcctgcctgtcatttgctcggaagtgacctggaacgtggcggagaatcgttttgccaaagctattttacaaaagctggatgaaaatctccgttcttttgtacaggaaattgacgatcatgcacggcggctgggaaaagtacaggatgccaatgcggggtactataaaaaccgcgattttaaaaacggagccaatgcgctttctcattttgagaaataccgggcccgggcggtgcatatacgaaatgcgatccggatggtggcagaggcgacttggtttcatgaagcagaaagcggaatgcccgaaacactgcccatgactgtttttcttgacccccgttattccctcttgtacaggctgtacagaaatttgaaaaatcctgccgacagtctttccgtatcatctttctatcaattccagtggaagaggacagacaaactgtacgaactttggtgtttcctccaattcatcaaggcgctggaagaaaaggggtgggatctggcgacgggccctgccgtggtacaggaagacgggaagtaccgtctgtccagcctggaagaaggaacggaaattactctgtcaaggaatgatgaaaagatccgtctcatttatgacggcactgtgccccagcatgcatcggacaccgacagggaaacggatcccctctatacaaataatgtccaccgccgtcctgatctccgcatggactactatcggaacggagtgtattatggctctctcgtggcagattttaaataccgtgatatttttttcctgtggcgcgatgcggcaagaagtgcgggcatccgtacccagttcaacgcgtaccgtgatatgaatacgaaattttaccgcggcatggaagagggcgattctctcaggaacagccgtcctgtaaaagaagtgtgggcggtttttccgaaagaaatacctccccgcggagatgaggatttcagtcttcgtttcatttctcttgctcccggtctgaaagcgaacgggaatctggcggagatggtggagcggtacattgtttctctgaatgaaaattaggacaaaaaaagcgtttggaaccaaacagtccaagcgcttttcaatttaccggatatggtctttgggaatctgtgcctcgcagaggtggtggatttcttccgtatgcctgctttctgtaaggaagtaaaggaaatcaccggagagaagttttgtgtcagggtcgggaatcatatctgccccctgccttttgatattgacgagtaccgtgtgagacagacgggggatttcctccactgtccggttttcgaggatggaaccgctgcccacgggaacttccagaatatttctttcttcgtcggaaatgggcgtagaaccattggacagggattttttcaagagagaatcataaatcggctggcctttcagcagttccgctgtgacataagctacggcggaagcgagggcaagcgccgtgaggtgatggaagtcacctgtcatttccagaatgaggagcgtccccgtaatgggagcgcggatactggcggcaaagaaagcgaccatggcaatgataataatgtttggcaggtagagggcggataaaatgcctgcagagatgaggagttccccctccagggagccgatgagggcgccgatgacgagaagaggcaggaaaaaaccgccgggaacgccgcagccgtaactgatgagggtgaaaagaaattttgccagaagaagcgccgcaaggaatccgaagccgtaccgtgcttttgccagcgaatcgaccaagaaatttcctccgcccaagacatcgggcagtgtgaaagcaagaatcgttgctgcaaagagggcaaacatgattttcatatattggtttctgaagacgggaagaccgtaaaaagcgtccatatggagcaggccgtaattgaaaacgatacctgcaaaaccgcaggaaacggcaataagcactacacaccacaagtattccgacggcagatggacaagaagaggaaaggaaaaacttgtcgccgatccgaaaaagaactgggacacaatggtggcggaaatagcggaagccattgtagggagaaggacagcgcccgaaaaattgcggtggagctcctccaaagcgaacatcgttcccgccaggggagcattaaacgccgccgcaagacccgcgctggcgccgctggtgatgagataccgttcctccatgcgtgtccgtcccatgaggcggctcaagccctgggcggcaacggcgccgatttgaatagacggcccttcacggcccagagacaagcccgcgccgatgcctaaagcacctgcggtgatttttacccagagaatgcggaaccatttcattttgaagaaaccgagaatgacacccttcacctgcggaatccccgacccggaggccatgggggcgtatcggcacatgccgtaaagtgcgccgccgatgaaaaaaagcgccgccagccaccaaaggagggggaggaaatcggaaatcccgaaagacgggataatgatttcctgaaacagacggcggcgataggtatcagccagtcccaggaggaaacggaaaagggcaatcaaaagaccgccggcgattccgacgaggattccttccagaaaaaggcggagacggaaccggtgccagtgatcaagagcgagatatgttttgaaaagctgtttgttaaactgcaggcgggattcttccctttccgccttttccgattgagagtccataatctttccgatagaaataagccgcgaagatgctgcagcctgaaaattaaagtttaacctggtaagtgagtaccgcgtcgatagcggaaatggcattttcccaggtgaggtaagaatccttcatctcccgggcgtaaaattcatcttttacgtacttcgcattgatttccacattcaatctggccgcacggatacaggaaacggcttcttctgcggcgataaccgcgtcggtgatgacattcttattgcagtgaagcagaagctgggtaaatgcggggagcagttcgctcatagcgtctgccatccggtaaggtgcttctgccgattttttaaaagccgcttccagattttctttccgcttcgtgtcggcaggatcccttggtgattggagaagcgccatcaattcacagaagttttttgcatcttcatccatcaagtcaaggaaaatagaacgggccgattcgaaaatggcggcatactgctccgctttttcacggaaatcatcagtattctttccggaggaagaaaggcgggaagccatttctcccagggcgcaggcctgtgctccgatgagtcccgcagcagcaccgccgccgggagcgggagccgtagaaccgagagcggataggtaagcatcaatcgtcatttcatgaaatttaagagacataggacctcctatatgctttatacgcttttattatatagcatggataggaaagtagaaagaaatattataaaaggatttaaagagaatatgggtttgtgaaaaaataattgacaaagcaccgcccctaccatatactaaaaatgtaataattatatcttagcgagagatagtaggttattacaataaggtccaacaggagtgttggtaccgtaaagctctaacggcacccacgggtgccgttatctttttatatgactttttaaccgtagacatgtggatatttttagtaaatattttgtacaaaggagagaagccatgaattacgtattgggattggatgtggggattgcctcggtagggtgggctgtattggaactgaacgaggaagataatccgatacgtatagaaggcttgggagctcgtatttttgacaaggcagaggtaccgaagacaggtgcgtcactggcagcgccacggagaatgagcaggggaattcgccgtgttatccgccgccgtcgtttccgtttgcagagagtgcggagttatcttaaaagacataatattttgccggcagaaaaagtagaccatctctatgatgtgccttcggcgatagatatttatgaactgagaaaaagagcgctcacggaaaaagtgacggctgaagaatgggcacgacttctcatattctttgccaagcatcgcggttttaaatcgaatcgtaaaaaagcaagcggcgatgcagatgaaggtgaaatgttgaaagctattgccgccaatgcggagcttttgaaaaattaccgcaccgtcggtgaaatgctttgtgataatgaaaaattcaggaagcggaaaaggaacagagacggcgcctataatttcaccgtaagccgcgccatgctcatagaagagatacatacactttttgaaatccagcggaatctggaacaaaaatttgctgatgaaaaattagaagaagaatatgtaattctttttgtagcccagcgtaagtttgatgagggtccgggcgagaacagcccttatgccggcaatcaaatcgaaaaaatgattggctcttgtacacttgaagggaaaaaagaaaagagagcgccgaaagcaagttatgctttcatggcgttcaacctgtggcagaaaattaaccatctgaaaataaacagacgaggaagcgagcgttttcttacagaggaagaaagacgacgcatcgctgatttagcatggaaaaaagaaaaactgacttatggcagtttgcgtgaagtcttgtttctcgatccggaagaccgtttcgtaggacttcggtatgatttgaaaaaggaaaaagaggaagatctggaagagcctgtgtcagaagcggagaaaatgtctttcagttgggtaaaagactaccatagtatccgcaaagcgttggataaagttgaaaaaaaccgtatccttaaattgagccatgaacagttggataccattgcaacggctttctctgtatataaaaatgaagaaacgatcgagaaatatttagaagaggggggaattgaaaaagcggatagagaagcacttctggaaagactttccagtttcagcaagttcggacatctttccctcaaggcttgctacaaaattcttccttttcttgaaaaaggagaagtttattccagagcctgcgaacgggcaggttatgatttcagaaaaagctctctggaaaatatcaatgatatacctaatcctgtggtgaaacgatccatcagtcaaacgctgaaagtcatcaatgccattatcctccggtatggaaatccggtggaagtccatatcgaactggcccgcgaactggcaaaaaatttccgggatcgtaagaaaatggaaaaaggaatgcaggaaaatcaggcaaaaaatgaaaagatcagacaacgtttgatgagcgaatttggtgtacttcgtcccaagggtatggatatcgtgaaatttaaactttgcgaagagcagaatggagaatgcgcgtattcccagaaacatttcgatatggagaagctcctgagagacccgtcttatgcggaagtggatcatatcattccctatagccgttcttttgatgattcttacaataataaagtcctcgttcttacaaaagaaaaccgggaaaagagaaaccgcatacccatggaatatctggcagatgctacggaacggaagaatcggtttatccattgggtgaagagtaccattcggaacagtcgtaagagagaaaacttgcttcgaaccgactatacagaaacaacagaaaacgaatggaaacggagaaatctccaagatacacagtatatcagtaagtacttgtacaactatcttcggcaccatttggtactggctaagggatataccgaaagaaaaaggcggattatccccgtgaatggcgcggtgaccgcctatatccgcaagcgtttaggaatcaataaaatcagggaaaacggtgatctccaccatgccgtagatgcggtgatcatcgcctgcgctacgcaaggtattgtaaataaggtgtcacggtacagcaagagcagggaactgtgggattatgaagtagatatggaaacgggagaagtccttcagaagaaaaatgaaaatagaaaagacatatttcctgaaccatggctgaatttccgctatgaactggaacaaaaagtcagagtaagaccgctggatatcccggaaactgctgatataacagaaatggaagaaccttttgtgtcccacatgcccaatcggaaaatacatggcccggcacataaggaaaccattcggagcggaagattgaaagaagaaggatataccatttcgaaaacggcgctgattgatttgaaactgacggaagataaagaggaaataaaaggatactacaataaagaaagtgatcggctcctttatgaagcgctgaaaaaacaattgcaaagatatagtgggaaggcgaaagaggcatttaaagaaccattccataaaccaaaggccgacgggacgcccggtccgattgtgaataaagtgaaaattatggaaaaatccaccatgccagtaccggtcaatggtggaaaaggcctggcttctaatggaaatatggtgcggattgatgtgttccgggtagaagaaaagggaaagaagaagtactattttatccctgtctacgtggcggatacagtgaaagaagaattgcccaatagagctgtgcttgctcataagccctatgaggcatggaagatcatgaaagaggaggattttattttttctctgtatcccaatgatttaatttttgtagatgcagggaaagaaattccctttaaggcagcgttaaaaggaagtactttagatccggagaaaaaggcgagccgttttctgatgtattacaagggggcggacattgcaggcggtacaataaatggagtcaatcatgatagtacatatgggattagaattggcctacaacagctaaaggaaatcagaaaatgccgtattgatatacttggaaatatttcttttgcaagtaaggaaaaacgacagacctttcggtagaggaggcagttatgtaccaacatatcatggtggaaagcggtgctaaagtatttcaaaagaataatcgtttttgtatcgaaaaagatgtacttcatgaactgccggcggaagacattgctacggtagttttggacaatcgggaaatcatcattaccacgtactgcctggaaaagctttcttcgcgagggacggtggttattctctgcaatggaaagcatatgccggaatctgtccttcttccttatggcgccaattcacggcggctgaaaacgatccgccgtcaaatttcccaaaagaagccgcgcttgaagcagctctggcggcaggtgatacaggaaaaaatacggaaccaggggcggtgtctggaattttgcggtaaagaaaatatagtggataggctggtagacaaagtgaagtccggcgatacgacgaatgtggaaagcacggcggcggccgcttactttcccaagctttttggggaagactttacccgctgcacaccgtgcttggtgaatgatatcctgaactatgggtatacgattcttcgaagcgccatcgcccgatacctggcgatttacggctttgaaccaagccttggcctttttcaccacagtgaattgaatgcttttaatctggctgatgatctcctcgagccgttccgtccccttgtcgatttatatgctttccgttttgtggaaagtgagggagagtatcttacaaaagaaatgcgtcgggaacttgtccaacttttaaactgcaatattcgttcaggaaaagaaatccacggtgtgaaccatgccattgagcgggaagtgcaaagtttatcacgatgctttgaagatacttcggcagttttgctccttcctgagttaatgcctttacaggcccatgtctatgagtaagtatatgcgtctcatcgtaatgtttgatttgcctacagggacagcaggagagcggagggcggcgaatcagtttcgtcattttctcctccatgacggctactatatgatgcagttctctatctatgtgcgcctttgcaatgggcaggaagcggcaacgaagcaccgcagccgtcttttgcgggaacttcccgaggaaggttctgtgcggacgctccttgtgacggaaaggcagtttgaagccatggaaattctttgcggagaaaagattcctgatttggatgagcctcaaaaagaaagtaaactacttgtcttctaaaaaatgaaaaataaagaggagaaattacttatttctttgaaaattttcatactaaaaagacgggatactgagtaggtacctcgtcttttttagcaggtattataccttagcgagagatagtagggaattacaactgacgacgcttttattcgacggattattgaattataccttagcgagagatagtagggaattacaactgttatgtgttcgtacattttggcaacgatattataccttagcgagagatagtagggaattacaactttgtgaatgtcggaaagaacgctctcaaaattataccttagcgagagatagtagggaattacaacatatcaacacacgaaaacaccaggggagttattataccttagcgagagatagtagggaattacaacgtaagattttttctctccgtctttatagccattataccttagcgagagatagtagggaattacaacgcattgatagatacagtgccattgttacctattataccttagcgagagatagtagggaattacaacaatggaagtagaaactataaacattcttttattataccttagcgagagatagtagggaattacaacagagatcagatcctgccagccttcttctgcattataccttagcgagagatagtagggaattacaactcttggtatgaagaacagtatggtacttctattataccttagcgagagatagtagggaattacaactcttggtatgaagaacagtatggtacttctattataccttagcgagagatagtagggaattacaaccatcgctttctgcattgcttcgtacttcttattataccttagcgagagatagtagggaattacaactaaaaaagcgctcagttgcgtgcagatttgactttttgtcattatctcttatacttttaataaagaaatgagcggcttgaacctccgcccgcattggtggaggatcatcaagtcgtttatttctttagcatcattatgtagaagaataaaataggaagggagttaccgcattcaaaggtcctttctctgaaggattgcaatattgacgcctgtgggcaagcatggtataatacattccgttatacagcaggtgctgtatgacaagatgcggcgggtgtggtgaagtggttaacacggcggattgtggctccgttatgcgtgggttcgacccccaccactcgccccattttttttacacaaatctatacggtttgcaggataggatccattttccataatgggggtatagccaagcggtaaggcaacggactttgactccgttatcggtggttcgactccacctacccctgccaatatatcgcgcggacagccgcgtttttttattggtatttttaaacggcgctgtaccgtaggcacgcatttttgtatgtgtatccgtctgtggactgcagatctcatggtcttaatttatgcgagaatttttacatattaatggttaccgcatctttctatgatgaagggaggttggattaatttctattgattatgagatgaatacatataaagaaaatcattgttttttctgatggttgtgataaaataaaattcgattcatcccggatgcggacagacacccgccggggggatgaaaggagattggaagaatgagcagctcagtacagttttatttggcgatttttatttttctcatgacttatgcgggcattatgtcagagaaaatacatcgtacgatttgtgctcttgccggcggcggcgccatgatttactttggccttgttacgcaggagcaggcgattacagaatttatcgatttcaatacactgggacttttgacggggatgatgattttgatttccgttgtgaagcaatccggtttctttcaggtacttgcgttgtgggcgctgaagaaatcaaagggatctccgcggaagctgctgattttgctttctatcgtcacggcggtgggggcggcgctcattgattctgtcacggcggcactcctgatcgcgcccatgacgatttccctgtgccgcatgctccgtatgtctcccgtgcctattctgatttctgaaatattgatgtgcaacataggcggtacggcacttatgatcgggaatccgccaaacgtcatgatcggttccgcgacacacctggatttcaatgacttccttataaatctggctccggtcgttttcattacagtcattgtcatcctgattgcggttcttctcattttcaagaatcatttttccagtgtccgcatgagtgcggaggagctggaaaaaattgatattatgtccggcgtggaagacaaatctatcttcagccggtcgcttatggttctcgcgcttacggtcctcggcttcgttgtccattcccattttggtctggaatcggcaacggtcgccatgacgggcggtatggcggcactgctcttctgcggcatcagtccggaggatgctcttaaagaggtggatctggacacactcatgttcttcatggggctcttcattctggtggggggcatggaaaatgccggcgtcattacggcaattgcggaaaagggaatcgaaatggtggacggcgacagccacctgattaccttcctcattttgcttctttccggtatagcttccgctttcattgacaatattcctttcacggcgacaatgattcctctgatccaggatatgcagtctctcatgaatctgccccatgcggattatatgtggtgggcgcttgcgaccggtgcgtgcttcggcggcaacggtactatgattggtgcttcaccgaatgtgatcatggtggctatcgcggcaaaagaagggttcaatatcagctttaccgcttttatgaaatggtgctttcctctgatgcttctgtctctttttgtggcagggtgttaccttgagacacggtacttcattttcggtatgtaaataaatagaataatataatagagtagaaagcgcttttcttcggagaagcgttttttctgttgtaaaagacggccttaatgaaatatttaatatacgattattgcttttcttttgtgtggaattggccgaactaagataaatgaataaaatgggaattttatgtgtatgtccattccgtaaataagatggttctgcgaaccttttctatttgacttttttgtattagtggtatactataatttctgatgtaaagaatatagtatacgtttttacatatcattcattgactaaggagggtcatgatggacgcaagagaaaatgcttatgtactgtggtttgatgagctgcgccgcgcggacgtgggacttgtaggagggaaatcctcttctctgggggaactgacttcttccgtggatgtgcctgttccgtacggatatgcgacaacagccagcgcatatcgctatttcatggaaaagacgggacagaataagaaaatccataagatgcttcaggaactgcaggatgtggaagattccgtagagctccatgaagtctgtacaaaaatccgtgaaagcatctgctctgccactatgccggaagaccttgccgaacagattggaaaggcttatgaagaacttgccgaaaaggtgggtgaaaagaatcctttcgtcgccgtccgctcctctgctaccgcggaagatttgccggatgcttcttttgccgggcagcaggatacatacctgaacgtcaccgggcgggatatggttatccggaaagtaaaggaatgctatgcgtccactttcaccgaccgtgccgtttattaccgtgcgaagaaaaactttgaccatgaaaatgtggcgctttccgccgccgtccagatgatggctgatgcgaaagcggcgggtgtcatgttcaccgtcaacctggcgaccggcgctgacgacagtatcatgatcgaaggctcctgggggcttggcgaatacatcgtgcagggtaccgtaacacccgataattttgttgtggataaagattctcttactattacttcccgccgcatcaatgaaaaatccatcgaactgatccgcaaagaaggcggcgatgtggaagaaagaaaagtggaaccggaacgtgccaaagcgcaggttataagcgatgaacagattgcccagctggccgattacgcgaaacgtattgaaaaacattacggctgctatatggatatggaatgggctgtcgaccataaagaccgcctttggattctccaggcccgtcctgaaacagtctggtccaagaaaaataaagaaaagaaatcggaggaagaaacagtcatgacaactgatcacaacgtacttgtaaaaggacttcccgcatccccgggcatggcggcaggcaaatgccatgtcatcaccgacccaaaagacatcgatacctttaaggaaggcgaagttctcgtcaccaccatgacgtctcccgactgggttcccgctatgaagaaggctgttgctattgtaactgatgccggcggtatgacctgccacgcttccatcgtatcccgcgaattgggaatcccctgtgttgtcggaacaaagagccgcagtgtggaagcgacaggtgtgctgaaaacaggacaggatattactatcgatgcacgcaacggtattatttatgacggcatcgttgccgatcttgtgaagaaaggaacgcccgctgcccaggcagcaggtacagcggcagtagctgccgagtatttcccgcctacaggcacccgtgttctcatgaaccttggtgatcccgatctggctgataaatatgcatcgcttccctgtgatggtatcggactcatgcgggaagagttcatctggaccacctttattcatgaacatccgctgtacctgattgaaacaggccgtccggaaaaagtggtggatatgcttgcagaaggcatcagcaaagtatgccgtgctcttgctccccgtcccgttgttctccgcttctccgatttcaaatccggtgaatacagaaatctcaagggcggcgataagtacgaaccggaagaaccggctgatcttctcggctggagaggtgcttcccgctactatgatccgaaatacaccgatgcgttccgcctggaactgaaagcggtcagaaaggtccgtgaagaatacggcctgaaaaatctgaactgcatgattccgttctgccgcaccgttgatgaagcagaaaaagtaacggccattatgagagaagaaggactggaacgcggcccggacttcaaacttctccttatggcggaaattccggccaatattctcctggcagaccgtttcaataaatttgttgacggctattccatcggctccaacgatttaacaatgcttattctgggctgcgacagaaataatgatacggtggcttctctcttcgatgaacgcaatctggctatcaagagggctatccgccacctgatcaaagtggcgcacagagacggcaagaccgtatccatctgcggacaggcaccgtccgtatatccagactttacggagttcctcgtaaagagtggcattgactatgtatccgtcaacccggatatggtgaagagtacccggctgaatgtagcccgcatagaacagcgtctgatgctggatgcggcgacgggcagaggtgtcgtagaccaggaagattacgaactttgattttgagataacggcagagggcatgggaaagtggacatgtcctccgccacagttccgctttgcggaagaaggagagaagggaaattatgcagcttaccggccgacaacaggaaatcacgaggatcgttcgggaaaacggtcctatcacaggggaaatgattgcacagcgtctccatgtgacgaggagcgcgctgcgtggagatctggcggttcttctttcaggagaggtaatcgctgcccgccgtcgtctcggctactattaccttgggggcggagaagatcctgccgctgctgaaatccgttcctgcacggcggaagactgtatgtcccgcccgatacttgtcggagcggaatccaatgcctatgacgcggcggttctcctgttcaccgaagatatcggtacgcttttcgtggggaaaaaagatgacatacagggcgtcgtttccaggaaagatcttctgaaagcggccatgggccgtgatgatttggcaaaagtgccgatttccatggtaatgacatcccgctcgaaaatgatttatgctgaaccgaaagaggatcttgtatccatcgcacagaagatgatggattatgaagtcgattgtcttcctgtagggacttttaaaaatgtgggaaatgacaggaaatttgttcttatcgggcgtgtatcgaaaacgaatatcacccgtctctttttggaactggggaaaggcggcagaaaataataaatggcaaaacaaccgcaggtttatgtcgtttccgattctcttggagaaacggcggaaagtgtggctaaggcgaccatcggccagtacgacacggatattgagatccatcgtgtgccctttatccgtcatacggatcagatagaaaaaattattgatgaagcggcacaggcgggggctgtggtctgtcacacactggtcagtcctgaactccgtgccgactttgaacggatagctcatgaaaaaaatgtccgttatgtggatatcttaggtcccatgatgaatatggtgactgatgcggcaggggtgcagccccgcatgaagccgggaatcatccaccgtcttgatgaagaatattttaagaaagtggaagccatcgaatttgctgtccgctatgatgacggaaaaaatccggcaggcttcgcaaaagcggacatggttctcatcggtgtgtcccgcacatcaaagacaccgctgtccatgtatatggcgcacaaaaagtacaaggtggcaaacctgccccttgtgccggaagtgcagataccggaagaaatattccaggtgcctccctatcgtctgattggcctcattattgacccttacaaactgaacggaatcagaagagaacgaatgaaagcgctcggattttcaggaacggcgaattacactgatatcgagcgcattgaagatgagctggcttatgccaaagaagtcatgcatcagcttcactgcaccgtccttgatgtatcaaataaagccattgaagagacggcaagccgcatcatgtccattattgagcggaataaggaactatacggcgacaaatattgacagatgatgaaatctcccgaaggaaacttcaggggatttttttgtgctggaatgattttatgaatacatttgcggcaacactgttcctcatcaccacggcaatagatccttcacgttcgttcaggatgacgattaacgtttttctcattatgaagccttaacgtgtcttatacaaggatcatggagccggccgtcagaaggagctgatagcgcacgcagtgcgattgaggatactcgcttgtcgtaatgatttaaatcgtaaaagaatagttagcttgcagctgacagctcacagctgatagcttttatcttcttaccgccttcctcatcacgggtgcagattcttcacattcgttcaggatgacatcttaacgtcttatacaaggatcatggagtcggccgtcagaaggagctgctggcgcacgcagtgcgattgaggatactcgcttgtcgtaatgatttaaatcgtaaaagaatagttagcttgcagctgacagctcacagctgatagcttttatcttcttaccgccttcctcatcacggtggcagatccttcacattcgttcaggatgacgctttactgttagtgtcattatgatgctttccgctccccatcgttagtaacgctttcccccaatcgtcattcagaacgggggtaagaatgctgtgtgggaaaatgggtaagcagaacggtgacacggagtgaagaatttattacactgatgacactgtgcggtttcttttctgtttatcacaaaattacttttaccgttttcctcaccacgggtacagctccttcgcatttgttcaggatgacatctcaccttaatcgtcatcttcataactaatcctttgccaataccccgaatgacgttttccgtttcttgctactatggcgcttaccgttactcatcatttagaatatatgataaaaatttactgcgggaacaataaaagaaaaccaccttttatttgataataattagaaagtgtgatatgctgtagagcgaattgaaatttattcgcagattaagcgactgctgaatcggtaaggatggaatttacatgagaagcaaacgaatgcggcgaagcattatcagacgtgttttgcaatttatccccgtactgctggggattacttttcttgcgttccttttaatctatttctcgccaagcgatcctgtgagcgtgcgtatgtcggcaggcggtatttccgtcagtcctgaaatcatggagtccatgcgcagatccatgggccttgaccgtccgcttcttgtgcagtacggtgactggctgtggaatattcttcacggcaatatgggaaaatcatatattactgacgctgacgtgctggatcagattttgaaagcgctgccctatacattaaaaatggcgggcgcttctcttttgctgaccctctgcatttcgattcccgtagggatactcacggcggccatgcagaacagcaagtttgattatgtggtccgtgtcatggcgtttgtgggaaatgctcttcccaactttatcatcgccctttgcctcatgtttattttttcctaccgtctcgggtggattccggtgctggcgacgacaaa

SEQ ID NO: 2807 - DNA, 17857 bp, synthetic construct
  misc_feature 1..17857: note = Synthetic
  source 1..17857: mol_type = other DNA
gatggaagtggccgacgccgtgcccggcgtgatccggcgcatggaggaagaaatggcagtgccgctgctgcaggcgccgatgatcttggattaagatgaaagggcgcgcggcagcgctgcggacggctcttgccggttgttgttgtattatcctgctggcggcgtgccttctctttgcggcatgctgcggacggggagcgggcacagaggcggagcagctgcaagtccatttcctagacgccgaccaggccgacgcggccttgctgcagtacaagggacaacatatgctcgtcgatacgggcgacgcagacggcaggcctgctttggtacagaagctcaaggaaaagggcgttcagacgctggacgtcgtgctgataagccatccgcacggcgaccatatgggcggcatggccgccttgttcgaccagtttcacatcaaacaaatatacgacaacgggcaagaatcccgcacggcgatgtacaagaattacgtcaagaacatcgcgcgtaagaagatttcctataaagccttaaaagggggagacaagattgtttttgccggcgacgtcgtgtgccatgtcctgtggccgtcggcagaaggggcggcagcgatggctgtatcggaaagcggccggaccaataaccagtctgttgtctgcaaggtatccttcggcagcttttccgtcttgtttacgggagacgcgcagcgggaagcagaggaacagctgctccgccagggccggcgaaacgacctgaaggcgacggtgctcaaggccggccatcatggtagcaggacctcttccagcccggcgtttctcgaggctgtgaggccggaagccgccgtcatttcctgcggcgccggcaattcctatggatttccccatgccgccgttttgacagcgctcaaaaagcaaagggcagacgtataccggacggaccgggacggtacgatatccgtcgtcagcgacggccagggatataccataacaaaggagcgataatatgaagacgcttatcggcagcgtcgaccgcattaccgggacgacggcctatatcatactgaacgacgatgaacatgtcctgcagattccggcggagctgctgccggacggcgcagcagagggcatggcctatacgatcaccatcgagcgcaacggcgcggaagaacggcggctgcgcgatgaaatcgcggcgctgcggaaggccttgaaggattagcgaaaatacgaataggaattttgccacaaaaagatattatccggcagcgacatgtgatataataaacaggtcaattttttcaaaggagagatatacgtgatgaagaaactttttatacttccgctcctgatgctcctgtgcctgattcccatgctgccggcgcaggctgcttctaaggcggaaatcaccagcgtccgcacggcgacccgcaacgacgccaacgttccttttgtacgaaccgtattggaattggacagcaaggtcacgccgcgcctctttatcgataaggacgggaaatatgtcaccgtgacgctgccgaacgccaagattgctaaaaacgtagaaaagaagtacaatgcggaccgcaacgtcgtgtcccgcatcagcttgtctcagcgttcgtccggtacagatgtcaacatcaaggtccccagggccgtgaccaagagcgacgtcaatgtctttaccctgccgggaacggacaaggctaaaaaggaatgccgcgtcgtcatcgacgtcaacgacaaatcgggcaaggtcaagcagtggatgcactggaacgacgctaagatcggcattgacaatacgtccctcagctcgacctattccgtcaaggtgccgttgtacagcagcagccgttcatacaagctgaccaagggcttaaaggataaggtcatctgcatcgatccgggccacggcggtaccgatgtcggcgcaatcggcaagatctctcaggaaaagaatatcaccctggcgatttccaagaagatcgccgatttgctgaatgatgctggcgcgaaggtcatcatgacccgcacgaccgacgtcgacgtatatgctccgtacgatgccgcagcagaagagctgcaggcccgctgcaatattgccaatgcggcaaaggccgacgccttcgtatcggttcacatcgactccttctcttcggccgacgcccgcggcgtgacggcgtattacaacagcaagacgcctcatgattacagcctggccaagtacatccacaatcagaacatgcaggcgacggagttccccgacagaggcacgcggacggctaatttctacgtgctgctccatacgaatatgccggccgtccttttggaattgggcttcatttccaacccgacggaagaacgggccctcaattcggaaaaacagcagcagaattttgccgaaagcatcgtcaaaggactggccgattatttcaaccataacggcagataaagaggtctggaaaaaatagctgtaaatcttgaaaaattctattgacagtttaccggctgtcatgtatactggaaaagtcgtagcataagtggctaggataagccgcatggagaggctcgtaagtccctgcaaagggcgccgtattcagcgagtatatgtatgaggaggtgtcactcatgtacgctattattaaaacgggcggaaaacagtatcgcgttcaggaaggcgacagcatttttgtcgaaaaactggctgctgatgttgattccgaagtagtattcgaccaggttttggcagtcgtaaacgacggagacgttaaagtaggcgctcccgtagttgaaggcgctaaagttactgcgaaagtattggaacagggcaaacagaagaaaatccgtattttcaaatacaaagctaaatccaactaccgtcgccgtatgggtcatcgtcagccttacacaaaggttacgattgaaaaaatcgaaggctaatgattacgattacattgcagcgtgataaggagaagcgtattacggggttcgatatatccggtcatgccgggtacggcgaagccggaagcgatatcgtatgcgcggccgtatcggcactggcacagtcggcattattgggtctgcttgactacgatgctcagcatgtgcagtacgacgtaggagaaggctctttatccgttcatgtgatgaaagacggcgtcgcgccgcaggctatcctgcgcgcgatggaattaggcttaacagaaataagcaagcaatacagcgagtatgtaatactccattcatagacgtcaggaggtggacgggatgttcaattttaatttgcagctgttcgctcacaaaaaaggtaccggctccacgcgtaacggtcgtgacagcgaatccaaacgccttggcgtaaaatgccatgacggcgttctcgtaaaagccggcaacattatcgttcgtcagcgcggcacgcatttccatccgggcactaacgtaggtatcggtaaagacgatacgttatttgctacggctgccggcaaagtcgcttttgaacgctccggcaagtacaaccgtaaggtaagcgtatacccggttgaagctgaagcttaagtatgagtataaaaaatcctgcagcatggctgcgggatttttttgtattctgaatctgttatgacacgcaataactgaattatttaggaggaaacagtatgcgcatatatgtaaatggagaagaacggaatttgcatgtgtacgacaaaattgccggcgtagattacgccaaaaacgtcatctgtgcccaggaccgtctggatacggacgacttcggcgcatttacgatgactgaggaagaatttgaatactggcgcaagcttctcgtcaccttgcaggattcggaagatatccgctttgccattaaggatctggtcgatgaagaagaattaagcgactatgtttacgaagaaacgaaatacgtcacccagacgcagcaaattattgaagtagaaaacctgagtcttaaagatctccaaaaagccctgacggaaaagaatacagattggctgaaggaaaacggcttcgtcaagaccttggaaaaataaatgtttttgcagagaatagtacgtattcctgaatgggttaacttgcagtagaataggtgtcaaggaaagggactgtcgcatgaagaatcattagcctcttcgtgtgacagtcccatttttatttttaaatgcattgcagctcaaaagctccgcagcagaatatatctgccaacggagcttttgagcagtgaatgcatcactaataaattatttcaatccacaattatgcttcagcataatggctatcttattataacaaataaattgaaatctttgaattttcccgtatagtattgactgttctttttgcatatattaaaatttaattaactaataaattgaattttaatataaacagcttttgatggcattgacgttaggtcttatctattgtatactataaatgtagtaattatatcttggcgagagatattaggttattacaataaggtccaacgtagttggtaccgcaaagctctaacggtatgccttttggcataccgttatctttttatacagacttattttagagacagggagtgatcatatgaattatgtattaggcttagatattgggattacatccgtggggtgggctgtcttggaattagatacacacgatgaacccatacgtattgtcgatttaaactcccgcatctttgaaaaagcagaagtgccgaagacgggggaatccttggctgcgccgcggcggatggcgcgcagtgctcgtcggctgacaagacggcgtcggtttcggcttcatcgcgtgaggcgatatttgattcgaaatcgtatacttgatgcgcgacaggttgaagagttgtatgttgattcgataggaaaaacagatatttacgaactgcggtatcaagcattaagccaacaagtttccaattcagattgggccagactgctgattttctttgctaagcaccgcggtttcaaatccaatcggaaacatatcagcgacagcggcgatgaaggccagatgctgaatgctattacggaaaatcaagagattctgaacaactatcgcaccgttggcgaaatgctgtataaaaacgaaaaatttaaagcctgtaaacgaaataaaggcggttcttatgcatttactgtcagccgggatatgctggctgatgaaattcatgccttgtttgacgtacagcggagtctaggacaagcctatgcgtcagagaaattagaagaagaatatatggagctattttcagcacagcgcaattttgatgaaggtcccggtatgaatagtccatacagcggcaatcaaattgaaaaaatgattggctgttgcacctttgaagacggtgaaaaacgagcgcctaaagccagctatgcttttatggcttttaatgtatggcaaaagattaatcatcttcgcgtaacctgtgaaggaacatatcgctctttatcacaggcggaaaaagaaacgttggctgcactcgcttggaaaaaagaaaatatcacttttaaagatattcgcaataagcttggactggatgatacagttcgctttttagatgtaaattataatttagacaaatataaaacggcagaagaagccgagaagaaggtaaaatttagctgggtcaaagaatatcatgcgattcgcaaagctttggataaggtgaaaaaagaccgtatttcagaattaagccatgagcagattgataccattgcttatgcgtttactgtctacaaaaatgatgaagccattaaaagatatttgctggaacatgctattgaaccggctgatgctgaagctttattagaaaacatatcgggattcagtaaatttggccacttgtcggtcaaggcatgctataagctgctggagcccctgcagcagggccatgtatataccaaagcctgtgaaatcgccggatacgatccgcagaaaagtaatcaggaaaatatcaatgatattccgaatcctgtagtaaaacgggcattgagtcaggctttgaaagttattaaggcgattatccggcaatatggatgccccccctgtggaaattcatattgaattagcccgcgagctggctaaaagcgcaaaagaacggacagagctagagaaggctatgaaggacaatcaatcccgcaacgaaaaaatcaaaactaagctccatgagctgaacgtcatgcagccgacggggttggatattgtcaagtataagttatacgaacaacaacagggcgactgcgcttattcgcagaagaagttcgatgtgaaccgtctgcttcatgatcccacctatgcagaagtagatcacattattccgtatagccgttcttttgatgatacgtaccgcaacaaggtattggtattgacgaaagaaaaccgggacaaaggcaatcggacgcctatggaatattttcaagataagccggaacggaaagaagcgtttatcaactgggtaaagcgtacgatttctgatggaaaaaaacgaaataatttactgcgcgtcaattattctgctgatgctgaaaaagaatggaaagatagacatctgcaggatacgcagtatatcaaccggtacttatataattatttgaaacggcatattgaattaaaagaaggatatacagacagaaaaagacgcattattcctgtcaacggtgctgtgacggcatatgtccgcaaacggctgggtatttctaaaattcgcgaaaccggagacttgcatcatgctgtggacgccgttattattgcctgcgtgactcaaggcgtagtcaataagatttcccgctacagcaaaataaaagagctgcggcagttcatgacggcagacggtacggttgttgacaaagaaacaggagaagtactgcagactgccaatccgcgtaaaacggatcccttccccgaaccatggccgaaattccgtcaggaattggaagctcgggtcagcgacaatccggcagaagcgattgcagcgctggggctgccgacatataaaggcattgtcaatatttccgcgccttttgtctcccgcatgcctaaccgtaaggttcacgggccggctcatatggaaacgatacgcagcgctaaaatgcagcaggatgggtatacgatggtcaagacagaattgaccaatttgaaattgaaagatggtgaaattgaagggtactacaatcctagtagcgacaaaatactatatgatgcattgaaacgacggctagagcaatttggcggcgatggtaataaagcttttaaagatcctttttacaaaccgaaatctgacgggacgcctggaccagaagtcaaaaaagtaaaaatcatgactaaatcgagcttgaatgtagcggtaaaccaaggcaaaggcgtagcggataatggcagtatggtccgcattgacgtgtttggcgtagaagaaaaaggaaaaaatgcatattattttgtacctatatatgtggcagatacggtaaaagagacattgccgaatagagcagtgactaggggggaaccatataataattggaaaatcatgaaagatgaagatttcttgttttcgctgtatcccaatgatttaatttatatagaatccctcagtccagtatcttttcatacggtgaaaggatgtacgttagttccgaagatagaacgaaaggaaatgcttctttattatagaaaagcaggaatttctacggccagtattactgtattgaatcacgataatacctatgtaaaagaaagcttgggtatcaaaacaattggcaaattacagaaatgtacggtagatattttaggaaacgtacactatgtacagaaagaaaaaagagtgggatttaaataaaggcgtgatgtggaatgtatcaacatatcgtcatagaaagtggtgcaaagttatatcagaaaaacagccagctttttatagaagctgaacagattcatcatattcccatagaagatatcgctacgctgctgttagataatcgccgtattgcaattacggggtattgtttggaaacggtagtaaaaaacggcgctgtcgtcatattgtgcaacgagaaacacttgcccagcgccgttatgctgccttttgcggctaattcccggcgactgaagatgataaatctgcaggtagggcagaccaggccgcggaaaaagcagctctggaaacagatcatacagcagaagatttataatcagggacggtgtctggaactgtgcggaaaagaaaatgtagtcaaaaagtttatagataaggttaaatccggcgacagcacaaacgttgaaggaactgcggcggcagcgtactttaaagccttatatggagacgagtttattcgccatggcagcgatgtagtaaacagtatcctggattacggctatgcggtgcttcgcggttccattgcccggtatctggccttatacggattcgaacctagcttgggaatatttcatcatagcgagttaaattcatttaatttagctgacgacttaattgaaccgtttcggcctattgtcgacatatatgcgtatcggcatgttggaacggaagaaaaggagatgagtgctgcagtacgtcgagagctggtccaattattaagttgtaatgtcttctccggaaatgaagttcatgccgttcattacgccatagaacggacggtgcaaagcctgatccgtacctatacagaaaaagaaaaatgcttgctgctgccggaactgctgcctttgcagattcatgcgtatgagtaggtttatgcgtttaatcgtcatgtttgatttacctgttcgaacaaaggcagaacgacgggcagcgacgcagtttcggcaatttcttttaaaagacggatattatatgatgcaattttccgtttatgtgcgcctgtgcaacggtatagaagcggctaataaacatcggatgagaatattacatgcattgcctaaagaaggatctattcgtaccttgttgattacggaacgccaatttgaagcgatggaaattttatgtggtgaaaaaattcctgatctagatgaaaataagaagaaaaatacagtcgttgtgttataatttttgcgaaaaaagtgtctcgaaagaggcactttttctgcttttccggcgatttttttcatactaaaaagcacgtcgcagcaagtgtgcaacgtgctttttggcaggtatattataccttagcgagagatattagggaactacaaccattgaccacaataataacagggtattggcattataccttagcgagagatattagggaactacaacccgtcaatcatactgttcatacttctttttattataccttagcgagagatattagggaactacaacgttggcattgagcggctgcacagaggcaaaattataccttagcgagagatattagggaactacaacgcttagtccttcaatagccactacggtacaattataccttagcgagagatattagggaactacaaccaaagaatcgcgcaggccttttttaatttcattataccttagcgagagatattagggaactacaacgtttaaaagtgatgcaagtgcaatagcagcattataccttagcgagagatattagggaactacaaccaaacgaggtgcaggggcagtcaacgcttgattataccttagcgagagatattagggaactacaactactttttcgacggagaaattgggatagtcattataccttagcgagagatattagggaactacaaccgttcaagtcatcgcttgtcacggcattaaattataccttagcgagagatattagggaactacaaccgtggtgcagcggacggaagacgtgccggaattataccttagcgagagatattagggaactacaacattcctgcggtgttggtaacagacacaccaattataccttagcgagagatattagggggacgcagtatatcataaatgactattttttattgacatattgctggttactatcattgtactgtaatatgacacacttgtgaatatgcgaagtcttattattttattttctgtaggggctgttctcaccaaaataggatgattttatgccgttcatatggtataatactattttgtaaatacgtattaaaatttttctgcgaggagtgtctgtatgaaaatcagtgctgaagaaataaagaaaattgcactgttgtcccgcttggaaatcaaggaagaccagattgacgctgtcgggaaacagctgaacgacattttatcgtatatggatctcatgagtcaggtagatattacagatgtacagccgacggctcatgccgtatccatgtccaatgtcatgcgcgacgatgtgccccatacgtccctgcccaatgataaagcgctgcaaaatgcgccggaaccggaagacggctacttcaaagtgccgaaggtcattcaggattaaggagggatattgtggtaacgatacatggattacacgacaagctcgtcaagggcgaattatccgccgttgaattgacgaaagcctatattgcccgcaaagacgccgtagaaccgcaggttcaggcttttttgtcggataaccgcgaatttgcgctggaagcggctgctgccgtcgataaaaaaattgctgccggcgaagccattgccgatttggccggcgttcccggtgccattaaggataatatctgcattaaagggcagtatgctacgtgcgcgtccaagatgctgaaacatttcaaatcgccgtacaatgcgacggttattgaaaagctgacggatgtcgattacgtcagcctgggcaagaccaacatggatgaatttgccatgggcagctcgacggaaaactcggccttccagattacgcataacccctgggggctggattatgttcccggcggctcgtcgggcggttcggctgctgccgtcgctgccggcgaatgcgtatggtctctcggctccgatacgggcggttcggtccgccagcctgcggcgtactgcggcgtcgtcggcctcaaaccgacgtacggcctcatttcccgctacggcctcatcgcctttgcgtcgtccctcgaccagatcggtacctttacgaacgacgtagaagactgcgccattgtgctgaatgccgttgccggtcacgacgcgaaagactcgacgtctattccgcaggccaagaaggactacaagcaggccttggtcaacgacgtcaagggcatgaagatcggcattcccgaagagttcttcggcgaaggtctcgacgccgaatgccgcaaggccttggatgaagccattgaaacgtacaagaaattaggcgcggaaatcgtgccggtcagcatgcctcacgtaaaatacggcatcgctgcctactacatcatcgctccggccgaagccagctccaacctggcccggtacgacggcgtcggctttggcctgcgcgtcgaaggcaaggacatcgtcgatatgtatatcaagacccgttccgaaggcttcggcccggaagtacagcgccgcatccttctcggcacgtacgtcctgagctccggctattacgacgcctactatctgcgggcgatgaaggtccgcacgcttatcaagcatgattacgacgaagccctgaagcaatgcgacgtcctcctgacgccgacggctccggatacggccttcaagatcggccagaacagcggcaatccgctggccatgtacttaggcgacgtctgcaccgttacgctgaacctggccggtcttccgggcatcagcattccctgcggctataagaacggcctgcctatcggcatgcagctcatcggcaaggccctggatgaagaaacgctgctccgtgcggcctatacgtttgaacagaatagaacggacttgcgcaagccgttgcctatgggggaggttgaattataatgaaatacgaatccgttatcggcttggaagtccacgtcgaactgaaaacgaagacaaagattttctgcggctgcagcactgaattcggtgcagaaccgaatacgcatgtctgcccggtatgcttagggcttcccggcgtattgcctgtcctcaataaggaagtgctccactttgccgtcaaggcagggctggcgctgcactgcgacattttgccgtacagcaaatttgaccgcaaaaactactactatcccgatttgccgaaaaacttccagacatcccagtttgacctgcccatctgcaagggcggctacgtggatattgaagtcaacggcgaacagcgccgcatccacctgactcgcatccacatggaagaagacgcaggcaagctcgttcacagcggcggcagcatcgacacggctgattcgtcctgtgtcgactataaccgcacgggcgtgcctctcctggaaatcgtcggcgaaccggagctgcgcagcggcgaagaagcgcgggcctatttggaaaagctgcgttccattctccagtacttaggcgtatcggactgccgcctcgaagaaggcagcatgcgctgcgacgccaacatctccgtccgtcctgtcggcagcgacaagctcggcacgaagacggaattgaagaatatcaactccttcagcggcgtgcagaagggcattgaatatgaagccgtccgtcaggcccagatcctcgaagaaggcggcacgattcagcagtgcacccgcggctgggacgacgccaagggcgttacgttcctccagcgcgtcaaggaaggcgacagcgattaccgctatttccccgaaccggatttgattcctatcgaagtatcgccggaatacattgaagaagtccgcaaggagctgccggaaatgcctgacgcccgtaagaagcgctttatggacgaactgggcctgcccgaatacgacgccaacctgctgaccttggaaaagcagacggcagactatttcgaagacgtcgtcaaatgcggcgtcgatgccaagacggcgtcgaactggatgctcggcgaatttgccaagctcctcaatgaaaacggcgtaggcgctgtcgatgcgcccgtacagccggcggcgctggccgaactgctccagctcatcgccaagaacaccatttccggcaaaatcgccaagaaggtactgcctgaaatgtggaaatccggcaagtcggccaatgacgtcgtaaaagaacagggcctcgtacagattaccgatacgggcgcactggaagaactggtcaagaagatcatcgaagccaatccgcagtccgttgccgactacaaggccggcaagaagaaggctatcggcttcctcgtcggccagatcatgaaggaaacgaagggccgggctaaccccggcgtcgtcaacgagctcttgacgaaaaatttgcaataatgtaaataccgagtacgaatagaaaaaccgcttatgccgcaattcaacataagcggtttttcctgtaggcaggagattatgatgaatattacagaaattaaagggaacagagacgcctatatcgaggccttgacggagctgtgggaacggtcggtcaaggcgacgcatgattttttatcggccgacgaaatcgaggctattaaggaatacgtgccgcaggctctgggtggcgtgcccgtattagtcgcggcttgcagcgagcagcaggtcatgacggcctttatgggattggacggcagccgtatcgaaatgctcttcgtctcgccggaagaacgggggaagggaatcggaaaagccttgatccagcaggccgtggaacgatacggcgcctgggaagtaacggtaaacgagcaaaatccccaggccgtcggcttttacgagcacatgggctttacagtgtataagcggtcggatttggacgaacagggcaatccctatccgctgctgtacatgaagctgccgagatagcgtatctgtaacgtataaaacctctgccgtcatgcggaacgaacgcataagacggcagaggttttattttgcagcgtatgtaaaattataataagatatattttccaatgaagatgaccgccagaatgtacatgagcaggctgattttttcccgtttgcccgtcaggacgttgaggatgacgtaggaaatgacgccgaaggaaatgccttcggaaatgctgtagcaaaagggcatggcaatgatggtaatgtaggccggaatggcttcgctgaaatcgtcgaagtcgatgccgacgacggaggtcagcatgaggaagccgacgatgaccagagccggcgcggtggcgaaggccgggatggccatgaagatgggcgacaggaatagggacaaggcgaagaaggcggcgacgaatacggctgtcaggcccgtgcggcctccttcgctgacgccggtagcgctttcgacaaaggtcgtcgtcgtgctggtgccgagaacggcgccgaaggtcgtggcgacggcgtcggccatgagagctcccttgatgcggggcagcttgccgtcggcgtcgagcatgttggctttggaggaaacgccgatgagcgtgcccaaggtgtcaaagatatcgacgaataaaaaggcgaacatgacgatgagaaaatcgacggaccagaggcggctgaaatcgagatggccgaagatcggggcgatgctggccggagcgaaggccgccgcaccggcagatacgtcggggatgacgctgtacatatgcagctctggattggggacgtacaggccggtcagttcgcagaggactgccagtatccacgtaaacaaaatgccccagaggacgttgccgcggacacggcggatcatgaggaaggccgtaaacaagatgcccagcatggccagcagtacggtgatgccaacggtgtggaaggtgccgtcggcagcggcctgcttaaaggaaaagagggatatcttcgtagccgggttggcgacgatgatttgcgcgttgaacaggccgatgagggcgataaacaagccgatgccggcagatacggcctttttcagggtcatcggtatggcgttgaagatggcttcgcggacgttcgtcaaggataggacgataaaaatgacgccttctacaaagacggcggccagagccatttcccacgtatagcccatctgcaggactacggtataggcgaaaaaggcgttcagccccataccgggagccagggcgaagggatagttggcaaagaaggccatgcacagcgtgccgatgagggacgccagggccgtcgccgtgaggacggcgcccttatccatgccggcggcgctcagaattgtcgggttgacggccaggatgtaggccatggtcataaaggtcgtaatgccggcgatgagctcagttcttacagtcgtgccgttttgcgttaagtggaacatgcggtcgaggaagttcataatgcaccccttttatgaattataaaaataaaacaaaaacataggtatgattatatccttttcatgtcaaaatagcaatgagaagggtaaaaatattttttatagctatataaatttattatatagaagatatttttcagtaagatactttggcttccccgcagcgggtatggtacaataggagtacctatagttggcaaacaaaggagagttacctatggcttctgcatataaagacatgttgagacgaagaattgaagcggcccaggggatcattccctgcgacttggtccttaaaaactgccgtattgtcgatgtgtatacccagtccatacgggaaggagacattgctgtcatagacggcgtcctcgccggcatcggcggttcgtacgaagggcggcgcgtcgtcgacgccggagggcggtatgccgcgccgggcctcatcgacagccatattcacatcgagtcgtcctacgtcagcccggaggaattcggccgcctcgtcgttcccctgggtacgacgacgattattgccgaccctcatgaaatcgccaatgtctgcggtctggccggactgcaatatatggccgaagcggcggagcagaccgtgttggatattcagttcatggccccgtcctgcgtgcctgcgacggcctttgaccacagcggcgccgtcatcggcgcggaagagctggcccgggccctgcaggaccggcatatattgggcgtaggggaatttatgaactatcccggcgttacgacagcccaggacgacgtgctggataagttagcggcggcccatgaagcgggcaagctcgtcgacggccacagtccgggccttcatggcggcgggctgcaggcctatgccgctgccgggattcggacggaccacgaatgttccacgacagaagaagcgttggaacgcatatctctcggcatgtacgtccttctgcgcaacggctcggcctgccgcgatttgccgaatctcatcggcgccgtcacgccgcagaacctgcgccggttcctgctgtgttccgacgatttgcatttgaaaacgatattttccaagggtcatttgaacgagcacctgcggctgtgcgtgcggtacggcatttcgccggaaggcgccgtcacgatggcgacgctcaacgctgccgaatgctacggcttgtcggaccgcggagccctggcgccgggcaaacgggccgacgtcgtcctgtttgacgatttgcaggagttttccgtttggaagactttcattgccggcgaggaggccgcgtccgaaggggcgtatattccgccttttacgcgggccgacaccggtgctgtccgtcacaccgtgcatctggccagcttttctgccggcaagctgcgcatgaccctgtcctcgccgtcggtacacacgatagatattattcccggcagcgtcgtgacccgcaaggggacggcgacggtagccgttgatgaaaggggcgatttcgtgtatgatgccgccgctgatatcgtcaaggtcgccgtcgtcgaacgccatcacggcacgggcaatgtcggcctcggcctgctgcggggctacgggctgacgaagggagctgtggccgtatccattgcccacgattcccacaacatcatcgtcgccggcgcgaacaacggcgacatggcggcggccgtcgaagccgtcgcggcccaggaagggggcattgccgtcgtgttggacggagccgtcatcgcctctatgcccctgcctattgccggcctcatgagcgaccgggacggccattgggtagaagcgcaggccgaagaaatctacgcggctggccacgaagtgctgggtatccatgaagacgtggacgtcgtcatgaccttgtgcttcatgtccctgccggtcatcccgcagattaagcttttggatacaggcttattcgacgtagacgccttttcttttacggatatcgaggcagaataggctgtatggagtatctgcgtccgttagcttggatgttaaaatctacttcataagcaacaaaaaaatggattcagcgtgaggagctgaatccattttttgttgcttatttgtcgaattttttgcctgtcagcatttcataggcttcttcgtatttttcaatcgtcttgtcgatgacgtcctggggcaggaggaaatcgctgtccgggttggctttgagccagtcgcggacgaactgcttgtcataggacggctgggactggccgggcttgtagccttcgaggggccagaagcgggagctgtccggcgtgagcatttcgtcgcctaatacgatatttccttcttcgtcgaggccgaattcaaacttcgtatcggcgatgatgataccgcgggacaaggcgtagtcggcgcatttcttgtacagggcgagggtgtagtcgcggattttttcggcgtattccatgcccttgccggggaaggtcttgtcgaggacggctgcgccctgttcgagggagacgttttcgtcgtggtcgcctaattcggctt

SEQ ID NO: 2808 - DNA, 16285 bp, synthetic construct
  source 1..16285: mol_type = other DNA
  misc_feature 1..16285: note = Synthetic
gtaagaggtaacaataccattttgaacgtatagtcatagaaactccttatggggaataaataacaaaaaagaaacagaaaataggaaaataaaaggtccggcattttctgtttctttttgttttagtatgccctattaaaatttgtattcaatgcccaattgatagtttctgcccggagcggtccaccattcattggcttgtccccaccagttcgtccgtgcattagatgcttcggcatagaaggtgttgaacagattgtttactctgccgaaaatggtaagatccggggtggcatggtagttggcactcaagtcggcaacccagtaagtatctttggggaaaaatttattattggggagcgcagcgacatccggagtctgcggtcctttacggtctatagttccccgcacatccagctgtgcatcccatgtcggttttgcataggacagtccgaatatgacggcatgtttaggaatatatccgtctacatttgtggctctctggggtgtaggatctacatgtgtataggtatagccgaaatggccggtcagttctttggtaaactgttttctgatatccagattcagcccattggctttttctttgtcaaaattgtcatactttgcaggtttcaaattagaattccatcccagtttgttgtttgattttcttgtaaatacactgagctgccccgccatggtatctgagaattgatggcttatgcccacttcataggtgtggccgctttccggttttaagtccgggttagcgccccatgaaccgtaaagttgggaggcggaaggagcgaggaagtagctgttgtacgaaatataagtattggtactcggatttatttcgtaagctaaggatacatgtggagacgtgtggttaccgaaagcggaatggtgatccaatcggatgccgggagtcagagtccattggggagccactttccattcgtcctggaggtagtaagacatattggtaagttttacaccttttaagctttttactttatcctgctgccagtcaaatccggccactatggtgtgggtatctccggtccatgtgaattggtcggccaatccttttgacacaatatctgtcttccaaccgttggagttacttttgtaatggttgtacaaaagagtaaagcggttatctgaattttcgctgactttactggtccatataccacgccaagtatctttattcacctggccatgtttgcgtaggtttaattttttgttggagtcggaatacatctgatccgctttatatttatcaaagtagaaggaaacatcgttattttcattcaatgcataacctaagttaaaggcataactggaggcattttgatgttgcggaattttaagaccttccgcatctttataatctgaaatgatgtctttttgataatttgcacgccagtgccagccgtcttttctgccttctgtattgaaagaatattgttcctgaccgtagctgcctcctaaaacgcggatagagttggagataccgtcgacaggctttttagtaatgatattaataacgccgccgacagcggaagaaccgtataaagcggaagcagagccttttaatacttcaatccgttcgatgttgttcagattctgcatggtaaccagaggtgctttgagatctgtggaattcatgacaattccgtcgaccatccataccacgttgttgttgccgttaatatagaagctgtttgaattctggtaacctacaccgccgccgtagtttgcaatatatacattggaaacatttcttaatgcctgggacaagtcggaatagtgggacctttcgatttcttttcccgtaataacactgatgttggccggtgctttgtttaattcgatgggggttcttgtagctgttactacgacagggtttaattcatagacctccgattctgcatagcctgtataacctcccagtacaagggcggctccgaccagcattgctaattcctttttcataataagtctcctttcgaaatggaaataaaatagagatatgaatgtaacgcccttgctttttatctatgtatccgtgttcccatagaaaaataacaaaagcggaatatcagagtgtttttgttttactcaaaacattctaaaaattttctaaattataacatataaaaaatcaatagtctcttatttttttataaagtatttatgcccgaaggggcgtcaaagaagggatatttttatttccgtcaaaggatttccttgaacggaatgatttcaaaattgtccgatataacttttttctccttttcgtcataggaccagagtaaaatggcggggtcgccctgataggtaaaaaggcaatttcctttatcaagtacggcacttttggcaatcgtcatatccattccgtggtaagtgcctgtctgattacaaacacacacggggcaatctgtccacagagaagttcttgcccaaaccgtttcgggattcttgcagcattctcccggcggccaggcggcagaaaccaatacaagctctgcaccgccgttttttaccatgcggcaggggtgttcatagtatgcatcggcacaaaccaaaacaccggtttttataccgttcaaagagtagacttttgcttcttcccctaaagaaatccacccttccgctccgatttgatgggaatatatttttctgtgaacgcccttttcttttccgtccggggtgagtatgaaacaggagttgtaagctttttttgctgccgttttttctgcagcggaaagaaataaagtgatttgtttttgtccggcaatttcataaaattctttaaagtcttcctgtttgcggatactcatctttttcggagcgttcttgtcgtttttgtagaaaaaatatccttccaatgctgtttcgggagtgagaatccagccggcttcgcgtgaggaagcttcttttatgccttgaaggagctttttcttatttttttttctcggaccgttggctaaatcaaaatgaagtaacgctattttcattttcttccgtccttttacaaattgatatggttggttatctgtgaccggttaaaatgattttataattatatgtaaattatacacctgtaaggttgtaaatattttctaatccggcgttttcattttaataaatttctattttctttgtacgagggtataatgtaaatgatttcatgtaaaaagataaaacggaatatatcaaacgagtttaagaaagtgtaagggtgcttatgattacgtactatgatatcggactgaatttatttacttcttcttttcccgacccggagaagattatttccgaggcggaagcggcggggatttgttgtattttgaccggttcggaagcggcggaaaatgagaaggttaatgattttgtgaagacccatgccgtgtacggtactgcgggaattcatccccacagtgcagatcgggcggaggaggcggatttgcaccgtatcggagaaatcgtatcgtctaatcccaagattgtggcggtaggcgagtgcgggcttgattatgaccgtatgtattcgtcaaaggaaaaccagctttattatttcaagaaactgattgctctggcggaaaaattggagaaaccgctgtttcttcatcagcgggacgcggaagaggatttccttgcctgctttgacgggcatgaggagatttgccgccgttccgtggtgcattgctatacgggaaacagggaaatggcggaaaagctggtcggcatgggattttatatcgggattaccggctggatttgtgatgaacggcgtgccgatgatttgcgtgaggcggtgaagtatattccgctggagcggatccttttggaaaccgatgcaccgtatcttacaccccgcggaattcccggtctgaaacggacgaatgtaccgcaaaatatcgtgtatgtcgcacaggcgcttgctcattatatgggagtgagtgcagaggaagttatcagtcacgcgaaagcaaatacggaaaggcttttcggtatctgacgggaggcggagatgaaatcgtattatccctttgtatctgaggaagcaaaggaaaagtatacagagatttatcataagacggagggggagtactggcctgctcctttttcccgtgtctatgtggaaacacctttcgggcccacttatgttcgtgtttcgggaaaagagggcgcaccggcgatggtattgcttcccggtataacggcaccgtctttgtcctggtcccctaatgtaagagtttggggaaaatatttcagaatttacgccgtggatatgatcaatgactacggactttcggtggacaggcgtcatccgcttacacgtcatgatctgatagtctggctcgattcggtggtagagcaacttcaactgaagaaatttattcttgtcggtatgtcttatgggggctggcttacggcggaatatgcacttgctttccgggagaaacttcttgccatcgtcatgattgcaccgggcgcgacgatacttcccataagccgccgttttctcttccgtgtcgctttgacgggactgtttcccatatggggcagtcatcgtcttttccgctggcttttcaaggattctctcaatcatccgccgaagtacggaatcagctatgattggtttatggaacggtcggatttgcgtttccgctccttccgccgccgtttcgttgttccgctccgtgtgctgaaagaagcggaatggaagaaaatcaccgtaccctctctttttatggccggtgaaaatgaaaagctgtatcctgcccataaggcactggaagaaatgaaaaggaaatcgccacagacggagcgtgtcctgattcccggtgcaggccatgacctgaccgctcttcaagccgatttggtgaatgaaaaggtgctggcctttcttgaaaaacatctgggaccgcttgaaaaataaaagaacagactctttttccggatagtgaaaagggtctgtttttttatggaaaatatagcctttcttttatgaaaaagtgaacgggaatgcaggaaatgacatttatcagaaaaagacttgtatgctataataaattagtatttgtgtgataaaattttatgcctgcagaatgcttttttgggatattttttcactgattctattcatcggtaaggaggaagatggagtggaaaagaaggattttatttggaaaatgggaggacagcagggccagggtgtcgagtcctgcggagaaattttgggacgtgtccttgcccaggagggatactcgcttttcagccagcgtctctttgcttcccgtatcaaagggggacatacgacgattgcgctccgtattgcgacgaaggaaatcgcaactatcggagagcgggtggattgtctggtcgctttggatcaggaaactatcgatttgcatgggaaagaaattcccgaaggcggcgtaattattgccgatgatgctttccgtccgaaatgggaagctcatacgggacgtatttttctgcccttacctatcacggaactcgcgaaaaaatacggctctatgcagatgaaaaatatagcggctctcggtatgagtgccggacttctcggatttccggaagtgccgttttaccgttttatcgcagaacggtttgagaaaaaaggggcagaagtcattgccaaaaataagagtattttcaaagaaggctatgacttggcgattaaagccatgcagggcgtggaattaggcaagctccccacaccggcgaaaaaagagcagctttaccttttgggaaatgaagcggccgctctgggtgcgatagccgcaggttcccgtttcatggcttcttacccgattactcctgcttcggaaatcatggaatacatgattaagaacattcataaaatacaaggcaccgtggtgcagacggaagatgaattgtcgtccgtaatgatggcaatgggagcaggctatgcaggggtccgtgcattcacggcaacggcaggtccgggcctttctcttatggcagaatccatttccatggcggctatggcagaaattcctgtcgtcatcatcgacgtcatgcgtgccggtccgtcgacaggtatggctacaaaagtggagcagagcgatatccgctatgccattgcctccggtcatggtgatgcggaaaaaatcgttattgccgcatcttccattgaggactgcttctatattacccaggaagcctttaatctggcagaagaattccagacgccggtcattcttttatcggaccttcagttcggtatgtgtaaacagtcggttcccgtttttgatccggaccgtatagaaatcaaacggggcaaattggtaagagacggtcttcctgctttagatacgaaacagaaagcctatttccaccgctttgaagatgtggaagacggtatttccccgagaactgttccgggcgtggaaaacggcatgttcctttccaccggacttgagcacaatgttttcggtaaacctgcagaagggcaggcggaccgtgtccagcagatgaataagcggcaccgtaaatttgccggcgtttccaaggctatccgcccgtttaacgtagctcatgaagatacggaatgcgatttacttctcgtaggtatcacgtccaccaacggagcacttgaagaagcaagagaagctttggaggaatcgggaaagaaagtaaaccatctccagctccgtctcctctcaccgttcccggaagaagaacttcgtccttatgtagaaggagccaagaaaattttgtttgtggaagaaaatatgacggcccagctccgtgaactctttgcaatccgtttcagctgtcacgacaaattcctgtcacttctccaatatgacgggacaccgttcctgacttccaccattttgaataaggcgaaggaggttctctgattatgggatcaccgagagattataaaaatacgattgtaccgaactggtgtcccggctgcggggacttcggtatccagaatgccatagccgcagtatgtgcccaaaaagggtggaaaaatgaagacatcaccttgatttcgggtatcggctgctcctcccgtatcggcggataccagtactgctacggtgcgcataccacgcacggccgttcacttccttttgcccagggcatcaaatgtgccaataaagatacgcatctcatcgtttgttccggtgatggcgactcctatgccatcggtctcggacatgctctgcatgcgatgaaaagaaatatggatatcacctacatcgttttcgataaccaggtgtacggcctgacaaaaggacagacaagtcctgcctcgtcaaaaggatttgttacgaaaacgacacctgacggaaatccgctgacaccgcttgacgcaccgtccatggcacttgctgcaggtgcgacatttgtggcacaatcttatgctatcgatggcaaagggatgattgatatcctcacaaaagcaatcgatcataaaggattttcttatgtcaatatttttacaccttgcgtaacctttaaccatatgaataccttccagtggtataacgaaaacttagtcaaactcgaagatgttcgtgaaaactatgacccccatgacagggcggccgctttccaactgcttgcagaaacggaaagtctggtaacaggcatcatttatgaagaagaaggttcacttccgttcggaagcatcgtcccctcggcagatatcaatctggtggactatgtgaaaaaaccggcagaagaacttttcgaagaactttgcagggaattcagataagacggaatttccacagaccgtgaaattttcataagaaaaagttacgggataaaaatctattgcggcgacgtaaaacaggaaaagccgtataaaaggagtgtggtcaaatggcatcagacaggatgatggaatattattattccatgggtcaggaaaatctttcccggaatcaattggaagaagcaattacatattttcgtaaagctgccaatctgggagcggaagaagcggcccacgaaatcggtgtcataggccaccgctatgaaacggcggaaggcgttcctgcagatgaagaaaaagctgcccgctgctaccgtatgtctgcagacttcggtatcaaagaagcatggtactatctgggacgactgtactaccgcggcattgcgggaggaaagccgaatccgagaaaagcgaaacgggctctcgaaagagctgccgaagcgggatacgccgacgcggctgttctccttgccaaaatttacgacgaaggcgtcatggggaaggttaaccatgacttggcgtttaaatattatctccagggagcggaagcgggaaacggcgaagcgatgctcatgacgggactcttttacgcccaaggagaagcggtaccgaaaaatacggaaaaagcggaaatgtggatcagaaaagggaaagacgaaggaaatcctgacggcgaagcgacactccgcgtatttctttccgttgcctgcacggaatatgtaactggtacggcaggcgtgaccgatacggaaaaagcgctcgccatggcaaaagaagcagaagaactgggagataaagaagtcttttatcatctgggacgggcattccagaaaaaaggcggtgaagggcacggagaaaaagcatttgcctgctttaaaaaagcggtaaaaaatgaaattcccgaagcttactcggcactgggactttgctatgaagcgggaatcggaaccgagccggacatcaaaaaagccgtctcatgctaccgcaccgccgctgaagcgggagaccccttcggtatggcccactacggatatgcacttgccaacggcgaagggtgcaaacaaaatgaaaaagaagccatggaatggctcatgaaagccgctatgaaaggcgacgaaggcgccattctgatactgaaagaagattataactatacattgcattaaaaaaaggactctgccctttccggcggagtcttttcgattgcctgcggaaattccgggcagacaaaccgggaaacatggtacaatacaaaaaaggaggaaaccatgcttattccctatatttccgttaaagaaccgcatacatttgaaaaagaaatcaaaaaatccctgtttatagcacaactcattccggtacatacggaaaaagaagcggaagaagcactggcaggaatccgcaaaacctataaagacgcgacccataactgctgggccatgcggacgggaacaaaacggatttatgaaaaatcgggagacgacggagaaccgcagggaacggcaggacatccgatgctccgggtactgcagatgaaagaacttaccaacgtactcgccgtcgtcacacgctacttcggaggcatcaaactcggcgcaggcgggctcacccgtgcctacggcgggacactggcagaactcgccgccacagctccgctcgtaagatacacccctcatacggaaatcaaactgacacttccctatacggcagccggcacttttgaacactacatcggaaatacggacataaggatagaagagagaacctttaccgatacggtcaccgtcaaactgctctgccttcccggaaataaagaaagacacatccgcacggtccgtgatatgacaggcggtcaggcggaaatagaagaaacgggagaaacctacgtgccgatggacttgaaagaaatataaaagcgccccggaatatatcttgcagagcggaaaatatatcgggaaagaatgttttaaaaaggaaaataaaaataaacagattgacaaaatgattagagataaattataatgaaattgtagtaattatactttagcgagaagtattaggttattacaataaggtccaacaggaactgttggtaccgtaaagctctgacggtgcgcctattggcgtaccgttatctttttatacacgaaaatcacttaaagtagtttattttatataacagtatatattacataaaggaggaatcctatgaattatgtactcggcctggatgtaggtatcacttcttgcggttgggcggtattggaactgaatcctgaagatgaaccggtacggattgtcgatttgaattcaagaatttttgataaggcagaagctgggaatggagattcgctggcagcaccacgaaggatggcaagaggaatccgtcgtcttacaagacgccgtaaattccgtttgcacagagttcgtggttttttagtgcgccaccatatcctgacaaaagaagaaattgaaaatctttacacaaccccgcacaagacagatatttatgagttgagatacagggcgcttacagaaaaagtcagcccttctgactgggcaagacttcttattttctttgccaagcacagagggttccagtccaacagaaaaaatgagaaatccggagaagacggattgatgctcgccgccatcggtgaaaataagaaagttttggaaaattaccgttctgtcggcgacatgctctactccgatgaaaaattcagagactgcaaaagaaataaaggcggcacgtaccggtttaccgtgagccgttccatgctgaaagaagaagtacagacattattcaaaaagcagagagaactgggacagacgtttgcgggagaagaccttgaagacgaatatatcagtatcttttcggcgcagcggaactttgacgaaggaccgggagcaaacagtccttatgcaggggaccagatagaaaaaatgataggtaattgcaccttcgaagacgggaagaacgacagaccgtcccaaaaaagagcaccgaaagcaagctatgcatttatggcgttcaacttatggcagaaaatcaaccatatccgtgtaaattgcaaaggaatcgaacgaagcctggaaacggaagaaaaaaataaaatagccggcttggcatggaccaaagaaaatatcacttaccatgatttgagacaaataaccggccttgacgaagagacccgcttttccggggtaacctatccgcttgacagtacaacggaagaagcggaaaagaaggtaaaattcagctgggtgaaaccctatcatgcgatgcggcgggctttagacaaggtggaaaggaattatatccaaaaattaagccgtgaagaaatcgacgccatcgcctatgctttcaccgtctacaaaaatgataaaaaaatacggaccgccctgacggaaaaaggaatagaagacaatgtggcagacgtattaattacccatttagacagattcagcaaattcggacatttatcggaatatgcatgctataagctgctgccgtttttagaaaaaggggaagaatattacaaagcttgcgaatcggctggctatgatttcagaaaatcttccatggaaaaattggaagatataccgaaccccgtcgtaaaaagagcggttacccagacgatgaaagtcatcaaagcggtacaaagaaaatacggaaatcccgtagaagtgcatatcgaacttgccagagagctggcccggagtttcaaagacagagcggccatggacgaccggatgaaggaaaatcatgcaaaaaatgaagaaatcaaagagtatctgtcaaaagaacttcatgtgatgagtccgaccggacaggatatcgtgaaatggaaattatacaaacagcaacaggggagttgtgcctacagtcagaaaccctttgatatcgataaattgctccatgacagaacctatgccgaagtcgatcacatcttgccttacagccgttcctttgatgatacctaccgcaacaaagtgcttgtcctgacaaaggaaaacagagataaaggaaaccgcacgcccatggaatacctggcggataaaccggagcggaaagaaaaatttattgcctgggtaaaaactaccatcaaagacagtaaaaaaagagagcacctgctccgtgtgaagtacggccgtgatgaagaagcggaatggaaacaaagacatttgcaggatacccagtatatcagccgttttctttataactacctgagaaatactttggagcttacaccgggatatacggacagaaaaagaagaatcataccggtgaacggagccgtgacggggtatatccggaaacgtctgggcattcataaaatccgtgaaaacggagaccttcaccatgccgtcgatgcggtggtcattgcagctacgacacagggcatgatacagaaagtgacaagatacagccagattaaagaaaatgtaaaattgattgataaagagaccggtgaagttttgacagcaaaggaatttcataacaaggataattttccggaaccgtggccccgtttccggcaggagctggaggcccgggtgagtgaagatccggaagaggcgatccgccgtctctgtctgcctgcctatgagaacgccggggaaatcaaaaaacctttcgtttcccgtatgccgaggagaaaggtccgcggcgctgcccacaaagaaactgtcaggagcggcaaactgagagaagacggctacaccattctcaaaacggacttatcggccttgaaactgaaaaacggagaaatcgaaggctactacagaccggaaagtgaccgtctcctctatgaagcactcaaaaaacgactggaagcttttggcggaaaaggaaaagaggcctttaaggagcccttctataaaccgaaagccgacggaacccccggtccgttggtgaaaaaagtaaaaatcatagaaaagtcaagcctcaatgtacccgtccacaaggggaaaggcgtcgcctataacgatacgatggtgcgtatcgatattttcggagtgaatgaaaaaggaaaaacagcctactattttgtccccgtctatgtatccgatacagtgaaaaaagaactcccctgccgtgcggttacacgaggtaaatcctatgaaaattggaaaatcatggatgataaggatttcctcttttccctttatcccaatgacatgattcatgtggtggcaaaaaagccgttttcttttactgccgcagagggggcggatttggcacccacggtggaaacaaaagatacctgtgtgtactataaaggtgcagatataaaagggggttctattacggtgattaatcatgataacagctacggaataaaaagtatgggtatcaaaacgcttttacaactggaaaagtgtgaagtcggcgttttgggaaatatttcctttgtgaaacaagaaaagcggcaaggcttccgctgaggaggggcgatgtaccggcaggcgattgtagaaagcggggcccgcattttcctaaggaagaaccggctttgcatagagacggacgaattgcaccagttgcctctggaagacttggcggcactggtgctggacagccgggaaaccgaagtgaccgcctatgcaatggagcggctggtagctaacgggacagtcgtcattttctgtaatgaaaagcatatgccgtcaggcgttcttcttccctacggcagccactcccgccgtctcaaaacagtacggaaacagatttcccagtcgaagccacggctgaaacagctgtggaagcaggtggtccggcaaaaaatcaaaaaccagggacggtgtctcgagctttgcgggaaagaaaatgtggtgaaatcatggattccgcgggtcagatcgggagatacgacgaatgtggaaggcacggcggcagctctctacttcaaggcactctacggagacggttttatccgtcataccgcagatacggtgaatgatatcttaaactacggctatgccgttatccgtgcctccattgcccggtatcttgccatctacggatttgagccgagtttcggtctttttcatcacaacgagctgaatgctttcaatctggcggacgatctcatcgagccgtaccgccccctggtggacctctatgcgttctgctacagggaaagtgaagaagaaatgctgacaaaagagatgagacgcggtctggtacaactcttaaatgccgatattttatcgggcggagaagtccacggtgtcaattatgccatcgagcggacggtgcaaagtctgtcccggtgctgcgaggaggagtcggaaatgcttttacttcccgaattattgccgctccgtattcattcctatgagtaaatatatgcggctgattgtcatgtttgacttaccggtgatgaccaaggcggaaaggcgggcagccacgcagttcagaaattttcttttgaatgacggctactatatgatgcagttttccatctatatccgcctttgtaacggcatggaagcggcaaatacccaccgggaacgcctgctgaaacagcttccgaagtcgggatcggtgcggacgcttctcatcacggaacggcagtttgaagctatggaaatcttatgcggtgaaaaaattcttgatcttgacgaggcggaaaaagaaaataaagtcctcgttttttgaaaaaatgaaaaattaaaggagaaacgggaacagtttttctgtttttccgcaagcaaaaaagcgttgcagtgagtggctgcaacgcttttttgaggtatgtattataccttagcgagaaatattagggaattacaacaacgagcgtacacaatctacgaatcagagcattataccttagcgagaaatattagggaattacaacccatgatgagtgcgattaaattactactggattataccttagcgagaaatattagggaattacaacgcaaaagcaaaacgcctttattaaattataattataccttagcgagaaatattagggaattacaaccggcagtgctgccatgtggttaatcggactattataccttagcgagaaatattagggaattacaacctatgacgttaccattgcattctacgacatattataccttagcgagaaatattagggaattacaacctccgaaatgattttataattcttttttgcattataccttagcgagaaatattagggaattacaactcggagaactgcaattcatttcttgctcgtattataccttagcgagaaatattagggaattacaacccactcgggagtgctgccgtcgcacgtcatattataccttagcgagaaatattagggaattacaacaagcacggtacacgatatacgagtcagagcattataccttagcgagaaatattagggaattacaacttttgtgcctttcatgccttttcgtttgccattataccttggcgagaattatcaggaattcatactttttcctgcagtctttttattttattatatcttatttaatcgttctaaaaaacattttccggtgaagtcatgacatgataaaagacgccgtgtggggcgtctttttttgatcagaaggcggggacgagggtgacttggaagttgtcttctatgtattttctggtcgcgtcggtttggaagatttttacgaatttcttatatgccggattgtctttgtctttttcgttggcggcgatgatatttacgtaagggctcgtattgtcttcttcggcaatggcgcttttcgggtcaaggcctgcggatacgacgtagccgccgttgatgacggagccgtcacagtcttcgagtgcccgcgggagttggggtgcttcgagttcgatgaggttcaggtgtttcgggttttccgctatgtcggaaatgacggctttgacggggtccgttccttctttcagcttgatgaggccgttcttttcgaggagaagaagggctctgccgccgttggaggggtcattggggatagcaatcgaagcgccgtcgggaaggtcattgacggatttgtatttgttggaaaaaagacggagcggtgcgaggtaggtatttcctatggctacgatgtgagtgccgttcttttcgttaaaggcgttaaggaaaggtccgtgctggaaggagttgaggtcggtgtctccctgggcgagggcctggttcggcgtgacgtagtcggagaagggaacgatagtgactttgagtccttctttttccgcttctttggcaacaaattcgacgacttgttccgagtatcccggaacggtgcctactttgatttccgttttttctccggcagtatttttttcattttgcccgcagcctgtgatgatggcggtgcaagccagtgcggcgagggaaacggcgattgtttttttcaggttcatgatgatttctcctttttgaataaaatgatgaatttgaaataacttatgcagaaatgcggaatttagggaaataaaaaactccctccctgtaaagggacgga

SEQ ID NO: 2809 - DNA, 14424 bp, synthetic construct
  misc_feature 1..14424: note = Synthetic
  source 1..14424: mol_type = other DNA
acggtgatcttgaatataacggcggcggcctcatgggccggtacgactggaataatggaatctacgccgaagcatccttccatgccggaacgctgtctaatgagctgaaaaacggccttatggacagcaatgaaaaattgtatgattacgatacagacagcagctattgggcggctcacgtcggtataggccgtatcttcaggcaaaatgacaaggatacgtttgatgtatatgccaagtatttttacagccacattggcgatgattcgtttaagattggtgcggatcaatttgaagtagacgaagtaacgagcagccgtatccgtgctggcgtgcggttcaacgactacaagacggacaagagcacgtggtactacggcgcagcctatgactatgagtttgatggcgaaagcaccggcaaggcgcaggggcttgatatccgctccagctcactgaaaggtggaacggttattggagaagccggttacgtctacaatccgaatgaaaaatggacgatagacagcacgctgtttggctttgcaggtcagcgggacggttttggcggtcaggtcaacgtaacatatcatttctaattctaaaatattgcatgattattttttgataaacataacgagtcgagggggatgtccttcggctcgttatgttttatagcagagtatatttatcaaggaggcgacactcatgaacaacatcattcggcagtggatacggcaggcgcaggcaggcgacggagaggctgtgttggctattctgcaggttttccggcccttgctgtacaaatatgcccggaaataccgctattgctacgattcgctggacgaggccctttcgacggccatctggccgtactggaatgtatttattcgtttgatctggacggaaaggacgaagggccggcggcgttgcggcgagccgtgcagacggcgtttcggcgggaaagccggcatttcaaggcctattggcaggctgtcgaacggatgctgttcccgcaggaggagagggcagagttcgcccttttccgtcattcggtctgcgcatttgatacggctgtacagcgtatagagcagtgtctgaccgaggaggaacgtcatttcttgtatttgcggtacgtaaaggattatacctatgagacgatcggcgcgcttcacggcttgtcgaagccgcaggcctgcaacatcgtcgggcaggccgtagataagctcaaggccaaggtgcgagccgactgcctgtggccggctgtgcagcagcccggcgggcgaagaaacaggattcattaaaatagatgtatatatagctgccggcagaataagcagaagagtctcaggttatgtattgacttatgggccgaattagtgtaggatttttaaatgacgagtatgaaagacaatcgctagtgcttgcattagaggaaagtccgagctccgcagggcaagatgccggataacgtccggcgaaggtgactttagggatagtgccacagaaatgtgtaccgccgcgcaagcggtaagggtggaacggtgcggtaagagcgcaccagcagtaaggtaacttactggctaggtaaaccccatctggagcaagaccgaataggggagggatgaagcggcccgctgatcttccgggttgtgtcgcttgaacatgccagcaatggtatgtctagatagatgattgtcgctgccatcggcagaacaaaactcggcttactgattactcgtctcatggtctataggaggctctctgttgcggcagagagcctttttttgctttacaattttatgacgacatgatattattcaattatatggtcaaaaaattatactccatgacacatacattttaataaagcgagggatttgagttggctttaatcgtaaagaagtttggcggcagttctgttgcgacgccggacaaaatgcgcactattgtacagcgtgtcttgaagggcaaacaagagggggacaaaatcgtcatcgtcgtgtcggctatgggggatacgacagacgaattggtttcgttggcaaaacagataacgtcaaaagcatatggacgtgaaatggatatgctcctttcgacgggcgaacaggtatcgattgccttgatggctatggcgttccaggaagccggccagaaggcgatttcctttacgggcgcccaggcaggcatcaagacgagcgacgcctttaataagggccgtattttggatttagaaccgaaccgcattatggaagcgctggacgaaggcaacgtcgtcgtcgtcgcagggttccagggcattacgggccacggcgatattacgaccttgggccgcggcggctcggatacgacggctgtcgccattgccggcgcgatcaacgccgacgtgtgcgaaatttatacggacgtagacggcgtatatacgtcggacccccgcgtcgtttccgatgcgaagaagatgaaggaaatcacgtatggcgaaatgctggaaatggctaagctcggcgccggcgtcatgcagccccgggccgttgaaatgggaagccgcttcagcgttcccatccacgtacgctctacgttttcggaagatgaaggcactatgattcaggaggtttgctcaatggaaattaaacagtatttgattcgcggcgtcgcttcggataaaaatgtagctaagattacggtattaggcattcccaatcagccgggatacgcttacaagattttctcgacgctggccgaccatcatgtcgacgtcgatatgatcgtgcagagcgtccgcgtcgctaaggaaggcgttacggatattacctttacgattgcccgcacggaattgccggctgcgaaggatattctgaaccacctgcgcgaagaaatgcctgtcgaagatatcctcgtcgacgacaagatggccaaggtttccatcgtcggcgccggcatggctggtcatccgggcattgctgccggcatgttcggcgtattgggggacaaccatatcaacatcgaaatcatttccacgtctgaaatcagcattacctgcctgattggcgaagaaagcgtcgatacggccgtcaaggcgatccacgcccatttctttgacgaacactgaggtggataatgtctgtattggatagttttgtagatgaaatgctgcagccagaggttccgaagcgggtgctcatcgaccgcatgatacgggggctgatgatagaaaagccgcctcaatttaaagtgccggcgccgaagtatacctttgagtcgaacctgcacggcctgatttacgattatcagaagcagcaggttacgttgtcttataaggttgcaagctccgtgtatgacgacatggaaatgtccttcgcgacgttccgggcgctgctggaaggcctggccgtttgtatccgaacgcagaaatggtaaacatactatgccgcagttcctgttggggggattgcggcatttttttggaggtgtatgatgaggtgcggaatcgatatcgtgcagattagccgcatagaggacatggcctgccgccacgaacgatccctgggaaaattttttacggaagccgagctggcgtactgccgccggcggcagcaacagcagtatgcttcgctggccggcatatttgcggcaaaggaggctctttttaaggccttgggcacagggttccggcagggaaaatggacggacgtggaagtcagccatacggagctgggagcgcctgtatttgtcctgcacggctggtataaggaagcggctgcggcgataagccgggaactgccggcattgtccattagtcatgatggagcgtatgccattgcgcaggtcgtcatggaaggatagacatacgaggaggaatcactatgcagaagttaaatacggcggcgcagatgcgtcagatggattatacggccatgcacggcaagtacggcattcagccggctgtactcatggaaaatgccggccatgccgttgcggaacgggccgacgaatatattcacggctgggccggcaaggacgtagtcgtcgtctgcgggaagggcaataacggcggcgacggcttcgtcattgcccgccatatcgcagcggccggagcccgggcttacgtgtacatcctgggacaagccgaagaatacagcgatgaatcgcagcagcatttaagcacgctgcaggctatggaagacgacgaatcgtgcctgctgacctatttcggcggcacggaacgggagtggcgcgtactgcggcagcggctgcagagctgccaggtcgtcgtcgacgctatgctgggaacgggatttcacggcaatctcagagagcctgtttcgtccatcgtcggcctgattaatgaaatcgccgcggccggcacgctgacggttattgccgtcgacgtgccgactggcgtcaattccgatacgggagctgtcagcggcagcgatgaagaagagaacggccccttgtttgctgatatgaccgttaccttcggcgctctgaagcgggggctggtcttgtatcccggccgtacctgcgccggccatgtagagctggacgctatcggtatgccggctccgctgctggtacagcctgaggagaaaccggcatatttgctgcaggagtcggatattgccgaagtcctcgtgccgcgcagccccgacagccataagggaagccacggtacaatcggcatcgtgacgggatgcagcgacatggccggagcggccctgatggcggcgcacggcgcggtgcgcagcggcgccggcaaggtattcctgcgcgtgccggcgcagacggcgccgtactgcatcggccggcagccggaaatcatggttcgcggcgtaggccagggcgaatactttacggaggcagacgcggtgtctgtcctggatgaatgcgccgcctggtcggtcatcgcgatgggtcccggtatgggaagacatgaggaaacaaaggcttttgtcaaggcgatattagctcatggcgaatgccctgtcgtattggatgccgacgccttgaatttgctggcaggagaaaaagacttcgtctcttccttggaccggcaggtcattatgacgccacacttggctgaattcagccgtctcagcggcctgtcggtcgccgaaattcaggaagatccctttgcggcggccgtgcagttcgtcaaggaatggcgcgtcacgttagtcttgaaaggcgcgccgacgcttgtcgtatcggctaagaccggcaacgtatacgtcaatccgacgggcaacgccggcatggcctgcggcggcatgggcgacatcctgacgggcatgattgccgctatatcggccagggaaagccgccccgatatttgcagtgccgcctgtgccggcgtgtacctccacggcgctgccggcgacgcctgccgccgtcagatcggctcgtacggctttacgccgatggaagtggccgacgccgtgcccggcgtgatccggcgcatggaagaagaaatggcagtgccgctgctgcaggcgccgatgatcttggattaagatgaaagggcgcgcggcagcgctgcggacggctcttgccggttgttgtattatcctgttggcggcgtgccttctctttgcggcaggctgcgggcggggagcgggcgcagaggcggagcagctgcaagtccatttcctcgacgtcggccaggccgacgcggccttgctgcagtacaagggacagcatatgctcgtcgatacgggagacgtagacggcaggccggctttgatacagaggctcaaggaaaagggcgttcatacgctggacgtcgtgctgataagccatccgcacggcgatcacctgggcggcatggccgccttgttcgatcagtttcacataaaacaaatatacgataacgggcaagagtcccgaacggctatgtataaaaattacgtaaaaaacatcgtgcgtaagaagatttcctataaagccttaaagaggggagatagggttacctttgccgacgacgtcgtgtgccatgtcctttggccgtcggcagaaggagcggcagcgatgactgcggcggaaagcggccggactaataaccagtccgttgtctgcaagatagccttcggcagcttttccgtcttatttacgggggacgcgcagcgggaagcagaggaacagattctccgtcatgcccggcgaaacgatttgaaggcgacaatactcaaggccggccatcatggcagtaagacctcttccagcccggcgtttctcgaggctgtgaggccggaagccgccgtcatttcctgcggcgccggcaattcctatggatttccccatgccgccgttctgacagcgctcaaaaagcaaagggcagacgtataccggacggaccgggacggcacgatatccgtcgtcagcgacggccagggatataccataacaaaggagcgataatatgaagacgcttatcggcagcgtcgaccgcattaccgggacgacggcctatatcatactgaacgacgatgagcatgtcctgcagattccggcggagctgctgccggacggcgcagcagagggcatggcctatacgatcaccatcgagcgcaacggcgcggaagaacggcggctgcgcgatgaaatcgcggcgctgcggaaggccttgaaggattagcgaaaatacgaataggaattttgccacaaaaagatattatccggcagcgacatgtgatataataaacaggtcaattttttcaaaggagagatatacgtgatgaagaaactttttatacttccgctcctgatgctcctgtgcctgattcccatgctgccggcgcaggctgcttctaaggcggaaatcaccagcgtccgcacggcgacccgcaacgacgccaacgttccttttgtacgaaccgtattggaattggacagcaaggtcacgccgcgcctttttatcgataaggacgggaaatatgtcaccgtgacgctgccgaacgccaagattgctaaaaacgtagaaaagaagtacaatgcggaccgcaacgtcgtgtcccgcatcagcttgtctcagcgttcgtccggtacagatgtcaacatcaaggtcccccgggccgtgaccaagagcgacgtcaacgtctttaccctgccgggaacggacaaggctaaaaaggaatgccgcgtcgtcatcgacgtcaacgacaaatcgggcaaggtcaagcagtggatgcactggaacgacgctaagatcggcattgacaatacgtccctcagctcgacctattccgtcaaggtgccgtcgtacagcagcagccgttcgtacaagctgaccaagggcttaaaggataaggtcatctgcatcgatccgggccacggcggtaccgatgtcggcgcaatcggcaagatttctcaggaaaagaatattaccctggcgatttccaagaagatcgccgatttgctgaacgatgccggcgcgaaggtcatcatgacccgcacgaccgacgtcgacgtatatgctccgtacgatgccgcagcagaagagctgcaggcccgctgcaatatcgccaatgcggcaaaggccgacgccttcgtatcggttcacatcgactccttctcttcggccgacgcccgcggcgtgacggcgtattacaacagcaagacgcctcatgattacagcctggccaagtacatccacaaccagaacatgcaggcgacggagttccccgacagaggcacgcggacggctaatttctacgtgctgctccatacgaatatgccggccgtccttttggaattgggcttcatttccaacccgacggaagaacgggccctcaattcggaaaaacagcagcagaattttgccgaaagcatcgtcaaagggctggccgattatttcaaccataacggcagataaagaggtctggaaaaaatagctgtaaatcttgaaaaattctattgacagtttaccggctgtcatgtatactggaaaagtcgtagcataagtggctaggataagccgcatggagaggctcataagtccctgcaaagggcgccgtattcagcgagtatatgtatgaggaggtgtcactcatgtacgctattattaaaacgggcggaaaacagtatcgcgttcaggaaggcgacagcatttttgtcgaaaaactggctgctgatgttgattccgaagtagtattcgaccaggttttggcagtcgtaaacgacggagacgttaaagtaggcgctcctgtagttgaaggcgctaaagttactgcgaaagtattggaacagggcaaacagaagaaaatccgtattttcaaatacaaagctaaatccaactaccgtcgccgtatgggtcatcgtcagccttacacaaaggttacgattgaaaaaatcgaaggctaatgattacgattacattgcagcgtgataaggagaagcgcattacggggttcgatatatccggtcatgccgggtacggtgaagccggaagcgatatcgtatgtgcagccgtatcggcactggcacagtcggcattattgggtctgcttgactacgatgctcagcatgtgcagtacgacgtaggagaaggctctttatccgttcatgtgatgaaagacggcgtcgcgccgcaggccatcctgcgcgcgatggaattaggattaacagaaataagcaagcaatacagcgagtatgtaatactccattcatagacgtcaggaggtggacgggatgttcaattttaatttgcagctgttcgctcacaaaaaaggtaccggctccacgcgtaacggtcgtgacagcgaatccaaacgccttggcgtaaaatgccatgacggcgttctcgtaaaagccggcaacattatcgttcgtcagcgcggcacgcatttccatccgggcactaacgtaggtatcggtaaagacgatacgttatttgctacggctgccggcaaagtcgctttcgaacgctccggcaagtacaaccgtaaggtaagcgtatacccggttgaagctgaagcttaagtatgagtataaaaaatcctgcagcatggctgcgggatttttttgtattctgaatctgttatgacacgcaataactgaattatttaggaggaaacagtatgcgcatatatgtaaacggagaagaacggaatttgcatgtgtacgacaaaattgccggcgtagattacgccaaaaacgtcatctgtgcccaggaccgtctggatacggacgacttcggcgcatttacgatgactgaggaagaatttgaatactggcgcaagcttctcgtcaccttgcaggattcggaagatatccgctttgccattaaggatctggtcgatgaagaagaattaagcgattacgtttatgaagaaacgaaatacgtcacccagacgcagcaaattattgaagtagaaaacctgagccttaaagatctccagaaggccctgacagaaaagaatacagactggctgaaggaaaacggcttcgtcaagaccttggaaaaataaatatttttacagagaatagtacgtattcctgaatgggttaacttgcagtagaataggtgtcaaggaaagggactgtcgcatgaagaatcattagcctcttcgtgtgacagtcctattttttttaatgcattgcagctcaaaagctccgcagcagaatatatctgccaacggagcttttgagcagtgaatgcatcactaataaattatttcaatccacaattatgcttcagcataatggctatcttattataacaaataaattgaaatctttgaattttcccgtatagtattgactattctttttgcatatattaaaatttaattaactaataaattgaataaaatataagcggcttttgatggcattgacgttagggcttatttattatatactacaaatgtagtaattatatcttagcgagagatattaggttattacaataaggtccaacgtagttggtaccgcaaagctctaacggtatgccttttggcataccgttatctttttatatagacttattttaaagacagggagtgataatatgaattatgtactaggcttagatattgggattgcatctgtggggtgggctgtattggaattagatacacacgatgagcccatacgtattgttgatttaaactcccggatttttgaaaaagcagaagtgccgaagacgggggaagccttagctgcgccgcggcggatggcgcgcagcgctcgtcggctaacaagacggcgtcggtttcggcttcatcgcgtgaggcggtatttgattcggaatgatatactagatgaacagcaagtcgcagtgttgtatgctgatgcggcaggaaaaacagatatttacgaactgcggtatcaggcgttaagccagcctgtttccaattcagattgggccagactgctgattttctttgctaagcaccgtggtttcaaatccaatcggaaacatatcagcgacagcggcgatgaaggccagatgctgaatgctattacggaaaatcaagaactcctgaaaaattatcgcacagttggtgaaatgctgtataaaaacgaaaaatttaaagcctgtaaacgaaataaaggcggctcttatacgtttactgtcagcagggctatgctgactgatgaaattcatactctgtttgacgtacagcggaatctggggcaagcatatgcatcggaaaaattaaaagaagaatatatggaactgttttcggcgcagcgcaattttgatgaaggtcccggtatgaacagcccatatagcggaaaccaaattgaaaaaatgatcggctgttgcacctttgaagacggtgaaaaacgagcgcctaaagccagctatgcctttatggcttttaatatatggcagaaaattaatcatcttcgcgtaacctgtgaagggacatatcgttttttgtcacaggcggaaaaagaaacgttggccgcattcgcttggaaaaaagaaaatatcacttttaaagatattcgcaataagcttggactggatgatacagttcgctttttagatgtaaattataatttagataaatataaaacggcagaagaagcagaaaagaaggcaaaatttagctgggtcaaagaatatcatgcgattcgcaaagctttggataaggtgaagaaaaatcgtatttcagaattaagccatgagcagatagatgccattgcttatgcgtttacagtctacaaaaatgatgaagccattaaaaactatttactggaacatgctattgagctggccgacgccgaagctttattagaaaatatatcgggattcagtaaattcggccacttgtctgtcaaggcctgctacaagctgctgaaacccttgaagcagggccatgtatatacaaaagcctgtgaaatcgctggatacgatccgcagaaaagcagtcagggaaatatcagtgatatcccgaatccagtagtaaaacgggcgttgagtcaggctttgaaagttattaaggcgattatccggcaatatggatgcccccctgtggaaattcatattgaattagcccgcgagctggctaaaagcgcaaaagagcggaccgaattagaaaaggctatgaaggacaatcaatcccgcaatgaaaaaatcaaagctaagctccatgagttagacgtcatgcagccgacggggttggatattgtcaagtataagttatacgaacagcaacagggcgactgcgcttattctcagaaaaagttcgatgtgaaccgtcttcttcatgatcccacctatgcagaagtagatcacattattccgtatagccgttcttttaatgatacataccgcaacaaggtattagtgttgacgaaagaaaaccgggacaagggcaatcggacgcctatggagtattttcaagataagccggaacggaaagaagcgtttgtcagatgggtaaagcgtacgatttctgatgggaaaaagcgaaataatttactgcgcgtcaattattctgctgacgctgaaaaagaatggaaagatagacatctgcaggatacgcagtatatcagccggtacttgtataattatttgagacagcatgtcccattaaaagaaggatatacagacagaaaacgacgcattattcccgtaaacggtgctgtgacagcatatgtccgcaaacggctaggtatttctaaaattcgcgaaaacggagacctgcatcatgccgttgatgccgttattattgcctgcgtcactcaaggcgtagtcaataagatttcccgctacagcaaaataaaagagctgcggcagttcatgacggcagacggtacgattgttgacaaagaaacaggagaagtactgcagactgccaatccgcgcaaaaccgatcccttccctgaaccatggccgaaattccgtcaggaattggaagctcgggtcagcgacaatccggaagaagcgattgcagcgctggaactgccgacatatgaaggcattgtcactatttccgcgctttttgtctcacgtatgcctaaccgcaaggttcatgggccggctcatatggaaacgatacgcagcgctaaaatgcagcaggatgggtatacgatggtcaagacagatttgaccaatttgaaattgaaagatggtgaaattgaagggtactataatcctagcagcgacaaaatactatatgatgcattgaaacgacgactagagcaatttggcggcgatggtaacaaagcttttaaagatcctttttacaaaccgaaatctgacgggacgcctggaccagaagtcaaaaaagtaaaaattatgactaaatcgagcttgaacgtaacggtgaaccaaggcaaaggtatagcggataatggaagtatgatccgcattgacgtgtttggcgtagaagaaagagggaaaaatgcatattattttgtacctatatatgtggcagatacagtaagagaaacgctgccgaataaagctgtagttcccaataaatcatacaatgattggaaatttatgagagatgaagatttcttgttttcgctgtatcccaatgatttaatttatgtagaatcccccaccccagtatcttttcatactgtaaaagggtgtactttgcctccgaaaatagagaggaagaaaatgtttctttattataggaaagcaaatatttccacggccagtattactgtgttgaatcacgataatacctatgtaaaagaaagtatgggcatcaaaacgattgccaaattacagaaatgtacagtagatgttttaggcaatatacactatgtgcagaaagaaaaaagattaggatttaaataaaggcgtgatgcagaatgtatcaacatatcgtcatagaaagtggtgtaaaggtatatcagaaaaacagccagctttttatagaagctgaacaggttcatcatattcccatagaagatatcgctacgctgctgttagataatcgccgtattgcaattacagggtattgtttggaaacgatagtaaaaaacggcgctgtcgtcatattgtgcaacgagaaacacttgcccagcgtcgttatgttgccttttgcggctaattcccggcgattgaagatgataaatctgcagatagggcagacaaggccgcggaaaaagcagctttggaagcagattatacaacaaaagatttataatcagggacggtgtctggaactgtgcggaaaagaaaatgtagtcaaaaagtttatagataaggttaaatccggcgacagcacgaacactgagggaactgcggcggcagtgtattttaaagccttatatggagacgaatttattcgccatagcggtgatgtattaaacagtatcctggattacggctatgcggtgcttcgcggttccattgcccggtatctggccttatacggattcgaacctagcttgggaatatttcatcatagcgagttaaattcatttaatttagctgatgacttaattgaaccgtttcggcctattgtcgacatatatgcgtatcggcatgttggaacggaagaaaaggagatgagtgctgcagtacgtcgagagctagtccaattattaagttgtaatgtcttctccggaaatgaagttcatgccgttcattacgccatagaacggacggtgcaaagcctgatccgtacctatacagaaaaagaaaaatgcttgctgctgccggaactgctgcctttgcagattcatgcgtatgagtaggtttatgcgtttaatcgtcatgtttgatttgcctgttcgaacaaaggcagaacgacgggcagcgacgcagtttcggcaatttcttttaaaagacggatattatatgatgcaattttccgtctatgtgcgcctgtgcaacggtatagaagcagctaataaacatcggatgagaatattacatgcattgcctaaagaaggatctattcggaccttgttgattacggaaagacaatttgaatcaatggaaattttatgtgg

SEQ ID NO: 2810 - DNA, 14196 bp, synthetic construct
  misc_feature 1..14196: note = Synthetic
  source 1..14196: mol_type = other DNA
aagggtgtagtcgtggcacagacggtaaaggatgcgacggatgccgtagacgccatgatgaaagatcgcattttcggcgaatcgggcggacaaatcgttgtagaagagtgtatggtcggtgaagaagcaagcttacttgctttcgtagacggtaaaaccatcgttcccatggtggcggctcaagaccacaagcggatttttgacggcgacaagggccctaatacgggcggtatgggcgcctatgctcccgctcccgttcttacggatcgatggcgtcaagtcgtagaagaaaagattttgcgtcccgtcgtcgacgggttggctaaggaaggcgttccttataaggggtgcttatatgcaggactcatgctgacggataaggggccgaaggtggttgaatttaactgccgtttcggcgatccggaaacgcaggttgttctgcccttattggacggtgacttggcccaaatcatgtatgactgtgctaccggtcgattgaatccccaagacgtacattggcataaaggagcggcatgttgcgtcattatggcttcggccggctatcccgaatcatcacacaagggggatgtcattgacggattggatgacgtagaaaaggatggtagtgtctatgtatttcattcgggcactaagaaagaggacggaaaattcgtcactgccggcggccgcgttttgggtgtaacggctttgggtgactctcttcaggatgccatcagtaaggcctatgctcaggtagaacggattcattttgacggccaacaagttcgtcgcgatatcggtcaaaaaggcttgaaacacttgtcttaaaaatatataaagcggacttcttgtatatgcaggcagtccgcttttattacgagagggcgatatgtcatgaattacaggacggaaaaagattcattaggagaaatacaggtccctgccgataaactttggggtgcgcagacacagagaagtctggaaaacttccaaatcggtacggaaaaaattccccaagaattggttacggtctttgcttatttgaaaaaagcggcggctgaaacgaataataagctgggaaacttggatgatgtgcggactcgggctattgaagcggcctgcgatgaaatcctggctggtcatttggacggaaactttcccctggccgtgtggatgaccggtagcggtacgcagtttaatatgaatatgaacgaagtaattgctaaaaaggctgtccaaatagccgctgctgcgggagaaagtataaccgttcatcctaatgaccatgtaaatcgatcgcagagctcgaatgacgtctttccgacggccatgcatgcggcgacgttgtgcttaattgaagaccgccttttccccgccatggaccggttgcagtctctgttggaaaagaaggaggaagaatataaagacattgtaaaaatcggcagaactcatttacaggatgccacgcccttgacattagggcaggaaatcagcggttgggcccgcatgattgaacgaaatcgggagatgctcgtgcaaggatgcgagttcttgcgtgatttggctgccggcgggacggccgtcggtacgggcatcaactgcccgaatgagttcggacctctctttgccgaagagttgagtcgtctgacgggtaaggtattcagaacggcaaagaataagtttcactccttgacgagtaaggatgaactcgttgtcgctcacggcatgttgaaagccttggcctgtgatttgatgaagattgccaacgatgtgcgctggttggcgtcgggacctcgttgcggtattggtgaactcattattcccgctaacgaaccgggcagttccattatgccgtccaaggtaaatcccactcaggctgaagcggtgaccatggtagccgcacaagttatgggaaacgatgcgacagtcggctttgcagccagtcagggaaacttcgaactcaacgtgttcatgcccgttatggcttataacatgattcaatcgattcgccttttgacggatgttatggattcgttcggtaagcactgtataaaagggcttgaaccgaacagggaacgaattgaagaaaacctgcatcgatccttaatcttagttacgggcctcgtacctcttatggggtatgataaggcttgcagcattgccaaaaaagccgcctcccaaggcttgaccttgaaggaagcggctgtagagagcggccttattacggctgaagagtatgatgcacgcatggacgtgcgtaaattggccggattggaatagacattaaaaaaaggaggcttcgtgagaagtctcctttttggctatttcaatttgctgttcgccttttccgtaaagggagccgcttcgataataaagcgttcatgaatgccttcaccgacggggccggccgcatcgcaagccgtaatcttaaaggtcagtttgcggcgatcctgttccgtaagaacggctttggccgttacgtccatgcctacgggggtagcggatgtgtgcttaatattcatagaaataccgacagtggcaaagccttcgggtaattgcgagtcaacagcctttacggccgcatgttccatcagtcctacaagggccggtgtggcatacacgggagccgtaccgctggcataggcaatggccgtgtttttttcagtaaccttttccgtaagttcggcagaagattgttcttttaatgtaaagtccatcataagcctcctaagtcgtataagatatttttactatagcacagaggagaataaataaaaacctttcgagaaaaaatagagatttggtataatgaaacgaacggtaatgtattacggaattgtaacaggcggtgacgacatgagcgacattatagaaaaacagggagtatcctttgtatcctttcacatatttgctccttataaggacttgacagcggctgtatcgacacggctcggcggtgtcagtacgggagattttaaaagtttgaatatgagcttttctacgggtgatgacaaagaggccgttaaggaaaacagacgacggtattttaacgccttgggtatatcgataaaagacctggtggggtgcaatcaggtacacggtgtacatattgagccggttactaaaaaagactgcggtcgcggcgtagaaggaaaggaagacgcactgcccggttgcgacggtttgattacgaatgaacccggcgtggcgttgaccatgaattttgcagactgcacgcctttgttgttttttgaccctgttcgcaaggctatcggcttggctcacggcggttggcgagggacggccggtaatattgcgggccttacggtagaaaaaatgaaagaagccttcggatccgaagctaaagacattttggcggctatcggcccggccatgggtcctgatcgctttgaagtgggagacgatgttatacaggcctttacgaaccttttcggaaaaacggaggttctagacctttataagccgacgaaagaaggcaagtatctatttaacatgtgggaggccaacaggcgacttttgttgcgtgcaggccttcaaaaggatcatatcgaatgtgccgacatatgtactcatacccatacggacctctttttttcgtatagaaaggaaaagggcaagacgggacgacatatggcggttatggaattacattaactcttggaaatacggtcataataatctgtgattatggctgtactttttgtgtaaaaaactcttgacaaccaaagcaaaatttaatagaatatgatagaaatacgaatgaacagatattcataaataaaaatgagggggatttaaaaatgaagaagtcttataaaattgaagtcgactgcccgaactgtgcagccaaaatggaaacggcggccaataagacggaaggtgtcaaggaagccaatgtcaatttcatgcttttaaagatgaaggtggaatttgaagacggtgccgatccgcaagccgtgatggaagcagtacaacataactgtaaaaaagcaacgtctgacggcgaaattttcttgtaagaatttacatcggggggacatgtatgctaagtgccagacagaagaaggatttaattcgcatctccgttgccgctgtcattatgatcggtacctcctttctcgacgtgccgaaagcggctcatattgctttgtacgccgtagcttatctggttgtaggctatgacattttactggaagcttgggaagggcttagacacggcaacggccttgatgaatgcgtacttatagttgtggcgaccttaggggcctgggccattgctttttatgacggcgaaggttatacggaagccgttgcggttatgctcttttaccaagtgggtgaatggttccagcgatatgccgtcaataagagtcgccgcaatattgcaagtctcatggatattaacgccgaatacgccaatgtggaacaagtggacggctccttggaacaagtggatccggatgaagtggaagtcggtacgactattatcgtcaaggccggcgaaaaaattcctattgacggagttatcctttcgggtaacagtaatctcgatacggcagcccttacgggggaaagtatgcctcgtgaagtaaaaccgggagatacggtcttaagcggctgcatcaatattaacggtgtcttgcgtattcaaacggctaaggcttttgaagattcgacggctgctaaaatcatggaacttattgaagaagcaagttccaaaaaatcccgatccgaacagtttattacccgatttgcccgtgtttatacaccgacggttgtcggtctggcagcggccttggcactattaccgcccttgttcggactccttacgacgggggaaggtaattggcatatctggatataccgtgccttgacctttctggttatcagttgtccctgtgcgctggttatcagtgtgcctttgtccttctttgcctccatcggcagtgccggcagggcgggtattctcattaagggttcaaattacgtagaacgactggcagatgtaaagacggttgttttcgataagaccggtacgttgacgcgcggcatcttcggtgttacggccgttcatccggctaaagaattttttgccgaagcgatgcgtgaagggaagtcgcccgaagaagagctccttcatttggcggcccacgttgaagccatttcgactcaccccattgccgaatcattgcgtcgtgcctataaggctgacggtgacggctgtaaggtggaaggaggggaagaagttcccggcaagggaattcgtgcatcagtcaacgggaaaattgtctgtgtcggtaacagcctctttatggaatccgtaggggccgtcgttcccgactgccggtgtgacggcacgattattcatgtagccgtagacggagtatacgccggtcacgtagccgtttccgatgctttgaaaccgcactcgaaagaggctgtgaaggcattacgtaatgaaggtgtgaagaaactggttatgctgacaggcgacagccagacgacgggcgacaaggtcggcaagtcgttagaacttgatgccgtatacggtaacctcttgcctgccgataaggtggcacgagctgaagctttgttgcaagaaacgaatgccgccggcggctttctggcctttgtcggagacggtttgaacgacgcacccgtcctggcccgtgccgacgtaggtatcgccatgggtgccatgggttccgacgcggctgtagaggcggcggacgtagtcctcatggatgacgaccccttaaagatttccgtggccgttaaaattgctcgcaagtgcatggccattgttaaggaaaatatttatatggctatcggcattaaggtcctcttcctcatcttgggggctgtcggtattgccaatatgtggtttgccatttttgccgacgtaggcgttatggtcttggccgtattaaattccatgcgtacccttttgatgaaaaaagtacaggcataagaagatacaaacaacggtttgcctcatacggggcggccgttgttttcttatataccttatgccgttgacaaacggggctttaagacatacaatgaaacggcatactctatgcggacagttcgtttgcaccatcctgtccttaaacaaaaccagggctgtttttgtttgcgtttttacgttgaccgaaagccttgctaagagcagggctttttttatgaggtaactatgtactatataagcagtgaagcgacctttgacggcgctcattttttaaaaaactatgaaggtaagtgtcacaacctgcacggacaccgctggctcgtacgggctcacgccaaggcggaagccttgaaagaaacacgtcaggaaaagggcatgctgacggatttcgggaacttgaaaaagtccttgaaagaagcctgcgacttttttgaccacgccttaatctatgaaaaaggatcgttgaaggacacgaccttggcatgccttgaagaagaaaactttctcttgcgtgaagtatcttttcgaccgacggcggaaaatctgtccaagtatttttacgattttttaaagaaagattgtcctgaactttgtcgcgtagaagtatatgaaacgccgaccaataaggcggcatacgaggaataatcatgcgagttgtcgaaaaatttgtgagcattaacggtgaaggacaacgtgccggcgaattggctctcttcattcgctttcaaggctgtaatctgagctgtacctattgcgatacggcttgggccaatgaagcggactgtccttatggggaagaatcgccgcaggaaattgtcgactatgcctgccgtgaaggagtgacggacattacccttacaggcggagaaccgctcttacaagaggggatagatgaactgatagatcacttgtctaagcatggctttcacgtagaaatcgaaacaaacggggccgtatcccttcttccgtttagccaaaagcgacgaccgtcctttacgatggactataagctgccgggcagcggttgtgaaaaagccatggtgacggaaaacttcgcccttcttaccgagaaggatacggtaaagttcgtcgtttcaagcacagaagacttacaaaaagcggaagaaatcgcaacacgctacgacctcgtcaatcgttgtgccgtatatatcagccccgttttcggctccatcgatccggcgcagatggtagactttatgaaacagaggcgactcaacgggtggagattgcagcttcagctccataagtttatttgggatcctgagaaaagaggagtataaatgatagacaaaaaagccatagaagaacatattcgcggcatcctcgtcgccttgggagaagacccggacagagagggtctgaaggaaacgcccaagcgtgtggcggatatgtatgaagaagtgttttcgagtatcggtgagtcgaatgacgacattgcggtccgcctggccaagacctttgaagacgaagagcagactgaagataaggaccgtgtcgtcgtcatgaaggatatcgatatgttttctttttgtgagcaccacatggcacttatgtacgatatgaaggcgacagtggcctatattcccaaagggcgagtcatcggcctatccaagattgccagaatttgtgatgccgtaggaaaaagacttcagctccaggaacgaatcggcagagacattgcggatattatggccaaggcgacgggaagcgatgatgtggccgttattttggcggcatctcacgcctgtgtaacgacgcgcggtattaagaaccgtagtacacggacaaagacggtggaactaaggggacgttttaagacggatgcaacccttcaagtttatttacaataaaggacgattatatgaaaacagcagtattactgagcggcggtatcgactcaacgacagctctggcacaggccgtagacacgtacggagctgaaaatgtcatagccctttccgtactctacggacaaaaacataaaaaagaactgagttgtgctgaaaaaattgccaactactatggtgtacagcgcatctcctttgatgtgactcccttattttcatatagtcataacagcctgatggaacattcggataaggccgtgccgcaaacgagctatgccgaacaaattgaagaaacaaaggggcagtcgcccgtaagtacttatgtgcccttcagaaacggcatcttcctttccgccgccgccggcgtggctctcagcctcgattgcgaacgcgtcgtctacggcgcccatgcggacgatgcggcaggagcggcctatcccgattgctcgccggccttcttcgacgccatgaaaacggctgtctgcgaaggtacgggcggcggtattaccctggaagccccgttcattcatatgaataaagcggacattgtggctgtaggcctacgccttcatgtaccgtacgaactgacctggtcttgctatgaagggggagacaagccctgcggcctctgcggtacctgtagagacagagaagcggcctttgccgccaacggcatgatcgatcccttagtgaaaggaagataagatggaaaaattgacactcttaggcaatcaaaacgtgacctatgccaacgaatacaacccgaacatcttggaagtctttgaaaacaagcaccaagaccacgactacttcgttaaatttaactgccccgaatttacgagcctttgccccataacgggacaaccggactttgcgactatcaccatttcctacgtaccggatataaaaatggtggaaagcaaaagcctcaaactctacctcttctccttcagaaaccacggtgccttccatgaagattgcgtcaacatcatcatggaagacctgataacactcatggaccctaaatacattgaagtgtggggaaaattcctgcctcgcggcggcctctccatcgacccgtactgcaactacggaaaaaaaggaactaagtgggaagacgtggcctttaaacgcctggccgaacacgacatgtatccggaaaaggtggacaatcggtaagtgcgtggggatacagtgggtaaataatgttaatatgtgaaaagctctcgccactaggcgagagctttttttgatgaggttaggggaatatagggcactcaactctatattttgatagttattctaaaaatagatagcaaattgcctgagaatattaaaattacattaaactgacatataattgacacaaaaatacaatggtgatatagtgacagtgtaaagcttatatctttgagagagatgataggttgttacaataaggtccggcaggagtgccggtaccgtaaagctctaacggcgtgcctattattaggtacgccgttatctttatatatacctgtcacctcttacggaagcggaggatatgtatggacacgaaagaattgaagtatgttgtcgggttggatatcggtattacttcggtggggtgggctaccttactgttggattctcaggatgagcctgttcgaattcttgatttaaactcccgtatttttgataaggcggaagtacctaagacaggggcctctttggcggcaccgcgccgtatggctcgcggtgtgagacgtcgtctgcggagacggaaattcaggctccatcgtgttcgtcagtatattttgcgccatcatattctcgataaagtcggtttggaatgtttatataagcctaaaacggacattgatatctttgccctccgtacggccggactggacaggcagttaaagccggaagaatgggcacgtattcttttatatatggctaagcatcgcggatttaaatctaaccgaaagtcgactgccgatgagactgccgacggagatatgcttaaagccatacaacagaataaggagattctcagcaaatatcgctctgtaggtgaaatgtttgataaggatgagaaattctcggatcataaacgcaataagggcggttcatatgaatttacggtagcacacgatccatgttggaggacgaaataaaattactctttgaaaaacaacgtgacttcggatcagcctttgcagaaaaagatgcggaagaagagtatatcgacttattttcagctcagagaaactttgatgaaggtcccggcggtgacagcccttacgggggaaaccagattggaaagatgattggactatgtacctttgaggggaaaaatggagaaaaacgggccccgaaggcaagttatgccttcatggctacgaatctgtggcagaaaatcaatcaaattcgaatcattaaaaaaggaacggagctccacttaacagcagaagaggcggggaaaatatatgaaaaggcttggaataaagaggccatgacatacaaggatatccgctccgaaataagccttggtgatgaggcatcttttaaaggattagcttataagtggacggaaacggataaggaggaaacagaaagtaagaccaaattctcgtgggtgaaagaatatcacacgttacggaaagttttggataaagtcgaaaaaaatcggattttacagttatctcatgacgaaattgataatattgcctatgtcttcagtgtttataaaaatgatgataagatacgtgaagccttggaagagactgatttagatagcaaggatattgatgtgcttattgagaatctgggtacattcagcaaattcggccacctttctcttaaggcgtgttataagattttaccttacttggagcagggaatggtctattccgatgcctgcacggcagccggatatgatttcagaaaatccgcgcaaggcagtattgccgacatccccaaccccgttgtaaaacgggctatcagtcaaaccatgaaggtattaaaagccattaagcaaaaatatggatgtccgcctgtagagattcatattgaaatggccagagaattggcaaaaagctttgatgaacgacaaaaaatgacgaaatccatagaagaaaatcaaagtcataatgagcgcataaaggaaagactgcagaaggaatttaacgttccttatccgtcagggcaggatattgttaaattaaagctctacgaggaacagaatgaaacctgcgcttattcacaaaaacatatggatgcgcatagattattccatgaaaataattatgctgaagtagaccatatcattccctatagccgtagctttgatgatacgtataacaacaaggttctcgtattgacggcggaaaaccggcagaagggaaatcgcacgcccatggaatacttaagcggtgatgaagcccgtaagaagcagtttgttgcctgggtaaagagcgatgttaagaagccgcggaaacgggaaaatcttttgcgtgaaaagtttacagacgatgcggaaaatgattggaaggcacggcatttgcaagatacacagtatatcagccggtttatgctcaactacttacaaaataactatgaattgacaccgggaaatacggatagaaaacggcggattattcctgtaaacggtgctgtaacagcatatgtacgtaagcggctcgggatttccaaaataagagagaacggcgatttgcatcatgccgttgatgcggcggttattgctgccgtcacgcaaggagttgtaaattccgtatcgaagtacagtaaacgacatgaacttcagtatcatgtagatgagcacggtaattgcgttgacctggtaacgggagaattaatgggagatgcctttaaggaaaatcacaaaataaaaggctttcccgaaccgtggcctcaattcagagccgaattggaagcaagagtcagtgagaatgcgacagaagccattcggattctgaacttaccgacatacagccccgatgaggaaataaagacgcccttcgtatcccgtatggtacggcataagactacgggtcaggctcatgaagatacggttaggggcaagagtaatgtagccgataatgtgtatgttaaaaaagtggctcttacggaattaaaattgaaagacggagaaattgaagggtactataatccgtccagcgatcgtcttttgtacgaagctttgaaaaaacgactggaacagttcggcggcaagggcaaggatgcctttaaagaacccttccacaagcctaaggcagatggtagttccgggcctattgttaagaagtgcaaggtcctcgataagattaatttgtctgttccggtccatggcgggaagggtgcggcagccaatgccaacggcggtatgatacgggttgatatttttaaagcgaagggaaaaaatggcaagtcttcttattatgcggtaccgatttatgtggcggacacagtgaaggttgaattacccaatcgtgctgttgtaacaaagaaaacatatgctgaatggccggaaatgaaaacggaagactttgctttttctctttatcctaatgatgttgtatatattggcggaaaagagataaagatgaatgttatgcccggatgtactctagcaacagagaatcatgtcaaagatgactttttttactataaaggacttgatatagcgacaggtgctatgattgtaataaatcatgatggcacttataagcaaaggggcgtaggtattaagcaattacctcttattgaaaaatatgaagtaagtgtattgggtgaccttgtcaaagctatatatagaccgagagaaatatttaagcataaagcgcaaaggtccaagtaatgtataggcatgtgattattgagcagggggcttatgtatatcacaaggataatcaactgtatgttcgaggtgagagggagcataagattcccatagaggatattgctaccgttcttttggcttcatcacaaattacgattacgagccgggctttggatgcattggttgcggcgggaacgaatgtcattgtttgcgataacaaatacttgccgtgtggaacgctcttgccctttgcatcccattcgagacgattgaaggtgttgaaattacaaattgagcagacaaggcctcggttgaagcgtctgtggcagcaaattgtacggcagaagattcgcaaccaagggttgtgtttgcaatatgcgggaaaggaggactgtgtaagccacttggcttctaaggtgacttcgggagatacagataatgtagaaggacatgcggcaagcttgtatttcaaggtcttattcggtgaagacttcattcgtcgagatgatacggtcattaacggagtcctcaattacggctatgctatattgcgcagttccattgcccgctttttagccgtatacggctttgagccggcgcttggcatctttcatcacagcgaattgaataactttaacttagccgatgacttgattgaaccctttcgccccgttatcgacttgtgggcagtaacggagtgcttggatgctgcagagttttccgttgccatgaggcatgatttggtgaggctgttgaattgtcatattatgtcgggagaggagaaacacgttatgaactatgctatagaaagaagtattcaaagtttgtcggcttcctatgccgataaagagaaagcattattgttgccgtccttacttcccattgagcgacattcgtatgagtaaatatatgagactatttgtaatgttcgacctaccggtccaatcgcctgtagaacgccgtttagcctcacaatttcgacaatttttactaaaagatggctattacatgatgcagttttccatttacgtgcgtatttgtaacagctatgaagccgtagaaaagcatcgcatacggttggttcaaaacctgccgcatacaggatcggtgcgagtcctggttattacggaacgacaattcgccatgatggaagtactttgcggagagaagcttgctgacattgatactaagtatggggatgacacattgattatattgtaaagaaaaaccggaacgctacgggcgctccggtttttcttttgctcgtttttgacatttgaaaaggccgcagagtgagtggctctgcggccttttcgggtaggcattatacccttgagagagataatagggaactacaacgttgctaaagcccaattctttataaaaattattatacccttgagagagataatagggaactacaacactgattacaacagataaataattttttatattatacccttgagagagataatagggaactacaactg

SEQ ID NO: 2811 - DNA, 12085 bp, synthetic construct
  misc_feature 1..12085: note = Synthetic
  source 1..12085: mol_type = other DNA
gtaaaattcctattacggtaacacaagacggtaagatttatgtggaagaagaacagactaccttggatggtatgatgacgcgattacaattggaaaaggcaaagggccaggagattacaatcatcctgcgcgccgatacaaaagcggaatacggtgcctttgtgcaagtgctggacacactgaaacaaatggatattactaaaattgccgtagccacggaacgtaagtaggtgatggacatggagcctacaaaagagtggcagccttttgcccataggtacacatcgtggcgcatgccgtggttggtttcactgggcatcaatgcgttactggtattgggactggtaactttcatgatgcttcctgccggtgaaaccgaggcctttaaaggtgtggatattgctattgtcaatgacagtgaagccggttcggctcctgcaaagggaccgaaggtgacagcacctgcgcaagcaaaggtagcaccgcccaaaccattgtcgccggaggcggtaaaggcgattcaggatggagtacctgtgaaagaagtagaaaaaacatatacgccgcagactgcggcaacgacgacaacagcaacagaagccggtacatccgcggcggtaagcggtgatggttccggcaatggtgcgtcaacgggtagcacaggaaatgacggcaatggattgggtacgggagaaggtaccggcggtggcatcggcgataaagcggctcctgcaccgccgcatgatcccgttatcgtagcaccacaattaatacgtgcccatcaaccgacattgcatttgaatgctactgttgtggtggggatgtacattgatgaaaacggcaatgttaccgatgtagatgtggtaagtgccgaaggcgatagtcgagccgtagggccttcgttggcggcggcaagaaaatttaagttttccccgaagacaatcgatggtgtgggcgcaccgtcatacggaacgcgcacgtttacatatagacaggggtagagaagaacatcgttattcatgttgaatccgctgacggttaacttcgatataagggggactgtttaccgctagcaacctatgatataatatagggacgaagactattccgggcaggacaatatacggcttgccctagactcggcaaaacagtagcacaatatgtgaacgattgagggaggatataatgaaccaaaaagagctcgttatcgttgttgactttggtggacagtataatcagctgattgcccgtcgcgtccgtgaaaaccacgtgtattgcgaagtgtatccgtataataaagcggtggcaaaaattaaagagttacagccgacaggtattatctttaccggtggtccgaacagtgtatatgaagaaggatcgccgcgtattgaaaaagaagtatttgaaatggggattcccgtactcggcctttgctacggtatgcagcttatggcccatactttgggaggtgaagtaaaatcggctgcggctcgcgagttcggtaaaacgccgacaaaggtaaacacggcctctccgctttttaagggattatccgaagaagaaattgtttggatgagccatgtggactatgtggcacaggttccggaaggatttgaaatcgtagcacatacggataactgcccggtagcagccatgcagaatccggcgcgcaagctttatgctatgcagtatcatccggaagtgcttcacagtgaacacggcaaggaaatgattcataacttcctttttgaagtatgcggttgcaagggcgaatggacaatggctaactatgccaagaccgctattgaagatattcgcaaaaccgttggtgatggcaaagtgttgttagctttgtccggcggtgtagacagttctgtagcggcagccctcatttccaaagctatcggaagccagttgacttgtatttttgttgaccatggcttgatgcgtaagaatgaaggcgacgaagtagaagcagcgtttaaagattccggtatgaacttcattcgtgttgatgcggcagaccgtttcctcgggcgcttggccggtgtggaagaaccggaaaagaaacgtaaaatcatcggtgaagaattcattcgtgtattcgaagacgaaggacgtaagattggctctgttgatttcttggcacagggcacgatttatccggacgttatcgaatctggtgcaggtgatgcggcggtgattaagagtcatcataacgtaggtggcttgccggctgttgttgatttcaaaggccttatcgaaccacttcgcaatctttttaaagatgaagtgcgcgagttaggtgccgaattgggtttggcggattacctcgtatggcgtcagccgttcccgggaccgggattggctattcgtgttatgggtgaaattacgcgtgaaaagttggatatccttcgtgatgcagatgccattttccgcgaagaaatcgccaatgctaaattagaccgcagcattaatcagtactttgcagtgttgacgacaacgcgtactgtaggtgttatgggcgacttccgcacatatgactatacgttggcattgcgcggtgtaactacaactgacttcatgactgccgactgggcacgcattccttatgatgtattggatacaatttccagtcgaatcattaacgaagtacagcacattaatcgcattgtgtacgatattacatctaagccaccggctaccattgaatgggaataagcgacaggataaatatagtaggctaagatagaatttaagtatgctattaaaataatgttgacgaaaataagtaaatagtatatattgagtacatagtaattatactttagcgagaagtatcaggttactacaataaggcccggctgagagccggtgccgcaaagctctaacggcgtgtcttcggacacgccgttatctttttatgtaagacaatagctgcgatagcacgttgaggagtgaaatagcatgaattatgtattaggtctggatgtggggattacgtctgtaggttgggcggtgttggaactgaatagtcaggatgacccgatacgtattgtagatttaaattctagaatttttgagaaagcggaaaatcctaagaatggtgagtcgttagcattaccgcgtcgacaagctagaagtattcgaaggcttacgcgccgtagacggtttaggttgcaacgtgttcgcagatatattgtacgtagcggtatattaaacaaggaaacgttgcatcgcttgtataatactatggaaggtttaccggatatttatgaattgagatatcgtgggttgacccaacctctttcggcagaagaatggtcacggcttttgattttctttgccaaacatcgaggatttaaatcaaaccgcaaaaatgcttctgatggtgatgatggtgaaatgcttagtgctgtgaaggccaatcaggaattattgaaatcttatcgcacagtgggcgagatgttatataaaaacgaaaagtttaaagaatgtaaacacaataaaggtggttcctatgcatttactgtgagtcgtgccatgttggaggatgaaataagagcattatttgaagtacagcgccaattgggacaagcctatgccgctgaagagttggaaaaagagtatattgaaatctttggagctcagcgtaattttgatgaaggccctggtgcgggtagcccctatggtggtgatcaaattgaaaagatgataggtacttgtaccttcgaacctatggaaaagagggctccaaaggtaagctatggtttcatggcgtttaatttgtggcaaaaaattaatcatctaggactcatagcgaatggtgtggctcgttcttttacagcggaagaaaaacagcaaattgctgatttagcatggtcgaaaaataatttacatttacaacatataagaaaagaattgcgtattccggaagacactatttttagtggcgttaattacggtatacgaaaacaagatactgaatgggctaagcaattagaagaggtagaaaagaagcagaagtttaattggttaactccttatcatgaaatgcgggtagcactggatgcagtaaaaaaacatcgcattacggaattgagtccggatcagatcgatacgattgcatatgcatttacagtctttaaaaatgatgaaaagattacatcctatttgagggagaatggtattgaagaggacgatatccgggctttattaagtaaggttaagggctttagtaagtttggtcatttatctttgaaagcatgttataagatattaccgtatctagaagaaggcaatatttattctaaagcatgtgagttggccggttatgattttagaagtagtagccaagaacagttggaagatattcctaatcctgttgttaaacgtgctatcagccaaacattgaaagtaatcaaagccattgttcgacgttacggtaacccggtagaagtgcatattgaattggctcgtgagttggctcgtaattttgaagatagacgtacgatgcaaaaaagcatggaggataaccagaagcgaaatgaggaaattaaagaacggttggttaaagagtacaatgtactacaaccaactggtatggatattgtgaaattcaaactttacgaggaacagcaaggtgcttgtgcatattcgcaaaaaatgtttgatgtgaatcgggtattgcatgatccatcttacagtgaagtagatcacattattccgtatagtcgctcctttgatgactcgtataataacaaggtcctggtattgacaaaagaaaatcgcgataagggaaaccgtacgccgatggaatatttaaaggataatccagtgcgtattgatgcttttactacgtgggttaatgccattgtacgaaatagtcgtaaacgcgctaatctcttgaaatcttctttcacggaagatgcggaacaggaatggaagcgtagacatttgcaggatacacaatacatcagtcgcttcttatataactatttacgtcagaacttgccattaaaagaaggctttaccaacaggaagcggcggattattcctgttaatggggcagtgacttcttatgttcgtaagcggttaggcattgctaagattcgtgaaaatggagatttacatcatgctgtggatgctgttattattgcttgcgttacacaaggagttatcaagcgtgtatccgaatatagtaaatcacgagagctatggctatatcaattggatgatggaacggtcattgatggtgaaaccggtgaagtaatgacaggtcaaagagggcataagcaagagccttttccggaaccatggccggagtttcgccatgaattagaggatcgtgtcagtgaaaacccaccggagttattacggcatttacagttgccggcatatgaaggtattgatattgaaacaatcaagactccattcgtatcgcgtatgccaaatcgaaaagttaaaggacaggcccacgaggaaacgatacgtagtggccgattaaaatatgagggctatacggtaacaaaggttgatttaaaaaacttaaagcttaaaaatggcgaaatagaaggctactataatcctgatagtgatcgattgttgtataatgcgttaaaacagcaactggaagtctatgacggaaaaggggataaggcatttgctgaaccatttcataagccaaaagctgatggcactccgggaccgattgtaaaaaaggttaagattatgacgaagtcgaatctaaatgttcctgtaaacggtggaaagggtgtagcggataacggcagcatggtgcgtattgatgtatttggagtagaagaacgaggcaagatggcatatcgctttattcctatatatgtttctgatacggtgaagagaatcttacctaataaagcggtaacaagagatagaggatataaagattgggatattatggacgataaggatttcttattttccttatatcctaacgacttaatatatgtagagtcaaaaagagatattagtttgaaagcagctaaaggaagtacgctggctaaggagcgaaagcagaaagaagcactggtgtattatagaggtgcggatattgcaactgcaagtataggggttgttaatgatgataatacgtacagtatgagggggctgggaattaaaacattacaatctatcagaaaatgcatagtggatgtgttgggaaatgttgcttttgtgacaaaggaaaaacgacaagggttcagatgaagaaggtgacgaaatatgtaccaacatattgtcgtagaaagtgatgcaaaaatttatcgtaagaatcgtcagctttttatcgaaactgattatgcacatcacataccgattgaggacgtagcgacattggtattggataatcgaaagcttacagtaaccggtttttgcttagattccttaatacaaaatggcacggcagtttttatatgtaatgaaaagcatattcccaacggtattgtactaccctttgcggctaattctcggcgattaaaaatgattcgcttgcagacggaacagacaaaaccgagaaagaaacaattgtggaaacagctggtacagcaaaaaatcattaaccaaggtagatgtttagaattatgtggcaaaaagaatacagtagctaagtttgtcgataaagtaaaatcaggtgatacagataatgtggaggggactgcagctgctgtgtactttaaaactttattcggtgatgaatttattcgtcatgaagagtcgatatgtaatggtatgcttgattatggttatgccattttgagaggttccatcgctcggtatttggcaatgtatggctttgagcctagcttagggttatttcaccacagtgagctaaataattttaatttagcagatgatatgattgaaccgtttcgaccactggttgatttatatgcttatcatcatgtcgatgcgggagaaaaggagatgagtcctacagtgcgtcacgaattagtccagctagtaagttatgatatcctgtccgggaatgaagttcatgctgttaactacgcaatagaacgtgctgtccaaagtttagtacgtgcatgttctgagaaagatcagttcttattactgccggagttactaccgttgcaatcgcatacctatgagtaagatgatgcgattattggttatgtttgacctaccggtaggaactaaggctgagcgtagagcagcaacacaatttaggcagtttttattaaaggacggatattatatgatgcaattctccgtatatgttcgcttgtgtaatggttttgaagcagcaggtaaacatcaagcgcggatcatgcaaattttgccgaaggcaggatctgtacggacattattaattacggaacgacaatttgaggctatgaaaatcttatgtggtgaaaaggttcctgagttagatgaaaataaaaagcaaaataaagtagttgtgttgtaatggtatgaaaaaagcgctctaggtgggcgcttttttcatgtctgattgttaaatttttagactataaaacccattgtaacagtaattacaacgggttctacagtaggtattataccttagcgagaaatatcagggaactacaacgtcgtcggagcgttgtttttattctatataattataccttagcgagaaatatcagggaactacaactttgcaggcaacaggcaatagcaattataaattataccttagcgagaaatatcagggaactacaacaattttgtgccgttactacctcctaaaaacattataccttagcgagaaatatcagggaactacaacataccctctattaacaatatctatcccagtattataccttagcgagaaatatcagggaactacaagaatttttgttgagtactctatttcctttaatttctattttttaccataacaggccgtaggaatttcctacggcctgttattttgcgcgcatcaacataaccctggtaattttagtagtatgtaccgggttatgtcatgcatataattttgtaagtttactttagcgattagctcgttgacagcgtgttcgaaacactaatttgttaacaactagtaatatgtagttatgattgcttttattatacacgatttgaatgaaaagtaaaagcaattatgtctctcttgaatgtaaataactcacacgatgtcgtaatgataatataataacgttacagagtttgtaacagcgtccctacttacaaaggatgtagattatgatagcactactatatagaaccagccttctttttcaaaatgtcatacatctatatctaagtctatagatttagatgctttgttcatgttacaatgtaaaacaaaaatatactaacagtgaacatgctctgtttgctgctctttttaatcagttttatgacaggacttattccgccggagacgattgtagcgattccggttattaacggaggtattgtggctacgcagatgatgacacaagcggcaatggatcatggacttgctttggcagcagcattggggacaattacctttgcggtgcaaaaatttgtaggtacaccgattgcttcctttttcggtttaaaagaagtacgcctacttttagaggaataccggcgcaccggtataaatcctagtcataaagaggaagcgattacgggcgagaggcagacatttgctaatagaaataaaaagtattttggtgcatttatgtgtttggctatgaccggcttctttggatggattgccttttgcatcggaaaagttaccggtgtgagttataccatttggtgcttgttgttgggggcctatctacggtaacatcattgtcagtaattatggcaggaatattagagaatgtattgtaaattgaatagagtgtaactttagaagcaaaaagtagagagtgaaggaggagagatgtatgttacattttgatgcacaggattatccgtatacgtcaaaaagaaatgtagtctatgcgaaaaatggcatggtatgcgtaggaaatcccacggccgcatcggcgggattacaaacgctgctaaaaggaggcaatgctgttgatgcagctattacggtagcggctatgcaaccggtagtagagccgacgggaaacggcctcggttcggattgctttgccattgtgtggtacaaggggaagctgtatggcattaacggcagtggtccggctcctaagctggcatcgatacaagcgttgaaagagcgtggttatgatacgattccctcatatggtgtagagccggttaatgtacccggcgccgtaggagcgtggatggctttgcacgaacgattcggttcattggatttgatgacggttatggagccggctattcgctatgcggaggaagggtacccggtatcaccgaatattagccgattatgggaagaagctgaaggaatttatactaaatttaagacgcggccggagtttcaaggctggttcgatacatttttaccgcaaggccgttattatcgtccgggagaagtatttgcttccaaagatttggcgcgaacattgcgacggattgcagaaacgaaaggcgaggatttttaccgtggcgaattggcaaagaccgtagatgcttttatgaaaaagcataatgggttcttgcgttataaagatttagcggcatatactccggaatgggttgagcctatcagcgtgaactatcgcggttatgatatatgggagcttccgcctaacggtcatgggattaccgtgttgatggcgctaaatatattgaaggcttggaattttacggagagagataccgtagaaacgatgcatcgtcaaatcgaagcgatgaagttgagctttgtggatacaaaggagtatgtagctgagccgtcgcatatgaaagtgacggtagaagagctgctgtcagagcgttacgctgcagatcgtcgcgctcttatcggtactgaagccattgaaccggtggttggtgatccgcggtatagttcgacagtttatttttcagtggctgataaagacggcaatatggtttcctttattcaaagtaactatcgtggttttggatcgggcgttgttgtaccgggaacggggatttccttcaatgatagggcagaaaacttttcttttgatgaaagccatcctaatgcgctagtcggtggtaaacgaccataccatacgattattcctgcattccttactaaagatggtgaagccgtagcttcttttgggattatggggggctttatgcaaccacaggcacatgtgcaggtagcgatgaatcttattgattttggccttaatcctcagcaggcattggatgcaccgcggtggcagtggattggtggtaaacgagtagaggtagagcaggagacatctaatcatatcattcgtcttttgcagagacgcggacatgaaattatcgtacaaccggatccgtatcatatgggacgaggacagattattgtccgtgataagaacggtattctttgtggtgcaacggaaaaacggacggatgggcaaattgcgtcgtattaattagaatcgacaaggggtgactaatgatagatacaaaactaagtggtaaggacaagaaccagtgaggcttagacaatagaaaaaattaagaatgtataagctataatggaacttgtatgaaccaatctcgtacaagcgcatggcatgtgaattgtatcttatgtgaatatattttaataagaaggacctctttcgtgtgaagtgaacctcttttgttagattgtgtctaacaaaagaggttcgcttcattatgggggtctgtttattttggaaaaagacggtgtgcagtttcatgattataatgttgccgcactgtaaatcgtatggtttacaaagaaaaaattttaagtggacgataatattttacagattcaacgtcatgtatacaaaaaacaataaaaaattttaaaaatatttattgataataagcatcacatgatatagaaattttcgaatatagcaatgttgctaaaatagaattataatgatgcataaattgatattttgatacaggtaattatgcataataaaaatctaaaacggtaataataggctgtgttgatggattagttgctttcaattgaaaattttgtaagaagaaatatttttgatgcatatgtgtatgtgtataggcagacatatgcttaatgaaaaaatctatcaaaataggcatcgaacttgaaaaacagcggagtttaggcctttggacaaagtgcgattgagcgtatataatgaagttgaattatacgatgtatgttatgtacaaggtatatggattacttgggtttgcctataagattaggtagaagtgaggaggtacattatggaacagtttgatgttctggtagtaggcagcggcggcgcaggtcagcgtgcagccttggaagtagcttcccgtgaaggtttgcgtgttgcgcttattacaaaaatttttcctagccgttcagccacggccatggctcagggcggtattaacggcgtgttgaacaacgtagccaaagaagatacgattgaggaccatatcttcgataccgtaaaaggtagtgactatctgggtgaccaagatgccatcgaattctttgttaaacgttgtccggaagggattaaagaattggactactttggtgctccgttctcccgtacaaacgaaaacaagattgctcagcgtaatttcggtggtcagagctatccgcgtacttgctacagtgccgataaaaccggtcatgtaattgaacatacgttatatgaacagtgcttgaaacacaatgtacaattccttcaggaatggtacttgcttgatatcgtaaaagtagccgacggtagtgttggtggtgtagttgcttggaacatgaaggaaggtcgcgtagaaaaaatcgctgctacggctgtagttattgctaccggtggtgcaggccgtatgttctggactcgtacgtccaatccgtacctttccacaggtgacggcatggctgcttgcttccgtgtaggttgtgctttgaaagaccctgaaatggtacagttccatccgaccggtcttggta

SEQ ID NO: 2812 - DNA, 11885 bp, synthetic construct
  misc_feature 1..11885: note = Synthetic
  source 1..11885: mol_type = other DNA
cgaaggtcatcatgacccgcacgaccgacgtcgacgtatatgctccgtacgatgccgcagcagaagagctgcaggcccgctgcaatatcgccaacgcggcgaaggccgacgcctttgtatcagttcacatcgactccttctcttcggccgacgcccgcggcgtgacggcgtattacaacagcaagacgcctcatgattacagcctggccaagtacatccacaaccagaacatgcaggcgacggaattccccgacagaggcacgcggacggctaatttctacgtgctgctccacaccaatatgccggccgtccttttggaattgggcttcatttccaacccgacggaagaacgggccctcaattcggaaaagcagcagcagaattttgccgaaagcatcgtcaaagggctggccgattatttcaatcataacggcagataaagcggtctgaaagaaatagctgtaaatcttgaaaatttctattgacagtttaccggctgtcatgtatactagacaagtcgtagcataagtggctaggataagccgcatggagaggctcgtaagtccctgcaaagggcgccgtattcagcgagtatatgtatgaggaggtgtcactcatgtacgctattattaaaacgggcggaaaacagtatcgcgttcaggaaggcgacagcatttttgtcgaaaaactggctgctgatgttgattccgaagtagtattcgaccaggttttggcagtcgtaaacgacggagacgttaaagtaggcgctcctgtagttgaaggcgctaaagttactgcgaaagtattggaacagggcaaacagaagaaaatccgtattttcaaatacaaagctaaatccaactaccgtcgccgtatgggtcatcgtcagccttacacaaaggttacgattgaaaaaatcgaaggctaatgattacgattacattgcagcgtgataaggagaagcgcattacggggttcgatatatccggtcatgccgggtacggcgaagctggaagcgatatcgtatgcgcggccgtatcggcactggcacagtcggcgttgttaggtctgcttgaatacgatgcccagcacgtgcagtacgacgtaggagaaggctctttatccgttcatgtgatgaaagacggcgttgcgccgcaggctatactgcgcgcaatggaattaggcttaacagaaataagcaagcaatacagcgagtatgtaatactccattcatagacgtcaggaggtggacgggatgttcaattttaatttgcagctgttcgctcacaaaaaaggtaccggctccacgcgtaacggtcgtgacagcgaatccaaacgccttggcgtaaaatgccatgacggcgttctcgtaaaagccggcaacattatcgttcgtcagcgcggtacgcatttccatccgggcactaacgtaggtatcggcaaagacgatacgttatttgctacggctgccggcaaagtcgctttcgaacgctccggcaagtacaaccgtaaggtaagcgtatacccggttgaagctgaagcttaagtatgagtataaaaaatcctgcagcagtgctgcgggatttttttgtattctgaacctgttatgatacgcagtaattgaatgatcaggaggaacagtatgcgcatatatgtaaatggagaagaacgaaatctgcatgtgtacgacaaaattgccggcgtagattacgccaaaaacgttatctgtgcccaagaccgtctggatacggacgacttcggcgcgtttacgatgactgaggaagaatttgaatactggcgcaagcttctcgtcaccttgcaggattcggaagatatccgctttgccattaaggatctggtcgatgaagaagaattaagcgactatgtttacgaagaaacgaaatacgtcacccagacacagcaaattattgaagtagaaaacttgagccttaaagagctgcagaaggccctgacggaaaagaatacggcttggctgaaggaaaacggtttcgtcaagaccttggaaaaatagatatttctgcaagagaatactactgctggtatgttgatgctatgcggcgttgttcgcatgcattacggttttgacgtgaccatcgacgcgatggacgaaacgccagctattcctgaatggattaagattgcagtaaaataagtgtcaaggaaagggactgttgcatgaagaatcattatcctcttcgtgtgacagtcccattttattatgcattgcagcacaaaagctccgcagcagaatatatctgtcaacggagcttttgtgcagtgaatgcatcactaataaattatttcaatccacaattatgcttctgcataatggctatcttattataacaaacaaattgaagtttttgaattttcccgtatagtattgactattctttttgtatatattaaaatttaataaactaataaattgaattaaaatataaacagcttttgatggcattgacgttaggtcttatctattgtatactataaatgtagtaattatatcttagcgagagatactaggttattacaataaggtccaacgtagttggtaccgcaaagctctaacggtatgccttttaggcataccgttatctttttatacagacttattttagagacagggagtgatcatatgaattatgtattaggcttagatattgggattacatccgtgggatgggctgtcttggaattagatacacacgatgaacccatacgtattgtcgatttaaactcccgcatctttgaaaaagcagaagtgccgaagacgggggaatccttggctgcgccgcggcggatggcgcgcagtgctcgtcggctgacaagacggcgtcgttttcggcttcatcgcgtgaggcgatatttaattcgaaatcgtatacttgatgcgcgacaggttgaagagttgtatgttgattcgataggaaaaacagatatttacgaactgaggtatcaagcattaaaccaaccagtttccaactcagattgggccagactgctgattttctttgctaagcaccgcggtttcaaatccaatcggaaacatatcagcggcagcggcgatgaaggccagatgctggaggctattacggaaaatcaagagattctgaaaaactatcgcaccgttggcgaaatgctgtacaaaaatgaaaaatttaaagcctgtaaacgaaataaaggcggctcttatgcatttactgtcagccgggatatgctggctgatgaaattcatgccttgtttgacgtacagcggagtctaggacaagcctatgcgtcagagaaattagaagaagaatatatggaactgttttcggcgcagcgcaattttgatgaaggtcccggtatgaacagcccatacagcggaaaccaaattgaaaaaatgattggctgttgcacctttgaagacggtgaaaaacgagcgcctaaagccagctatgcctttatggcttttaatatatggcagaaaattaatcatcttcgcgtaacctgtgaagggacatatcgttttttgtcacaggcggaaaaagaaacgttggccgcattcgcttggaaaaaaagaaaatatcacttttaaagatattcgcaataagcttggactggatgatacagttcgctttttagatgtaaattataatttagacaaatataaaacggcagaagaagccgagaagaaggtaaaatttagctgggtcaaagaatatcatgcgattcgcaaagctttggataaggtgaaaaaagaccgtatttcagaattaagccatgaacagattgataccattgcctatgcgtttactgtctacaaaaatgatgaagccattaaaagatatttgctggaacatgctattgaactggctgacgctgaagctttattagaaaacatatcgggattcagtaaatttggccacttgtcggtcaaggcatgctataagctgctggagcccctgcagcagggccatgtatataccaaagcttgcgaaattgccggatacgatccgcagaaaagtaatcaggaaaatatcagtgatatcccgaatccagtagtaaaacgggcgttgagtcaggctttgaaagttattaaggcgattatccggcaatatggatgcccccctgtggaaattcatattgaattagcccgcgagctggctaaaagcgcaaaagaacggacagtgctagagaaggctatgaaggacaatcaatcccgcaacgaaaaaatcaaaactaagctccatgaactgaacgtcatgcagccgacggggctggatattgtcaagtataagttatacgaacaacaacagggcgactgcgcttattcgcagaagaagttcgatgtgaaccgtctgcttcatgatcccacctatgcagaagtagatcacattattccgtatagccgttcttttgatgatacataccgcaacaaggtattggtattgacgaaagaaaaccgggacaaaggcaatcggacgcctatggaatattttcaagataagccggagcggaaagaagcgtttatcaactgggtaaagcgtacgatttctgatgggaaaaaacgaaataatttactgcgcgtcaattattctgctgacgctgaaaaagaatggaaagatagacatctgcaggatacgcagtatatcagccggtacttatataattatttgaaacggcatattgaattaaaagaaggatatacagacagaaaacgacgcattattcctgtcaacggtgctgtgacggcatatgtccgcaaacggctgggtatttctaaaattcgcgaaaacggagacttgcatcatgctgtggacgctgttattattgcctgcgtgactcaaggcgtagtcaataagatttcccgctacagcaaaataaaagagctgcggcagttcatgacggcagacggtacggttgttgacaaagaaacaggagaagtactgcagactgccaatccgcgtaaaacagatcccttccccgaaccatggccgaaattccgtcaggaattggaagctcgggtcagcgacaatccggcagaagcgattgcagcgctggggttgccgacatataaaggcattgtcaatatttccgcgccttttgtctcccgcatgcctaaccgcaaggttcacgggccggctcatatggaaacgatacgcagcgctaaaatgcagcaggatgggtatacgatggtcaagacagaattgactaatttgaaattgaaagatggtgaaattgaagggtactacaatcctagtagcgacaaaatactatatgatgcattgaaacgacggctagagcaatttggcggcgatggtaataaagcttttaaagatcctttttacaaaccgaaatctgacgggacgcctggaccagaagtcaaaaaagtaaaaatcatgactaaatcgagcttgaatgtagcggtaaaccaaggcaaaggcgtagcggataatggcagtatggtccgcattgacgtgtttggcgtagaagaaagagggaaaaatgcatattattttgtacctatatatgtagcagataccgtaaaagaaacgctgccgaataaagctgtagtccccaataaatcatacaatgattggaaatttatgaaagatgaagattttttattttcgctgtatcccaatgatttaatttatatagaatccctcagtccagtatcttttcatacggtgaaaggatgtacgttagttccgaagatagaacgcaaggaaatgcttctttattatagaaaagcagggatttctacggccagtattactgtattgaatcacgataatacctatgtaaaagaaagcttgggtatcaaaacaattggcaaattacagaaatgtacggtagatattttaggaaacgtacactatgtacagaaagaaaaaagagtgggatttaaataaaggcgtgatgtggaatgtatcaacatatcgtcatagaaagtggtgcaaagttatatcagaaaaacagccagctttttatagaagctgaacagattcatcatattcccatagaagatatcgctacgctgctgttagataatcgccgtattgcaattacggggtattgtttggaaacagtagtaaaaaacggcgctgtcgtcatattgtgcaacgagaaacacttgcccagcgccgttatgctgccttttgcggctaattcccggcgactgaagatgataaatctgcaggtagggcagaccaggccgcggaaaaagcagctctggaaacagatcatacagcagaagatttataatcaaggacggtgtctggaactgtgcggaaaagaaaatgtagtcaaaaagtttatagataaggttaaatccggcgacagcacaaacgctgaaggaactgcggcggcagcgtactttaaagccttatatggagacgagtttattcgccatggcagcgatgtagtaaacagtatcctggattacggctatgcggtgcttcgcagttccattgctcggtatttggccttatacggattcgaacctagcttgggaatatttcatcacagcgagttaaattcattcaatttggctgatgacttaattgaaccgtttcggcctattgtcgatatatatgcgtatcggtatgttggaacagaagaaaaggagatgagtgctgcagtacgtcgagaattggtccaattattaagctgcaatatctgttccggaaatgaagttcatgctgttcattatgccattgagcgaacggtgcaaagcctgattcgtgcctatacagaaaaagaaaaatgcctgttgctgccggaattgctgcctttacaagttcatgcatatgagtagatttatgcgtttaatcgtcatgtttgatttgcctgttcgaacaaaggcagaacgacgggcagcaacgcagtttcggcaatttcttctaaaagacggatattatatgatgcaattttccgtctatgtgcgcttgtgcaatggtatggaagcagctaataaacaccggatgagaattttacatgcattgcctaaagcagggtctattcgtaccttattgattacggaacgacaatttgaatcaatggaaattttatgtggtgaaaaaattcccgatttagatgaaaataagaagaaaaacacagtcgttgttttgtaatttttgcgaaaaaagtgtctcgaaagaggcactttttctgcttttccgacgatttttttcatactaaaaagcacgtcgcagcaagtgtgcaacgtgctttttagcaggtatattataccttagcgagagatattagggaactacaaccttcgaagcggtagccagcttaacctgagtattataccttagcgagagatattagggaacgataaagggaacgataagaggacagaacagtttgacacgtcgtcattgatatattactgttcactatcattgtattgtaacatggcataattgtgaatatgtaaagttttattattttctctgtctgggcggttcttaccaaaataggatgattttatgccgttcatatggtataatactattttgtaaatgtgtattaaatttttctgcgaggagtgtctgtatgaaaatcagtgctgaagaaataaagaaaattgcactgttgtcccgcttggaaatcaaggaagaccagattgacgctgtcgggaaacagctgaatgacattttatcgtatatggatctcatgagtcaggtagatattacggatgtacagccgacggctcatgccgtatccatgtccaatgtcatgcgcgacgatgtgccccatacgtccctgcccaatgataaagcgctgcaaaatgcgccggaaccggaaaacggctactttaaagtgccgaaggtcattcaggattaaggagggatattgtggtaacgatacatggattacacgacaagctcgtcaagggcgaattgtctgccgttgaattgacgaaagcctatattgcccgcaaagacgccgtagaaccgcaggttcaggcttttttgtcggataaccgcgaatttgcgctggaagcggctgctgccgtcgataaaaaaattgctgccggtgaagccattgccgatttggccggcgttcccggggctattaaagataacatctgcattaaagggcagtacgctacgtgcgcgtccaagatgctgaaacatttcaaatcgccgtacaatgcgacggttattgaaaagctgatggatgtcgattacgtcagcctgggcaagaccaacatggatgaatttgccatgggcagctcgacggaaaactcggccttccagattacgcataacccctggggactggattatgttcccggcggctcgtcgggcggttcggccgctgccgtcgctgccggcgaatgcgtatggtctctcggctccgatacgggcggatcggtccgccagcctgcggcttactgcggcgtcgtcggcctcaaaccgacgtacggcctcatttcccgctacggcctcatcgcctttgcgtcgtctctcgaccagatcggtacctttacgaacgacgtagaagactgcgccatcgtattgaatgccgttgccggccatgacgctaaggactcgacgtctattccgcaggctaaaaaggactacaaacaggccttggtcaacgacgtcaagggcatgaagatcggcattcccgaagagttcttcggcgaaggtctcgacgccgaatgccgcaaggccttggacgaagccattgaaacgtacaagaaattaggcgcggaaatcgtgccggtcagcatgcctcacgtaaaatacggcatcgccgcctactacatcatcgcgccggccgaagccagctccaacctggcccggtacgacggcgtcggctttggcctgcgcgtcgaaggcaaggacatcgtcgatatgtatatcaagacccgttccgaaggcttcggcccggaagtacagcgccgcatccttctcggcacgtacgtcctgagctccggctattacgacgcctactatctgcgggctatgaaggtccgcacgcttatcaagcatgattacgacgaagccctgaagcaatgcgacgtcctcctgacgccgacggctccggacacggccttcaagatcggccagaacagcggcaatccgctggccatgtacttaggcgacgtctgcaccgttacgctgaacctggcaggacttccgggactcagcattccctgcggctataaaaacggcctgcctatcggcatgcagctcatcggcaaggcccttgatgaagaaacgctgctccgtgcggcctacacctttgaacagaatagaacggacttgcgcaagccgttgcctatgggggaggttgaattataatgaaatacgaatccgttatcggcttggaagtccacgtcgaactgaaaacgaagacaaagattttctgcggctgcagcactgaattcggcgccgaaccgaatacccatgtctgcccggtctgcctgggcctgcccggcgtgctgcccgtcctcaataaagaagtgctccactttgccgtcaaggcagggctggcgctgcactgcgacattttgccgtacagcaaatttgaccgcaaaaactactattatcctgatttgccgaaaaacttccagacgtcccagtttgacctgcccatctgcaagggcggctacgtggatatcgaagtcaacggcgaacagcgccgcatccacctgacccgcatccacatggaagaagacgccggcaagctcgtgcacagcggcggcagcatcgacacggccgattcgtcctgcgtcgattacaaccgcacgggcgtaccgctcctggaaatcgtcggcgaaccggagctgcgcagcggcgaagaagcgcgggcctatttggaaaagctgcgttccattctccagtacttaggcgtatcggactgccgtctcgaagaaggcagcatgcgctgcgacgccaacatctccgtccgtcctgtcggcagcgacaagctcggcacgaagacggaattgaagaatatcaactccttcagcggcgtgcagaagggtattgaatatgaagccgtccgccaggcccagatcctcgaagaaggcggcacaattcagcagtgcacccgcggctgggacgacgccaagggtgttacgttcctccagcgcgtcaaggaaggcgacagcgattaccgctatttccccgaaccggatttgattcctatcgaagtatcgccggaatacattgaagaagtccgcaaggagctgccggaaatgcccgacgccgtaagaagcgctttatggacgaactgggcctgcccgaatacgacgccaacctgctgaccttggaaaagcagacggcagactatttcgaagacgtcgtcaaatgcggcgtcgatgccaagacggcgtcgaactggatgctcggcgaaatttgccaagctcctcaatgaaaacggcgtaggcgctgtcgatgcgcccgtacagccggcggcgctggccgaactgctccagctcatcgctaagaacaccatttccggcaaaatcgccaagaaggtactgcctgaaatgtggaaatccggcaagtcggccaatgcgtcgtaaaagaacagggcctcgtacagattaccgatacgggcgcactggaagaactggtcaagaagatcatcgaagccaatccgcagtccgttgccgactacaaggccggcaagaagaaggctatcggcttcctcgtcggccagatcatgaaggaaacgaagggccgggccaaccccggcgtcgtcaacgagctcttgacgaaaaatttgcaataatgtaaataccgagtacgaatagaaaaaacgcttatgccgcaattcaacataagcggtttttcctgtaggcaggagattatgatgaatattacagaaattaaagggaacagagatgcctatatcgaggccttgacggagctgtgggaacggtcggtcaaggcgacgcatgattttttatcggccgacgaaatcgaggccattaagaagtacgtgccgcaggctctgggcggcgtgcccgtattagtcgcggcttgcagcgagcagcaggtcatgacggccttcctgggattggacggcggccgtatcgaaatgctcttcgtctcgccggaagaacgagggaagggaatcggaaaagccttgatccagcaggccgtggaacgatacggcgcctgtgaagtaacggtaaacgagcaaaatccccaggccgtcggcttttacgagcacatgggctttacggtgtataagcggtcagatttggacgaacaggtcaatccctatccgctgctgtacatgaagctgccgagatagcgtatctgtaacgtataaaacctctgccgtcatgcggaacgaacgcataagacggcagaggttttattttgcagcgtatgtaaaattataataagatgtattttccaataaagatgaccgccagaatgtacatgagcaggctgaattttttcccgtttgcccgtcaggacgttgaggatgacgtaggaaatgacgccgaaggaaatgccttcggaaatgctgtagcaaaagggcatggcaatgatggtaatgtaggccggaatggcttcgctgaaatcgtcgaagtcgatgccgacgacggaggtcagcatgaggaagccgacgatgaccagagccggcgcggtggcgaaggccgggatggccatgaagagaggtgacaggaacagggacagggcgaaaaacagggcgacgaacaacgccgtcaagcccgtgcggcctccttcgctgacgccggtagcgctttcgacgaaggtcgtcgtcgtactggtgccgaggactgcgccgaaggtcgtggcgacggcgtcagccatgagggctcccttgatgcggggcagcttgccgtcggcgtcgagcatgttggccttgga

SEQ ID NO: 2813 - DNA, 7367 bp, synthetic construct
  misc_feature 1..7367: note = Synthetic
  source 1..7367: mol_type = other DNA
aaacgcctggccgaacacgacatgtatccggaaaaggtggacaatcggtagacgcgtggggatgtagcgggtaaataatgttaatatgtgaaaagctctcgcttagtgtcgagagcttttttgatgaggttagaagcatatcggttaccgcaactcgctattttgatagttattctaaaaatagatagcaaatttcctgagaatattaaaattacattaaactgacatataattgacacaaaaatacaatggtgatatagtgacagtgtaaagcttatatctttgagagagatgataggttattacaataaggtccggcaggagtgccggtgtaccgtaagctctgacggcgtacctattattaggtacgccgttatctttatatatacctgtcacctcttacggaagcggaggatatgtatggacacgaaagaattgaagtacgtagtcggattggatatcggtattacctcggtgggttgggctaccttgctgttggactctcaggatgagcctgtccgaattcttgacttaaactcccgtattttcgataaagcagagtctgaagatggagcttccttggctgcaccgcgccgtatggctcgtggcacaagacgtcgtctgcggagacgaaaatttaggcttcatcttgttcgtcaatatatattgcgttaccatattcttgataaaaacggactggaaggcttatataagcctgatcagaccattgatatctttgctctgcgtacggccggcttagaacggcagttagagcctgaagaatgggcacgtattcttttatatatggccaagcatcgcggttttaaatctaatcgtaagtcgacagccgatgcgaccgccgacggagatatgcttgaagccatacaacagaataaggaggtgctcagcaaatatcggtctgtaggcgaaatgttcgataaggatgaaaaattctcggctcataaacgcaataagggcggttcatatgagtttacagtagctcgttccatgttggtcgatgaaataaaattactctttgaaaaacaacgtgacttcggatcagcctttgcgacagaagcggcagaagaaaagtatatagaattattttcacgtcagcggaactttgacgatggtccagggaagaatagtccgtattatggagttcaaattgaaaagatgattggtgagtgcacctttgaagaaggagagaagcgggctcctaaggcaagttatgccttcatggctacgaatctgtggcagaaaatcaatcaaatccgaattattgaagacgacattgaacgacctttaacgtctgaagaggcgaggaaggtagctggaatagcttggaaagaagagaatatgacctataaggatattcgttctgaaatcggtctcggtgatgaggcgtcttttaaagggataggtaatacaaaggataaaatgaagacagagaagaagtcttccttttcgtgggtaaaaggttttcataagatgagagctgctctggataatatagaggaaaatcggatttttcaactatctcatgaagatattgataagattgcatacgtatttagtgtctataaaagtgatcagaaaaggcaggaaaatttaaacgactggataaagaaaaatactgacagtaagattagccaggtagatattaaagctcttattgaacatatagattcatttagtggatttggacatctttctcttaaagcttgctacaaaatattgccgaagttggaagcaggatatgagtattcgaaagcatgtcaacttgcaggatgccatttaaaagaaataaataaagcagatatattaaaaatacctaatcctgtagttcggcgggcagttgggcaggcactaaaagtattgagagcaatagaagaaaaatacggctgtccgcctgtagaaattcatgtcgaaatggccagagaattggcgagaagctttgatgaacgtcaaaaaatgacgaaatctatggaagacaacaaaagccgaaatgaacgtatcaaagaacggttgaaaacagagtttcatgtaccctatccgtcagggcaggatattgttaaattaaaactctatgaggaacagaatggaaaatgcgcttattcgcaaaagtatatggatgtagaacgattatttcatggaagcaattatgcggaagtggaccatatcattccctatagccgcagctttgatgatacgtataacaataaggttctcgtactgacggcggaaaaccggcaaaagggcaatcggacgcctatggaatatcttgctaatgatgaggctcgtaagaagcagtttgttgcctgggtgaagagtgacataaagaagccgcgaaagcgggaaaatcttttgcgggaaaatttttcagagggtacagaaaatgattggaaagaaagaaatttacaagatacccaatatattagccgatttgtcctgaagtatttacaaaaatattatccgatacaagatagttcaggaaaaacaaagcaacgagtttttgcagtgaatggtatagtaacctcttatatacgaaaaagatttaagattgaaaaaatcagagcaaatggtgatttgcatcatgctgttgacgccgttattgttgcagcagtaactccgggaattataaaaaaaatatctcaatatagtaaaagacatgaacttagatctttttttactgataaaggtttttatgtagatccgaagactggagaaataatacagaataataatagtgatacgaatcaaattcctcagctttggccgttgtttaaagaggagctggaggctcgtgttagtgaaaatcctactgaaagaatcagagagttaaaactttctacgtataatttagtggaagaaataaagacgccttttgtatctcggatggttcgacggaaaaaaactggacaggcacataaagaaaccgtcaaaggtgtaggcataactcgagataaaggaaagtgtaaaactgttatagtcaagaaagtctcgttggataaattagagttaacgcaggatggtgaaaagataaaaaattactataacaaagagagtgattggttattatataaggcattgctaaaaagattacaaaaatttaaagaacgacataagaagaattctagaaagacgtatggacaggaagcatttgaggatattgtttttcataagcctaaagccgatggctctgaagggcctgttgtaaataaggtaaaagttattgaggacaacacgttatcagtttcggtttatcgaggaaatggggtcgctgataatgcaactcgagtacggacagatgtatttaaagtgccacagaaaaatggtaagtataagtataactttgtgcctatttatgtaccggatacgataaaagatgtattgccgaataaagcaataacaggttttaaagaatatgatgaatggacacaaatgaatgataaagacttcgtattttcattatatccgaatgatgtcatctatataggcggaagagaatttgaagtaaattcgcttaataatgcaccgcaaagaaaactaaaagatgcctatgtttattacaaaggtataaacatacgaaacggtaatattcacattgagacacatgataaggcttatgaacaaccgagtttgggagtaaaaaccgtacccattttggaaaaatacgaagttacggtattaggggatcttattaaagcaccctaccgaagtagagaaacgtttgggaataaagacgcaggtatacataatgtataggcatgtgattattgagcaggggtcttatgtgtatcataaggataaccaattgtatgttcgaggcgagagggagcataagattcctatagaggatattgctaccgttcttttggcttcttcccaaattacgattacgagccgagctttggatgcattggtttcggcgggaacgaatgtcattgtttgcgataacaaatatgtgccgtgtggaacgctcttgccctttgcatcctattcgagacgattgaaggtgttgaaattacaaattgagcagacaaagcctcggttgaagcgtctgtggcagcaaattgtacggcagaagattcgcaaccaagggttgtgtttgcaatatgcgggaaaggaggactgtgtaagccacttggcttccaaggtgacttcgggagatacggataatgtagaggggcatgcggcgagtttgtatttcaaggtcttattcggtgaagacttcattcggcgagatgatacggttattaacggagtcctcaattacggctacgctattttgcgaagttccattgctcgcttcttggccgtatacggctttgagccggctcttgggatttttcatcacagcgaactgaataactttaacttagccgatgatttgattgaaccatttcgtcccgttgtcgacttgtggacagcgacggagtgcttggatgccgcggagttttccgttgccatgaagcatgatttggtaaggctgttgaattgtcatattatgtcgggagaggagaaacatgttatgaactatgctatagaacgaagtgttcaaagtttatcggcatcctatgccgataaagagaaagcgttattattgccgtccttacttcccattgagcgacattcatatgagtaaatatatgagattatttgtaatgttcgacctacctgtccaaactcctgtagaacgccgtttagcctcacaatttcgacagtttttactaaaagacggttattacatgatgcagttttccatttacgtgcgtatttgtaacagctatgaagccgtagaaaagcatcgcatacggttagttcaaaatttgccgcatacgggatcggtgcgagttctggttattacggaacgacaatttgccatgatggaggtactttgcggagagaaaattgcagatgttgatacaaaatatggggatgatacactgactatattgtgaagaaaaaccggaatgccataggcgttccggtttttctttttgttcgtttttttgcatttgaaaaggccgcagagtgagtggttctgcggccttttcgggtaggcattatacccttgagagagatggaagggaattacaacaagccggagtttacatgacactgttttatgattatacccttgagagagatggaagggaattacaacccaaaagcgtatacagcgacgaatggtataattatacccttgagagagatggaagggaattacaactccacgtcgggcgttcgcattgacgggaaatattatacccttgagagagatggaagggaattacaacacgtctacatttaccacattgtcatcgtggattatacccttgagagagatggaagggaattacaactgtcgccctttttcggctctgtataggccaattatacccttgagagagatggaagggaattacaactcctttcggcttgcaccgtcaagttttacgattatacccttgagagagatggaagggaattacaactgaacttgtaccataatacccgcctttcattatacccttgagagagatggaagggaattacaactatgcaaggacacacaacctaccgtaatagattatacccttgagagagatggaagggaattacaacaagagtgccgttgtatatcttgatgagggcattatacccttgagagagatggaagggaattacaacatgagtatcgtaatcatgatttgcggtataattatacccttgagagagatggaagggaattacaactcacacacaagccattcgggtctattttctattatacccttgagagagatggaagggaattacaacttaattgccactgccatttcggcggttaacattatacccttgagagagatggaagggaattacaactcaaacggaaacaattataatcttttagaattatacccttgagagagatggaagggaattacaacggctgcggaagcaagccgaaatgagacagggattatacccttgagagagatggaagggaattacaacaataactatctaccagtaagcattatcaacattatacccttgagagagatggaagggaattacaacagagtagaagttatacaagtatttgaagacattatacccttgagagagatggaagggaattacaactttttgtatgcattaacgtttatgagcagaattatacccttgagagagatggaagggaattacaactatcggagtttacgatgtcagccgatgagcattatacccttgagagagatggaagggaattacaacttttgttggccaacaactcggcgtgaatctattatacccttgagagagatggaagggaattacaaccgtcgtttaatacaaatcctttaattatatattatacccttgagagagatggaagggaattacaaccattactacttgaagacgagaaaggcacgtaattatacccttgagagagatggaagggaattacaactcactcgtcatgtcggactcattctgcgcgattatacccttgagagagatggaagggaattacaacctaaagattctaagattatgaagcgtttgcattatacccttgagagagatggaagggaattacaactaatttcgcgtaattgaatttttccattttattatacccttgagagagatggaagggaattacaaccaaatgactggtttacgttcgacgggtacgattatacccttgagagagatggaagggaattacaacgtatacggctccatgaggtgtacataagacattatacccttgagagagatggaagggaattacaacgttttcttcttcttgttctgtactcgtatcattatacccttgagagagatggaagggaattacaacatttcctccttaatttaattcttgctgaagattatacccttgagagagatggaagggaattacaacgcacatgtagccttgttttgcgaatacttgattatacccttgagagagatggaagggaattacaacagcattattgcctttgtattatctatttataattatacccttgagagagatggaagggaattacaactgacgtagaactgtaaccggtctttttctaattatacccttgagagagatggaagggaattacaacttaactgacgaatacgtcatgactcaagaattatacccttgagagagatggaagggaattacaacattgcttctttcattgtcatgtaccgctttattatacccttgagagagatggaagggaattacaacacatagtacacaaataggtataaacatagaattatacccttgagagagatggaagggaattacaacagcattattgcctttgtat

SEQ ID NO: 2814 - DNA, 7070 bp, synthetic construct
  misc_feature 1..7070: note = Synthetic
  source 1..7070: mol_type = other DNA
aaagcaaaagcctcaaactctacctcttctccttcagaaaccacggtgccttccatgaagactgcgtcaacatcatcatggaagacctgataacacttatggatcccaaatacattgaagtgtggggaaaattcctgcctcgcggcggcctctccattgacccgtactgtaactacgggaaaaaaggaactaagtgggaagacgtggcctttaaacgcttggccgaacacgacatgtatccggaaaaggtggacaatcggtagatgcgtggggatacagtgggtaaataatgttaataggtgaaaagctctcgccactaggcgagagcttttttgatgagtttagaggaatatagggtactcaactcgatattttgataattattctaaaaatatatagcaaattgtctgagaatattaaaattacattaaactgacatataattgacacaaaaatattatagtgatatagtgacagtgtaaagcttatatctttgagagagatgataggttgttacaataaggtccggcaggagtgccggtaccgtaaagctctaacggcgtgcctattattaggtacgccgttatctttatatatacctgtcacctcttacggaagcggaggatatgtatggacccgaaagaattgaagtacgtagtcggattggatatcggtattacctcggtgggttgggctaccttgctgctggactctcaggatgagcctgtccgaattcttgatttaaactcccgcatttttgataaggcggaagtacctaaaacaggagcctctttagctgccccgcgccgtatggctcgcggtgtgagacgtcgtctgcggaggcggaaattcaggctccatcgtgttcgtcagtacattttgcgtcatcatattctcgataaagccggtttggaatgcttatataagcctaaaatggacattgatatctttgccctccgtacggccggactggacagactgttggaacctgaagaatgggctcgtattcttttatatatggccaagcatcgcggttttaaatctaatcgtaagtcgacagccgttgccggcggtgacgacggaatcatgcttaaagccatacaacagaataaagaggttctcagcaagtatcgatctgtaggtgaaatgtttgacaaggatgagaaattctcggatcataaacgcaataagggcggttcatatgagtttacagtagctcgttcaatgttggtcgatgaaataaaattactttttgaaaaacaacgtgacttcggactagcctttgcagaaaaagatgcagaagaagaatatatagagttattttcagctcagagaaattttgatgaaggtcccggcggtgacagcccttacgggggaaaccaaatcgaaaagatgattggactatgtacctttgaaggaaaaaatggggaaaaacgggcccctaaggcaagttatgcgttcatggctactaatctgtggcagaaaatcaatcaaattcgaattattgaaaaaggaacggaacgccctttaacagcggaagaggcgggtaagatagatgaaaaggcttggaaaaaagaggccatgacatacaaggatatccgttccgaaataagccttggtgatgaggcatcttttaaaggattgccttataagtggacggaaacggataaagaggaaacagaaagtaaggccaaattctcgtgggtgaaagaatatcacacgttacggaaagttttggataaagtcgaaaaaaaccggattttacagttatctcatgatgacattgataatattgcctatatcttcagcgtttataaaaatgatgataagatacgggaagccttggaaggaactcatttagacagcaaagatattgatgtgcttattgagaatctgggtacattcagcaaatttggccatctttctcttaaggcgtgttataatattttaccttacttggaacagggaatggtctattccgatgcctgcacggcagccggatatgatttcagaaaatctgcgcaaggcagtattgccgacatccccaaccccgttgtaaaacgggctatcagtcagaccatgaaggtattaaaagccattaagcagaaatatggatgcccgcctgtagagattcatattgaaatggccagagaattggcaaaaagctttgatgaacgacaaaaaatggcgaaatccatagaagaaaatcaaagtcataatgagcgcataaaggaaagactgcagaaggaattcaacgttccttatccgtcagggcaggatattgttaaattaaagctctacgaggaacagaatgaaacgtgtgcttattcacaaaaacatatggatgcacatagattattccatgaagataattatgcggaagtggaccatatcattccctatagccgcagctttgatgatacgtataacaataaggtcctcgtactgacggcggaaaaccggcaaaagggaaatcgtacgcccatggaatacttaagcggtgatgaagcccgtaagaagcagtttgttgcctgggtaaagagtgatattaagaagccgcggaagcgggaaaatcttttgcgtgaaaagtttacgaccgatgcggaaaatgactggaagatacggcatttgcaagatacacagtatattagccggtttatgctcaactacttacagaataactatgaattaacgccgggaaatacggatagaaaacggcggattattcctgtaaacggtgctgtaacagcgtatgtacgtaaacgtctcggaatttccaaaataagagaaaacggtgatttgcatcatgccgtcgatgcggcggttattgctgccgtcacgcaaggcgttgtaaattccgtatcgaagtacagtaaacgacatgaacttcagtatcatgtagatgagcacggtaattgcgttgacctggtaacgggagaattaatgggagatgcctttaaggaaaatcacaaaataaaagggtttcccgaaccgtggcctcaattcagagccgaattggaagcaagagtcagtgagaatgcggcagaagctattcggattctgaaattaccgacatacagccccgatgaggaaataaagacaccctttgtatcacgtatggtacgacataagactacggggcaggctcatgaagatacggtgcgcggcaagagtaatgtagccgacaatgtgtatgttaaaaaagtggctcttacggaattaaaattgaaagacggagaaattgaagggtactataatccgtccagcgatcgtcttttgtacgaagccttgaaaaaaagactggaacagtttggcggcaagggcaaggatgcctttaaagaacccttccataagcctaagtcggacggcagtcccggacctatcgtcaagaagtgcaaggtacttgataaaatcaacttagctgtccaggtccatggcgggaaggggattacgaaaaatgccggcggtagtatggttcgtgttgatgtattcaaggtaaagaaaagtaatggtggacatcagtattatttagtacctatttatgtagcagatactgtaaaggaacggcttccgaacagggctgtaatggcacataaagaatatgatgaatggaaaattgttgatgacaaagactttgttttttcgctttaccccaacgacttactttttatcggtgggaaggaaattaaattaaatggtacgggaggagataccttacatcaaggaatcatggttcaaaatgtatatctctattatagaggcctaaatattgctgtagggactattagtgttgaagatcatgatagcaagtatattcaagaaagcttaggcgttgggcgagtgccggtattggaaaagtatgaagtaagtgtattaggggatcttattaaggctcaatatagacctagagaaacatttaagcataaagcacaaaggaccaaggaccaagtaaatgtataggcatgtgattattgagcaagggtcttatgtatatcacaaggataatcaactgtatgtacgaggtgatgagggggagcataagcttcctatagaggatattgccacagttcttttggcttcttctcaaattacaattacgagccgagctttggatgcattggttacggcgggagcgaacgtcattgtctgcgataataaatatttgccgtgtggaacgctcttgccctttgcatcccattcgagacgactcaaggtgttgaaattacaaattgagcagacaaagcctcggttgaagcgtctgtggcggcaaattgtacggcaaaagatccgcaatcaagggctatgcttacaatatgcgggaaaggaggactgtgtaagtcggttggcttccaaggtgacttcgggagatacggataatgtagagggctatgcggcgagtttgtatttcaaagccttattcggtgaagacttcattcgtcgagatgatacggttattaacggaatcctcaattacggctatgccattttgcgaagttctattgctcgcttcttgtccgtatacggctttgagccggctctcggtatttttcatcacagcgaattgaataactttaacttagccgatgacttgattgagccttttcgccctgttgtcgacttgtgggcagcgacagagtgcttggatgccgcagagttttccgttgctatgaggcatgatttggtgaggttgttgaattgtcatattatgtcgggagaggagaaacatgttatgaactatgctatagaaagaagtgttcaaagtttgtcggcttcctatgccgataaagagaaagcattattgttgccgtccttacttcccattgagcgacattcgtatgagtaaatatatgagactattcgttatgttcgacctacctgtccagactcctgtagaacgccggttggcctcacagtttagacagtttttactaaaagacggctattacatgatgcagttttccatttacgtgcgtatttgtaacagctatgaagctgtagaaaagcatcgcatacggttggttcaaaacctaccgcatacgggatcggtgcgagttttggttattacggaacgacaatttgccatgatggaagtactttgcggagagaagcttactgacattgatacaaaatatggggatgacacattgactatattgtaaagaaaaaccggaacgctacgggtgttccggttttcattttgttcgttttttgacatttgaaaaggccgcagagtgagtagttctgcggccttttcgggtaggcattatacccttgagagagatggaagggaattacaacgcacgctttatcaaatcaagtacaacgcaaattatacccttgagagagatggaagggaattacaacggccctgcagcggacgagcgtgctgacattattatacccttgagagagatggaagggaattacaacccgacccagagaagcatggaaatgcagttatattatacccttgagagagatggaagggaattacaacatcaaccgcacatccgttaatctgtcccattatacccttgagagagatggaagggaattacaaccatcaatatctgtcttatcgataaatcgccattatacccttgagagagatggaagggaattacaacgtcgagccgccggaactgttaaagtttataattatacccttgagagagatggaagggaattacaacccgaagatgacactgcccgtaagctcggcaattatacccttgagagagatggaagggaattacaactcttcgggctgattacattagtcatttggcattatacccttgagagagatggaagggaattacaactgtaaaacgctttttaggcattaaaaagacattatacccttgagagagatggaagggaattacaacgagttcactgatagagcgacggcacggtggaattatacccttgagagagatggaagggaattacaactcgccgctcgaaagttcgttgagctcgaggattatacccttgagagagatggaagggaattacaacagcgtacttgcccgatagtttatgttaacaattatacccttgagagagatggaagggaattacaaccggacagcgccttatatgacgttgaaagttattatacccttgagagagatggaagggaattacaacgaacggggaatagtctgaaataatatctctattatacccttgagagagatggaagggaattacaacatcgtttaactccaagttgtgtataactttattatacccttgagagagatggaagggaattacaactcggcgagcttggcaagactcttgaagaacattatacccttgagagagatggaagggaattacaactcgtattcacccaacgcacccgtaaaaatcattatacccttgagagagatggaagggaattacaacttagcttgttctgttgtcataattttcctaattatacccttgagagagatggaagggaattacaacgcctgtccagtgaatgtagagttttacatcattatacccttgagagagatggaagggaattacaacctaggcggtgttacaaaggccacactacttattatacccttgagagatggaagggaattacaactataatgtcgcttgtttaatgcttttacgcattatacccttgagagagataatagggaactacaacatcacaaggaacaacgccgaaaacatgaggattatacccttgagagagatgcggagtatagctaaataagaaaaaaaggacttgcgtttttaactgccatcgggctccaatcgcccaagcgcgtaacgctaagtcctctattcgagcagagtatatcagataaaaatgatttgagcaaggttaaaagaaaggtccttgaaaaaaggcgaatgttaaatgatattgctcccccttgccaagttctcagccgatttgctaaacttgccgtgaaaaggtgtatttctgccgccgcattcggacgtatggccgaggttcttacgagcatcgaccgtagcagtagcacctttttattttggaacgaaaacatgattttctcttgacgtattct

SEQ ID NO: 2815 - DNA, 5815 bp, synthetic construct
  misc_feature 1..5815: note = Synthetic
  source 1..5815: mol_type = other DNA
gcgccttcggcgaggaaccgggccgcatcatcgccatcgggctgatgaccgataccgacaacaccggggagcgggcgcacgcctggtacggggatattgaattccgcaggatgccggaagcaccggtcgttgcaaccaaggaaaagtaatattcggaactgccaatgcaacggaacagcccatattttggacaattgctcccgcaacatcgggtgtgaggtaacaataagaaaaaagaaaagagcctccgaagaggcccttttgtatcggtgtcgtagggcctaagcccacgacttgttgccgacagtccccaccatcggaacgcttgatacggagactatcgtagccaagttaccccgaggaggcaagaccatgaattaccgattggctcttgatatcggcaccgcgtcctgcggacttatagccgtcaagcttgatgaaaatcgagaaccctccgaaataattcatcatggtctgcacattttctccgagccggtgttgccgcacgcagctggcgaaacaggagaacccaagaaagccagcaggcgaaaagcacgtcttgcgcggcgcaacatagatcgccgcgtaagacgcctgcgtcgcatcgcaatgctctccagcctcttggatcttgatcacaaaacaatccctcccgacaaggggcagcacattcatgaggcccgcgcaaatgcgcctcaaaaacgaatcgaactggacgaccttgtgcgggtttttttaaagctcgcgaaacgacgaggctatgccggcggattcagaacaaaaacggacaaacaacgagacgaagacagcggcgttgtccagccaggtattgaaaaactgcaggaagccatgaaagcggctgactgcaagaccgttggccaatacctaagccaccgtttcagtaatggggagacgctaaaactcaaagaagcaggactttatactcaccgtgacatgcttatcggggaattcgaagccatatggacagaacaggaaaaacatcaccccatactgcgagaatcccgtctcgatcctgtcgcaaagttcgctgatggcaaagaaaaaatccgcccacttcgggagcagtttcgcgaagcgatcttctatcaacgtccgctgaaatcgatagcaccaatggtgggcaattgcgctttggaaaaaagcctcccacgggcaccgatggcacaaccggccatgcaggctttccggatcgaaaagcaattggctgatttgcgctggggaatgggacggtctgctctcccgctgacctccgaacaaaagtccgttatccgagacatgttgaatgacccggaccaaatcacgaaggaaggaaagctgacattcaaaaagatttatgcagccctggagaaaaaaagcctgatgccagcaagccgccgctcactcaacatggaacgatcaagtcgagaagaactttatggcaatcgtacatttcgcgccatgcgtgatcttgatgccatagaacaatggctcacatttgactcaccgacacagatacgcatcatcaatttcctggccgatctgggctctccggagcaagttgatttacctgactggcaggaccgcttcaccaagcgcaaacgtgtcaaaaaccacagaaccggccgctgggaggaaaaacatgaaaagcggaacttggacagaaacctcgtcaacttcgtcaacaaactggttgaaaacgggaaattcggcaggctcggcggtatgggctttgagtcaggtcgcgccggttattccgtacgtgcgttgaaaatactgacagacatgatgcggaacgccaactgcgacgaacacgcggcgatccaaacttgttacccgcctccgcctcccacaggcgaattgctcatgcatttgtctccacatccgccaacaggcaacgtagttgtcgatgtagcactgggcgtggtgcggcacgctgtcaacgacgcgctcgccaaactgggagaaccaccaacagaaattgttatcgagttatcgcgtgacatggcgctcggattgaaagctcgcggaaaaatcgagaaaaaaatcgataaaaaccggaaactgcgcgacaaggcaaggcaagaactcgaagccaatagtcaactcggcaccgagcgcaatatcctccgttatatcctctggcaacaacaagatacgcattgcccctactgcggggatcggatcagtttaggcgaagccgtggacggcaattcaaccaattttgaacacatactgcctcgctcattgactcgtgttggcaagcaaagaaaccacctcgtactggcacaccggcgctgcaatgatgccaagggcgaccgcacgccttacgaggcattcggccacgacgaaatgcgatggaacgcagtcaaatactgcgctgatgtgttggagaagaaaaagcaattttcaaaatctaagttattgattttgaatgaatatgagcgtgaaaccttggatgaggctgccatcgatgaattctcggatcggcaactccacgaaacatcatggatcggcaaactggctgcgctgtggttacaaaccatctgccccacaccggttgccccttcgcgaggaacactgacagcacatctccggcgcatttggaaattggaaacagtgattgcacaagcgagacttgaagctggcttacccgtactggatcagggaggcgaaaagatcactccggaggaatttgatcgatttaggccatactgggaaggacacactggcaaaggcattgaacgaactgaccgaaaaatagacaagcgcattgatcaccgccaccaccttattgatgcgctggtcatcgcccaaacctcgcgcagcctgtatcagcgcatggccaagaattacaaatcacttgcggaacgccagcaggcgggagaagccgttcgtttgcggcttttcgtagaacctccactaaaaaatgtccgggaacaggcgctggctctcgcacaaggtgccgatattcgacacaagccagatcggcagatttccggaaatttctttcaacaaaccgcttatcgaaaaacctacaccgaggatggaaaatcccgcgccgtggtccgaattccactaatccaattgacggacactaagggctcattggaaaaagcaaaaaaagggatatcggatatcgtaagcgaccacacccgaagagttgtctcaagctctttcgaacaaagaatttcatctggaaaaagcgttaaagaagctttgacagaacccatttatgaccctcagtttaataccgcgattaaaagaatcgccgtgtaccagcgtattggacgaggatttcttgatggatcaaatacatttccgattgagcatggctacggatttgtaaaacactacgttagcgacggctatgcttttgtctccattaccgaaaaaaatggacgcattgaatcagcggactctgtcccattattccgagctcatcgtttaaatggatatcctaaagatggcgaacgcagattctttaggggggatacgctactcgcacctggaaacggaaaaaaatatgtgattcatcagctactagccaatgcaaccgtgcgcgttgctgaggttactgagtcacgctcctggattgctttaggggccgagtccggagcaacgcaatttggggcagcatcacttataaagatgaagcgtctatagtggcatcagaccgtattcttctcatcgaaaaccctgccgatctgaacatagataccgggcggctacgcatccgccgccaaggtactgacgacgcgtttataacacccaaagatatcgccgtactggttttacatcaccataccatcgcactaagcgtgaatacgctgcgtgctctaagcagcgcgggagcaacggtcatggttactgatgacacacacatgcctaccgcattgatgctgcctaccgccgccaatcgcgctgcctcctcgcgactgagaaagcaaatcggacatcttgacacccccatgatcgatacactgtggcaagcgctggtaaaaacacgtatcaaaacccaagcaaccaccttacgtgcactggaacttaaaggcgcgttgcggttagaacgaatggttgatgaggtcgaacccggtgatcgaacacaccgtgaggggcaagcggcgcgtcactactggcaaaacctgtttgaagattttaagcgggaaaaagaaggcgcagttgatggcatcaactcccgcctgaactacggctatgccgttctgcgcagcctggttgccagagaattggttgccgcagggttgagttgcgaactcggattggggcacaaaagcgcggagaatccgtttaatctcgcagatgacttcatggagccctaccgattcacagtagaacgacacgtttggaagctggattgcgcgtccgccctggatagcaaaacaaaaaaggaagtggttgaattcatcgagagtgatatatccattggtaagcactcataccgcctacttcctgcagtgcgcgagacgattgcaagttatgttcggatacttgaaaccaacaaagggcaactcacgttgcctgctggttagtgggcattaatggctggcgcgttatgtgggtcctcgcggtctttgattgtccggtaacgaccagcgaagaagtccgtgcgtacacgcaatttcgcaagcaacttttaaaagaaaatttcgtccaacatcaatattcggtttatcttaaacacttcccaaccatgtcagccgcccaagcagaaattgaccgcctgaaaccagccgttccggaaggagcgcacgtggcttttttcatgctgaccgacaaacaatacggcctgacccgggaattcttcggaaaaaatgccaagaaaatggccccagatgcccctgaacaaatcgaacttttctgaaaaaaataccgctaattcaaagaattagcggtatccagagtgtatcaagtgttccgatggtggggtgtcggaacggcttgcagtcgggatcgaggtcgatggtcgagtgtatcaagtgttccgatggtggggtgtcggaaccgacctttgggtcgaggcaaccggcaatttgagtgtatcaagtgttccgatggtggggtgtcggaacggaaccgtgcgcaaatcttcccgaactcggagagtgtatcaagtgttccgatggtggggtgtcggaaccggctggttggctggatctcctccccatgcgagtgtatcaagtgttccgatggtggggtgtcggaaccaggactatggctaagtcggtcagagtgtggagtgtatcaagtgttccgatggtggggtgtcggaacagtgccggattcctcgcaatacgaactgtggagtgtatcaagtgttccgatggtggggtgtcggaacgacgccctgtgtgacgtcggcgatggtggcgagtgtatcaagtgttccgatggtggggtgtcggaacaatggtggctcaaatccagcgccaagcatcgagtgtatcaagtgttccgatggtggggtgtcggaacaccttggtctccttgctcagcgcgtcaagcgagtgtatcaagtgttccgatggtggggtgtcggaacgctgaccgcaggcgagtatgccgtcgccacgagtgtatcaagtgttccgatggtggggtgtcggaacgcgggccggcttgtcgagggcacccggcacgagtgtatcaagtgttccgatggtggggtgtcggaaccctcgcgcttggccatcgtgtccgtgtggtgagtgtatcaagtgttccgatggtggggtgtcggaacgcatcgactcacaattggcggataaatccaccaattgtgagtcggcgcgctaagcgc

SEQ ID NO: 2816 - DNA, 23888 bp, synthetic construct
  source 1..23888: mol_type = other DNA
  misc_feature 1..23888: note = Synthetic
gtgatatgaaaaagatggtaagcttaatgcatgatgatatggtttggcacaatgaaggtgataaaagcatgccttggattggaccatggaaaggtaaaaaaacaattttagaaaagtttttacctgagtttggatcgaactttaaaactataaaatgggaacctaacgatgctttatctaaaggagatactgctgctttctttggaaatatgattggggaattaacaaaaacaggaaaacaaactgaagaattcacttatgctttacgtgtaaaagttaaggatggaaaagtgattctttggaattggtttgaagatagttatgctgtttctaaagcttatcataacaaataataattcatacgtaaaattaaaatttgactttgatattttgattgtaattgagcttggtgaaacaaatgaaattactcctagtttatctttcacaattgatttgaagtaatttataagttgtagaggttaatttagggtagcctttaataaagtgttgtagcatgaacacttctcagatcccaataatttttattgggttcttttttttacgattcggtgataaaacttaattactgatttgcaatcttattaaatgtaccaattcttcattgcttaaagaactttcattttttaagtaatcgtctgtttttattaactcaacaatcatttttttatcaactaacttgaacctcaatttttttatcagtattgtattggtgatcatcatctatagtttttggggatgaatatttagattacttaaaattagagattagtaactaaaaaaacacccgtttatagacgaacggtcataaaatgaagataactccggaagttagtatgtttaaagatttatttcatttataatgaactaagttttatttcgcaaatttcaaagactttactgttttcacataaaattcttgatgtaaaacaactagtaacggaaccaacccatgaggcaacctgtatacaacttcatataaattttgatgtatcgattgtagtggaaactctatataaaaattagcaactattcttgctaacgctgttaataatccccatactacagcataaatcaatgcgtatttactaaactttggaagaaaaattaagactgctaatataaagtctaaaactcctgctatgtaaagaaacgaaagcgcaaatgattctgaacatccaaaaatattaattaccatatctacaaattttcctggtacaggatatgctccaaaagcatacaatccgtgtgaaaaaaatgttactgcaattaatacttttaaacttaaaaaaactttttgttcgttatagttttcttttaaagtatacaataaaacaaaaggtaaaccaaactgaataccatgttcgaaaaattgagcgaaatggtagaacttttccttggttaaaagaatagttaaaatcactaaacttatcccacctacaaaaattggaattctgaataatttcttatttgatcttgttattaatatacttgaaattgctgctattacatacaaaacgcctttggctatgattagcgattgtacaaatgtatctgtagtagtacttgtagcatatgtagtccaagaaatagcaaaaacattttcaattacaggttttaagagagattcatcccaaaaaaaagttcgataaggagcatcccaaaaaagatgttgccaagcgcgaccaataaaaataaaaaatactgaaagtttgaggagattattttttttcatgaccacaaaataactggaataaacattaactaaaaaacctttaattattatattttttttaacaaatagttatgtgatttaattttcaattaacattcatctttcagtatttatcagtgtattcacttatgtattttcacggcgacaattaaaattaatttaattaaccccttttctgattatgaaaaaaaatctcttcttgatcttatttctatgtataggatgcatcgcctatgctaatactgataaatatagattaaccttacgaggtaaccctgcaacttctatagttatcggatggaatcaaatctcaggaaacaatgcaaaagtttactacagtattgtagattacggtacagattttaagaagtactcgaactctatatctcccagtagaactgtttcttataaaggtatgaataacacatttgtaagattaactggattgactccaaatacggcttactattttattattaaagatagtcaaagtacaagtaaacgtttctggtttaaaacagccccagccgacaagagtcgattatctttcattgctggtggtgattctcgtaataatagatcatcaagaaaaaatgccaaccttttagtttctaaattaaaaccacatgctattatgtttggaggagatatgactgataatgacaccaacagtcaatggcaaaattggtttaacgattggcaattaactattgctaaagatggtagaatgtttcctttaatagctgcaagaggtaatcatgaagatagtaataatagtatctacaatctttttgatacgccatcatctaatgtatattatgctcttacttttggagataatttagttagaatatatacattaaatacagaaatttctatttcaggtaatcaaacagattggttaaaaaatgatgtaaatagtacaaatactgactggaaaattgcacaatatcacaaaccaatgcgtcctcacacttttttcaaattaaatggtaatagtcagtataacaattgggctgatctattctataaaaaaggggttagactagtagtagagtgtgatgcgcatacagttaaaactacttggcctgtaaagccttctactagctctggaaatgatgaaggttttattagagataataaaaaaggaactgtatatgttggtgaaggatgttggggagctccacttcgtaacaacgatgatgataaaaattggactcgtaattctggaagatttaatcaattcaaatggatttttattgatgaaaataaaattgaaactaggactattaaaatagataatgccaatgaagttgatgaagtttcaaacactaatacttttcaaattccctctaatttggatatttggaatcctgtaaatggaaaagttgttactctagaaagagaaaactctttaggtagttctgatgaaaaaaacacattagaagttgcaatttctaatggagatgacgatgttgaagaacataggttcggaagtttatataaagatagtggcgatttagagttggtctacgattttgtaaataaatttagctatcaaaaaattggtttacgttttagaaacataaatcttcctaaaaatgcaactattacaaatgcttttatccaatttacctcagaaaaagaccatagtgatactacagaactagaaatcagcttacacaatgttggcgattcaccagttttcaccaactcaaataatgtttctggaagaaatactttctcatcaaaagtgatttggaaaccgactccatggacagctgatcaagcaggaaatgcacaaagaactcctgatttgtctactatgttacagcaattaatagaattaaatagttggaaatctggaaacagtgctagctttatcataagaggtaaaggtaaaagtttacaaaacaccaatgcaaaaaggtctgcttatgcgtttgataaaaatcctaataaggctgcaaaattagttataaaatatacggttgataaatcttcagatatttgttcaggcattaatgaatggcaacaaaatataaattatacctctggtgataaagtaacgtatgaaggtaatttattcgaaaaaactgattctgattggaatttcttggaaacttgtggaactcttattaaaaatagagtaaactcttcaataataaatactcctccaattttatcggaaaaaagttttgaaatattccctaatcctttcacagatcatattactatttcattaaacgataaatatataacgaagcctgttactattgagttatttgatattagtggagtcaaagtttttaatacaactttcaacaatactaaagagatcgttattaatcctgagttaacggccaatggtatttatttcttatttgtgaaacaaaacaatcgcataatcaaaacacagaaattaattaagaaataattattcttttttgtttaaatataatgtgaagcgataagtttttgaaaaatttatcgcttttttcaaaattatcttgtgttaatttacaactatcagtatgttatgttttcaaaaaaaaatagttaacttatttaatttttaattaataatttaaattgttaggataaatcatttcataactttttaaattcgcaaaaaattaaccaattaacctctaccctaaaatgaaaaaacttttatcattagcaattcttttgctaataggatttaaccttaatgctaacaacgataaatatcgccttactttaagagacgatccagctacgacaattgttattggctggaatcaaatttctggtagcaaccccagagtttactacggaactacagattatggaacagattatagtcgctataatttttctatggcaccaaccaaagcagtttcatacaaaggaatgaacaatcactttgctagattaacaggtttgcaaccaaacactgcatactattttgttattagagatagtcaaggaacaagtcgtagattatggtttaaaactgctcctgcaaataacagcagattatcttttattgctggtggagactctagaaataatagaaccccaagaagaaacgctaacctacttgtatctaaattaaaacctcatgctgttttattcggaggtgatatgacagatgacgatactaatagccaatggagaacttggtttgatgactggcaattaactattgcatcagacggaagaatgttccctattatcgctgctagaggtaaccatgaagatagcaataatagtatttacaatttatttgatgtaccttctaccagtgtatactacgccataacttttggtaacaacttagtaagaacctacactttaaatactgaaatttcaatctcaggaaaccaaactacttggttacgtaacgacttaaattctacaaatgcgatttggaaaattgcacaatatcacaaaccaatgcgtcctcacgttcgttttaaacgtgaaggaaatagtcagtatggtaattgggcgcgtttattttatgacaaaaatgtaaagttagttgtagaatgtgatgcacacaccgtaaaaacaacatggccagttcgtccttcgtcttcatctggaaatgatgaaggatttaaaagagatgataatggtactacatatgtcggagaaggatgttggggagcaccactacgttctaatgatgacaataaaaattggactcgtaattctggaagatttaaccaatttaaatggatttttgttgatgaaaacaaaattgagacaagaacaatacgtgtcgataatgcttcaagtgttggttctgtttctaataataattcttttcaaattccttctaatttagatatttggagtccttcaaacggtagtgttgttaccattaatagaaatacttctggaggtggaggcgattctggaaatggaactttagaaatagctatagcaaatggtagtgatgatgtagaagaaagagaaaatggtagtatttatgccaatagtagtgatttagaattagtgtatgatagttatgaaaataacggatttcaaaaaataggattacgttttagaggtgtaaatttacctaagaacgcttcaataactagtgcttatctccagtttaatgctgacgaaagtaatagcgctagtacagaactagaaatcagtttacacaatagtagtaattcgcctgctttttcaaattctaataatgtatctgacagacctactttttcatcaaaagttacttggagaccaagctcttggtcatctaaccaaaacggaagtgcacaacgaactccgaacttaaaaaatatggtacaaagcttagtaaataaaagtagttgggtatcaggaaatagtgtaagttttcttgttaaaggtaaaggtactagtttaacaagtacttcagcaaaacgtgttgcagattcttatgaaggtggtgctagtaaagcagctcgattaattgttaattacacaacagatggagatactaataatccagatatttgttctggtgttgctgaatggagaagtggtgtaagttattctgcgggagataaagtcgtttaccaaggaaacttatttgagcgtacttctgctaacgattggaatttcttgggtgcatgtggtacttctgcaaatagattttcttctaaaaacactattacataccctcctgttttatcagcttcagactttgaaataaaaccaaatccatttacaaatcacattgtgatttcgtcatctaaaatagacaagatacaacctgtcgaaataattttatatgatataaaaggaagtgttgtttatcgagaaaaaactgttttagaagcaaattcagataaaaaaatcacaccgaattctaaatcttccggagtatatattttacatataaaggaaggaaaagaacttattgtaaagaaaaaattaattaaaaagtaatatcagaatatatattaaaaacgggaaaatctctctaattttaaaccgctaattcttttaagttttagcggttttatttttatttgaatttattttttggaatgaatattccaaaaaatcatatctttgtaccatgacaaaaaaagatagtatcctaaaagctgctttaaaattacttaccgctaacggtatacatgcaacaccaatgtctgcaattgctaaagaagctggtacaggtatgggtactatttataattactttcctactaaggaaattttaattaatcacatttatcagtttattaaacttcaagagcaggaaatatttgagccatttaatcctgaagaagaaattaaagcacaattctttaattattacaatgtagctgtacattttttcattgaaaatattcagtattttcaatttatggaacaattacacgcgtctccaataattacagacgaaagcagaaaattaggtgaaacggcagctaaagaagtgtatgttcttattgctacaggtaaaaaaagaaacatcataaaacctctggaaactcaagaattattgcaattcataggaggctctttattaactactattcgttggaacattcaaaacactaatacgacatatattgataatcaattaaaattagtttgggacgcaattaaagtgtaaaaaatttaattataaattggaatgaacattcaatccaaaaaaaataacttatgaataaaaatattttaattacaggaacatcaacaggagtcggctttgaagcagctttactttttgctgaaaataattttaaagtttatgccactatgcgaaatttagctaaaagtgaagctttaaaaagagaaattcaaaatcgaaatttaacaattgaaattcttgaattagatgtcactaaaaatgattctatctataacgctataaatacaattatcgagaaagatggaaaacttgatattttgttgaataacgcaggagctggatttgcgaaaactttagaatttgcttctcaagaagaaatagattgggtaactgatgtaaactacactggtgttattagaacgacaaaagcagtaattccacacatgagaaaacaaaaaagtggacatataattaatattacttctattggaggtttagttgggcaaccttttaatgaattgtattgtggtgctaagtttgcagttgaaggttttacagaagctttggctagttatttaactcctgcatttggcatacaattttctttagttgaacctggaggaattgccacagaatttatgacaaatgcagtacaaaaaactcaaaataaagatggtgaattagcaactggtgtatatgctcctatttttcaaaaatatattagtggagctcaaaatagagctggtgattcagaaacttctccgtatcagacaggaaaagaagttgctaaagttgttttagatgttgccacttcagaaaaccctccaatacgtattcgtacatcagaatgggcagaaaatttaggtcatttgaaaaccttaggagatcctgatggaacaaaattagtgcatcaagtacaatcttttttcttgtaaatatggcattcttgtattggactactaccctactcttttctatatttcttttcattagtgcatattcatatatttttagcgctacaacgatcgaaggtataaaagcattaggttttccagatttttttagaatacaactagcagttttaaaaactattgctgcattagttctcttaattcccgctattccgaattttattaaagaatggagttatgttggtagtgctttgtttctaattactgccttagttgctcacatagcccataaagattccatatttataagtgtattactcataattttatttgttgttttatcattttcatatttttctttccataaactacaataaaaaagcctcagtttaaactgaggcttactgttagcatacatcagacttgtacgctaacaaagtaaataatcaaactttcaattttattgtaaaactctgtaatttttccaaattcctataagttcttttttaaagaaatcgatatcacttttatctaatttagctacaagctcttttatactatctatcacttcattaataaattcatcttttgaagcttctaaacaattatgataataattacaattgtataaactatagtttgtttctgctaccaaagctgttaaaaataattctttgttatctgctaaatatgtttctaaacctttatctaggaaatcagtaaattgttcttttccactttgtcctgcacagctcattaatctggctattgcaagcttcactgtttcttcattgaaaccatatttactgataacactatcgatatctccccactgacatacttcatgatctaaatcgcaagttctaaggaaatctatataactctgaatatattttttatcggtttccaccaaagatatcatcgcaccgtttcctagaggtgtttcacaatcttcccaaattcttattccatattttccgttactagcagtatttacataatcgataataaaatctagtaattgctcatattgtacaacaattttaaagaattccatttctccatctataagcttttcctcattacatatgatctttatggtataattaaactcataaatttcatccttttctttaagagaagttaatgtagatgttaacgattttaaaatgtttttacaatcgtgtaattcaagttctttattgaggtttgttttgggaattactatttcttctgaaaacgaattttctccttccgctttacagttgatttttataatatagctcatgaaagtatttctataaattttaggcctactaaactaataccaaggagtttcatgtcataccctgttttcaggggttttagttagatgtttttgtttttatcaacgaaataaaattgattattaaatacagtttcataaaaaattagcagaagtaattcgaaatactggataattctaaagaaataactatttgtagacaacaaaaaaaggcgactttcgccaccttgaatgttttcacaacggaattatccttattgtgaattgatttctaaattgtatatcaaatatagatatttttaaatacatacaaatacggatactcgtattttataacaaatcatttcattaattttagctaataatttattttaaaaactgttacaaaatttttacatcttaacagatttaaagatttagttttttaactaattatataacctcgtattaaagtataaatgaaaaaaacaaagataactctaggtatagatttaggtgtttcctcttgtggccttgccatagtagaagaaaaagaaggaaaaaaagaaattaaaaagttagcggtacgtgttgttccagaagacccaaattttcatggaaaatactattctggtttacgagcgagtaaacatcaagagcgaacagaaaaaagaggaagtagaagaaataatcaacgatttaagcaaagacgagataagctggtaaaaattcttaaaaagaatgaaatgtatccagataataagctgataaatttagaagcgtacaaattatatgaattaagagcaaaggcggttactgaaaaaatatcgttacaagagttaggaagagtattattgctgttaaatcaaagaagaggttttttaagtaatagaaagtcgaatacctcagatgaaaatagtacagactataaagaaagaattaaacttttagaaaagaatttattaggtaaaaccattggacaaggactttttaatgaattaaaaaaggagcaaaatgttcagcaagttttattaagagaacgcacctattttaggcatttgtaccttgaagagtttgataggatttgggataagcaagcggtattttacaacaaaacgttaacaggaagttctcaatcagcagaaaataagaacactttatatcatgaaataagaaataaaattattttttatcaacgacctttaaaatctcaaaaatctttagtgtctagttgtgagctagaaactaactttataaaattaaatttaaacaatggtacactagttaaagaacttcggtttttaagtcgtaaaaatgcatccattacactgtattcacatgaatactcaaaaattaaactaaataatgatgtaattactatattttttaaaaagtatagtaatgaggatattattactaaaaaagatcttttaaatacgttagcattagatgaacataaagattactacataaaaatcagtcataaagcgactgttaaaagttcaccttattttgaagtgtttagaatttggcagcgtttaaatgatctatcatggaaagattatgatggtattgaacataagcctacacaagaacaaaaagaagctttatttaatgctttgttttataaccaatcaaatgtaaaaaattacaaaggagtaaattctaaatacaagcttaccatctcagaaattaaaaaagttttagggtatggaataagagataaaatttatttcaattattcagagcttgaggctagtagaacgtataaactgataaaagacaagttggaagaggcaggaattaacgaaagcgaacaatacctgtcttttgatttgaataaaaatgatgaaaagggagggttgttagagttatggcacattacctattcattatctactaataaagaaattagtagcacacttcaaaaacgatttaatttcacaaaaaaacaaagtgattttatagcagaacatgtaaattatctatctgattatggaagtttatcgactaaagctatccgcaaattattaccatttatgcagcaaggtgctaatttttatgatgcaaaagtagacgcaaaatacatttctgataaaaaaatagctataagagagattgttagtaagaagctaaaacctattgttaaaaattctcttagaaatcctgtagttgagcaaattttaaatcaaatggtaaacatggtaaatcaggctattgaaacatatgatttattgaataaagataagtatgaagattttgaaattagagttgagttagctagagaattacgaaattcagctaaaacaagaagtaaaattacttctgctaataaaaacaataaaaaagacaacaataaaataagagcaattttacaaaatgaatatcaatttaaaattgtaaatggtagagatgtaaaacgatataagctttgggaacaaacaaataaagaatgtttgtattgtggtaaaaacattacttgtaaagagtttatggaaggtaccgcagagatggaacatatattaccaaaatcacgctcatttaataacagtatgagtaattatattttagctcataaagcatgcaatagcggttcaaaaggaaaaaatcaaatgacagcgtatgattttatggaatctaaaggagcagaagaacttaatcgctttataacaaccgtaaatatgttgtacgataatggaagtaataaagcaaaaatatcaaaagctaaatttgaaaatttactcacaagaggtgaagatattccagacgattttgtggatagaatgaaaaaagattctcagtacatttcaaaagaagcagtaaagcatttaaaaacaatttgtttaaatacaaacacaactacaggacaggtaactgattttttaagagataaatggggcttaaaagaagtattacaagatgtaaattttgataaatatgaacatttaggtcaggtagaaacgaaaaccattaagcgtaaaggaggtgaaaaggaaattaaagtaattaccgattggagtaaaagagatgatcataggcatcatgcaattgatgctttaatatgtgcactaactgatcaaaaaatcatttataaactgaataaccttaataagctataccaatataatagagatgctttgtctacaaaagaagtagcagaaatagaagcgtatttatcagaagagttagaaggaaatacacttaatttaaaatcattttcagatttaacaaaacaatactttagtaaacctataccaaatctaagaaaagaagttggaaggcatttgggaagcattttaatatcgtttaaaaaagacaataataaagtacttactaaaagtaagaataaaattaaaaatgctaaagtacaagaaacttgggtacctagaaaaaggttacatgaagatacgattttaggagttaaaaatttaggcagaataatacctgtttcaaaaatttataattgtgaattaatagttgatgaaacaattaaaaaggaagcttataaacgactttcgctatttgataataactattatttggcttttagcaagaaatcgttaaaagaaataccatttaaaataaaagatattaaattagaagaggtagaggtaaaaaccttgacaaaaagagtctttttaaatgataagtttacaacagctcaactagaaaaaataatagatccaaggattaaaagtattgtaaaaaatagagttgaggaaaatgaaggaaaaattaaaggagcttttaaagatgtattgtatagtaatagagaaaagaaaatacagattaaaaaagtattaataaccgaagaatcaaaagttgaaaaaataagaaaaggttatgctaaaccaggaggaaatcatcacgctttaatttttataaataatgaaggagagtatactaataaagtaatttctttttatgatgcagtacaaattggattattaaacataagggaaacaggaaaacctacaccaattataaaaagaaaggacaatgatttttacgggcaatttgttttttctatgcagataaatgatttgtttgtttttgatttaaaacacactacaaatccacaagaagtaaatgaattaaactttttagatcttaaaaatagacctttgataagtgaaaagttatttagagttcaaaaaatgacaaaaaaatctgatggaagatttgaagtaacttatagacatcatttagaaacaagtattgaaagaaaagctaaagatggaaaaaaagtagatatgaaaaaactaaagggtctagtgtggagagaagaagcttcaagtaagcatcttggaaagatcactaaaataaaaattaatcatttaggagatatcattagaataggtgaataattacatgttttaagcttgcatttttgcaagcttttttaattacaactattaaaattaataaaatgctaaagagaactatttacataggtaattcatcgtacctaaaaaccaaattaaatcagttaataattcaatgcccagaaaccaaagcccaaaaaggaagtatacctattgaagatatggcattgttgttattagatcatccacaaataactttatctgctcaattattaaataaattaatgggaaataaagttgctttaatacattgtgataatcatcatttaccaaatgggttaatgttgccaatagtaggacacacacagttaaccgagcattggaaacatcagttagcagcatcgttaccattaaaaaaacaattatggaaacaaactgttgaagctaaaatagaaaaccaaaaagcgttattgataaaagagaagaagccagtaaaggcaatgaatagttacttagaaaaattgatttctggtgatgaaaccaatatggaaggaaaagcagcaaaccattattggaaatacttactagatgattttcaaagaagacgttttggtgatgcacccaacaacttcttaaattacggatatgctattttacgaagtattatcgcaagagctttaataagtagtggacttttattggcacaaggtatttttcataaaaacaagtacaatccgtattgtttagccgatgatattatggagccttaccgcccgtttgtagacaaattagttcttgaatgtattcatttatatgcaggagaaacaacactcacaaagcaaataaaagcacatttattaaccatagctacacaagatgtgtatattgataataaaaaacgaccacttttagttgccacatctataactacagctagtttacataaatgctttacaggagaaagaaggtttattttatatcctgaatttacatgagtacagataggtataacgcttatagaattatgtggatattagtattatttgatttaccaacagaaaccaaagctgaacgaaaagctgcgcaaaattttaggaaaaagttaattgctgatggatttaccatgtttcagttttctatttacatgcggcattgccctagtagacaaaactctggtgtacatataaaaagggtaaaaagtatgttacccaaacatggcaaggtgtgcatatttgaaataaccgacaaacagtttggtatgatggagatatttcatggtagaaaagaaattccgcctcaaaaaccaattcaacaactagaattattctaatttttgaatcctataaaacttaaaacctccaataaaaaggaggttttataagatttaccttgtgaatactcactaaaaatacaatttgaaatcaattcacaacaaaagtacgaaggtgcaaaggttgatcttgcttgtgaatactcactaaaaatacaatttgaaatcaattcacaacagaattaagtaaacgactaaattcttttcgcttgtgaatactcactaaaaatacaatttgaaatcaattcacaacgagctcttgttaaccaaaacgtaggaaatacttgtgaatactcactaaaaatacaatttgaaatcaattcacaactaaaaatgaaattgcaatctctggatcttgcttgtgaatactcactaaaaatacaatttgaaatcaattcacaacaataaattctatgttatactctatattgggcttgtgaatactcactaaaaatacaatttgaaatcaattcacaacataaaagcttttttcatttgctcagcagtacttgtgaatactcactaaaaatacaatttgaaatcaattcacaactagaatcccttttctatgttgtttttatgtcttgtgaatactcactaaaaatacaatttgaaatcaattcacaacagacacagatactacaattgcagttaaagcttgtgaatactcactaaaaatacaatttgaaatcaattcacaacttggttttactatttgtgttatttttggtacttgtgaatactcactaaaaatacaatttgaaatcaattcacaaccaaataacattaattctttaacgctcattccttgtgaatactcactaaaaatacaatttgaaatcaattcacaacgaatcaagtaaacctgttttatctacacaacttgtgaatactcactaaaaatacaatttgaaatcaattcacaactcaataagttccttgctaattttttcaattcttgtgaatactcactaaaaatacaatttgaaatcaattcacaactgtagtagccttcgtttgtgttgtactgaccttgtgaatactcactaaaaatacaatttgaaatcaattcacaacatagctcctatttttatataattgtcgctcttgtgaatactcactaaaaatacaatttgaaatcaattcacaacagaaatttatattacccatttggaaaaactcttgtgaatactcactaaaaatacaatttgaaatcaattcacaactgtattaaactttcgtttttatgctctaggcttgtgaatactcactaaaaatacaatttgaaatcaattcacaactggcttcctgttgttcctccacctgaactacttgtgaatactcactaaaaatacaatttgaaatcaattcacaacacaattggttcttgtaattcagatggtgcacttgtgaatactcactaaaaatacaatttgaaatcaattcacaacctataccaaataaagctaaagtcatccaagcttgtgaatactcactaaaaatacaatttgaaatcaattcacaactaccatttctttagtctctttgttatctctcttgtgaatactcactaaaaatacaatttgaaatcaattcacaacagtattgaatggagaacatttaataaacaacttgtgaatactcactaaaaatacaatttgaaatcaattcacaactgccctcattgtgataatgaatttgatattcttgtgaatactcactaaaaatacaatttgaaatcaattcacaacaaaacgtctgtaaacctttctacaaaatatcttgtgaatactcactaaaaatacaatttgaaatcaattcacaacttagttcggttaaataaaaacactaataaacttgtgaatactcactaaaaatacaatttgaaatcaattcacaacagtttatacgaccaaaaagttatgctagaacttgtgaatactcactaaaaatacaatttgaaatcaattcacaacaccttttcagctatcttttttgcaaacttgcttgtgaatactcactaaaaatacaatttgaaatcaattcacaacgcaatcatgtcaaaccattgtttttttattcttgtgaatactcactaaaaatacaatttgaaatcaattcacaacggaaggcctgagtaaaacttttcgagatacttgtgaatgctcactaaaaatacaattctgaaagcgactttagcgcttcatgaacactttaatgtaaaataacaaaaaagtgaataaatcaattcacaaccaaagcataaaaagctaatgaaagcaatacttgtgattgctcactaaaaatacaattttgaaagcgtctttagcgcttcatgaacactttaatgtaaaaaaattgtcatagctaaaaaaacaaaaaaccctgtaaaaaaataattcacagggttttatatagtggagacgccgagaatcgaactcgggtccaaacaagtagctcaagagctttctacatacttagtttttatttaattttcgactaaaagctgactaaaaacgatccacttttagcttatcttctttaatttcgaaaacttatcgaagtactaagttttctatgtttacttttatgatgcccagaaatgaaacgccgtaaaccaaggctttccgtggacatttagcttgcacaccttgtgtgccgaggcttgaatcttactataattcggattattaagcagctaaagcgtaattattttcgccatttaaattgttgaaataagtttaacgagcatcatttcagtcctcggtatgcttacaattttactaatcttgctgtcaaaaccagtcgtccccaatatgtcaaagattttcaaaattatcacaaaatatataccaatatcttaatatagactttatgtcattttttatcacattttttaaaaaacaataatctcaaaaaaatgcggatggcaaagataagaaaatactacttgtacaggagatctaaatcaagtattttcgcatacaactgttgtaattctcaacaaataccacactaattgtttaaattttacaaacaaccatgaaattcggaattataaaagaacgtaaaaacccaccagataaaagagtcgtattttctcctaataaattaaaagaatttaaacagcaatttcctcaggcagagatcgttgttgaaagttctgacattcgagtattctctgatcaagaatacaaagatgctggcttcgaaattgtaactgatctttcagattgtgatgtattattaggtgttaaagaagtgcctttagaaaatttaattccgaataaaaaatatttcttcttcagtcataccattaaaaagcaaccttacaatagaaaattattgaaggctatgcttgaaaagaacatagaaatgttcgatcatgaaactattattaaagaaaatggagctcgtttaattggttttggtagatatgctggattggttggagcttataatggttttagagctattggcttaaaagaaaacttatttgaattaccaaaagttgaatctttagcagatttagatgctgttaaagcagaattagataaaattacacttccaaatattaaaattttactttctggtacaggtaaagtggctcacggagctaaagaaattttagatcacttaaaaattaaagaaattagtgatgctttgtatttaacttctaaatttactgaacctgtatattgtatggttgatgttatggaatacgcgaaaagatctgatggtaaagttggccatagatttgagttctataaagatcctactggttatgaaagtaactttatgccttacgcaaaagaaacagatttctttattgctggtcatttttatggtgatggtgctccgtatttatatacaagagaagacgtaaaatctaaagaatttaatattaaatatgtagcagatatttcttgtgatgtagacggtccagttgcaactacacttagagcgtctacaattgctgatcctatttatggttatgatgctgcttcagaaactgaaattgattacagagatgaaaatgctattgttgtaatggcagtagataatttaccttgtgaacttccaaaagatgcaagcgaaggatttggagaaatgttcttaaatcatgtgattcctgcattttataacaacgatgaaaatggaattttagaacgtgccaaaatgacgacaaactctggtaaattaactgaacgttatagttatttgcaagattacgttgatggtaaagaataaatgaaatacgttaagaaaatactgaaatatactgtatactcattattgggtattcttttatatgtcggtatttctattcttattagtttcataacagtaaatgatgatccttcttttaatcagacaaagtttgtgtatttaagttccaatggaattcatttgagtatcattattcctaaacaacatctttctcttgatttaaatgatgagttacaactaaaacctactgataattttgtgcgttttggttggggtgatgaaaatttctatatgaatacacctacttgggcagattttaaatttaaatatgcttttggagctttatttttagataatccaacattaatagaagtttcttctcatcgatttcaacaaaaaaaatgggttaaagttcctgtgaatgcaacacaactttttaaactcaatgtgtttatttctgaaacttttcaagtaaatcaaaaagaagaaaaaatcgtacttacacaaactatgtatccaaattctaaactgtataaagctaagggttcttattctcctttaaagacttgtaatacatgggtaaatgatggttttaaaagtagcgggatgaaagcttcatactggactttatttgattttggactgctaaacaagtataaaaaataatggaaaccgataaacagtttttggttgatacagccaatatgcgaatgccttttggaaaatataaaggcacatatttaattgatattcctgagtattacatggtttggtacaaaaacaaaggctttcctaaaggaaaactcggacaaatgatgggactcgtttatgaattaaaactaaacgggttagaagatattttaaggaaaataagaaaataaaaaaaggcgttttaaaacgcctttttttattctttaactgtaataatttagattgataaattatatgttaatccagcagtataaatttgagaatcacctaagtttcttccatcaattactctaccgtaaccaacacttactcctaatgaaggaataatgtttttataaacagtaactcctactctactataatctacattagtttctgggaaattccctctaaatgctggagaagcgatatctactccttcttcagagtttaaataatctgcccaagcttcaacataaataaaactactagaatatccgattttaccggttgtaacaaatgcatttggcacaccaaaatctccacctggagttaaatcgttgtctgcatctcctctgaagttatatccagctaaaatagtagagaaaaaacctacatctgtgtttaaatgtaaaccagctgtaacatcaataccaaatgctccactaccaagacttaaaattccgttaggttcataacctgttggaattactgctgtaacacctgtaatgatgtttaagttcgctttttcaaaattaaatttgtgtgcatttaattttaaagcaatagaaatatcttgtaaacctgaaatagagttttctccatttataggatctcctaaaccactagtattatctgcagaaataaaaggtaaattaaccgctacagataaacgatctgtgattccatattttgcgtacaaagagaaaatattttggttaatttcttcatgtacaggaactgcatcgactttttcttttcctaaatagaattcatcaaactgacttctagaataagaagctgtcacagaaagtgatcctttttttggtgtgaaaccatctaacattccttgtgcgtttgccattgttgataagcctatcatccctaaaacagatagtgctaatcgaaggttctttatcattatttaagttttaaaatatcggtctttggtcgataaaaaatcgcttcattacaataaaaatccttttttaacatctatttatattttctgtaacactaggtctatttatcatttttgcattgaattctggcaaacaacactttaactttttcttttggttttaaagaaacttaaaaaagcataaaaaaatatccataaaaacataccaaatcctattgttacataccaagctttgggtaatttaaaactatatacagttttttctactaaagaaattggtgctgtaactatatcccaagaattgaaacgtaaaaaacgtcctaaataaattccaaagccagaaagaaaacaaacgattggtataaaaatatctgcaactttcaaactccatttttttataataatctggtatacatcttttaatgttagcaccgttatcataagacctgttattgccgaacaaaacagaaacaacaaatcaaaccatcctagtggattctttctacttgtgtctaaatgaataaaatcggtgataatatatggagcatttggtaagaaaaataaccaaattacaaatagtactatttgtttcatttttgacttattttcaatgtctcttttaaccgcatattctgtgataaaaaacggaattaatgccaaaaagatattccagagcataaatgtaaaaagcaaattttgtgtgatttgtactctcagtaaaactaaaaaagtacacattatcactagcattaaaacgccgttctgctgtcttgttaagtattttgtaatcatgattattttttaagactcgtattgagatactcttactacaatattattttctaattctacacaaagaatgttgggatcaatattaaataagccaggaatgtgaccaatagtatacattattttattattaaaaacgtaaaactctttagttcccaataattgaatcacttcttgcttcgattttccaattagtattttcttttctatgatatctctagacatttgatatcgctcaagaacttctgtatcccagactttcttattaaaacttattctaggataatatgaataaatataaactgaaaatagtattgaacctacaagtacaagagtactaaatgaaatgaaagttattttataaaccttagattttaaattaattgacaataaagtcttattatattttaagcttaatattactgataaaattaaaattataataatatatatcatgcttccaattttaatcttccaacaaacatagaataaaaaaaactaatccataaaagagtaccaagtacagacaaaaacatccctttataaacacaaaacaataagatacaaaaagttactattagttgaaatccataccaataactaaagttttttaaacttaaattataatctttcattgaagttccagcattaaattttaataatagaccaatagtattcaataaaataaataataataaccaaattgaaaatattcctagatagaacattggaattacaattgtatcagcccaatacggaaaacattctctgccaaagtctataaataaatgtatatatattgcactaacttctactataaaagctattagtcctaatacaaaaattgaactctttttagtataaatttttaactctctattttccgtcattataaataataaaaacattgaaagtactacagcagtcattccataatcaaaaagataatatttaactgttaaatgttgtttccttaattcaataaacaatgctgttttatttgaatttaaagacgatccaagttttatatactctttttgaaataattcataattatcaaatggctctaagagaagtgaaaaaattattacagatattccaataattattatcactaacaaacttttttcaaataacttcatcttattgtttaacttaaattttaagcggtttttactctataagtttcaataaaataaactgtgatgattcctaacgtatacgctattaaatctccaaaagaaaaagtacttcctattactattcgcattagtttgttatcctgtacacctaaaatttcaactatcttgaaatactgtaatatttcaactaaaaatgaaaaacataaaactccaatagctatttttttaggttcagtgtttataaatgattttacaaagtagtagagtaaaatcacgactaagaaatctccaaacgtatgtcttataaaccctgatgtttttgctatcactaattctactaaaaagagaattatacagattataaaactcttaccatcgaaacgaaatctattcttatccattttgccaatctatttttcttgaagtgtacattactgatgctaaaattacaaataaccctacactacctactaataaagcatagttttctaactgaataattacaaaaataaaagtgtatagtatcgttaacgaagttcctatgaaaagaggaaattttaatacttttaaaattgatttcgagtataaagaaattaataaaattactgctgtagatgctattaaatatgcatttaaaaaattactgtgttccgatattgaaattaacaaagtataaaacataactaaagcaataccaatcattaaatattgaaacgggtg

SEQ ID NO: 2817 - DNA, 23645 bp, synthetic construct
  source 1..23645: mol_type = other DNA
  misc_feature 1..23645: note = Synthetic
atgacccggctcacttgctcatcccggtctatccgggcatgtagcggcacagcttttaaaaaagtaatgccccatacgcaggtgatcatagcagcttgtatcattccataaacatgaacctgctccaacagcctcaggccgtgcaggaccacctgccctaccataagcggcagcacaataatcgtgatcataacggtatatttggcgtgccactttcttaatcctgccctgtcataataattaaagccgggataaatgatcagctgaacgatccagataagaacaacaagaccaaaatcaatactcagaagaaaggtatgcataggatcaaagttctatgttccggattaaaaattctacgtcaacgttgaacattgaactttcaacttagaacactaattgccaatttatcgctaatttaaccgccgtttaataataaccataaaacacgcctctatgatatacagacaatttggacgcctcgaatggcaggtaggtgagatagggtatggcatgtggggtatggcaggctggaccggttccgatgatctgcaatcttcaaaatctctggatctggcggtggataagggtgtcaatttttttgatactgcctgggcttacggagccgggcacagcgaaaagctgctgggtgaactgatcaaacgacatcccgggaaacgtatttattgcgccacaaagatacctccgaaaaacagaacatggccctcacagtccggttttgaactgaacgatgtatttcctgcggactacattcgtgaatacacggaaaaaagcctgaccaacctggacctggagtgcatagacctgatgcagtttcacgtatgggaagacaactgggccgataaagaggaatggcaaagaactgtggaagacctgaagaaagagggtaaagtgacatcattcggggtgagtgtaaaccgctgggagccggacaactgcctgcgtacgctgaagacaggccttatagatgcagtgcaggtgatctataacatatttgatcaggctccggaggataacctctttcccctgtgccgcgagttggacattgctgttatagccagggtaccttttgacgaaggtacactcaccggaagtatcaccaaagacactgtttttcctccagacgactggcgcagcacctatttcgtaccggaaaacctactggccagcgcagaaagggccgaccggctcagaccatggatacctgaaggtatgaccatggcagaaatggcgttgagatttatactggccaataaggacgtggctaccgtgatccccggaatgagaaaagaaaggaatgtattggccaataccgccaccagcgatggtcatggactggaaaccacactcatgaacgaactccgcaaccaccggtgggaccgtatacccacggagtggtctcaataacctgaaagcaaaacactatgaataaaaggacctttatcagaaaacttgccggaagcagcgccggagtagcgctcatgcctacggtaccggctatttttactgcctgtaacacaccggcgaaaaaagaagaaagcacaacagaaaaacaggccattgcggtcgctccatggcattttgagatatccctggcccaatggtcgctgcaccggaccataagggccggagacctggataacctggactttgcagcaactaccaaacaggaattcggtatcagcgcggtagagtatgtcaatcagttttttaaggataaggcccgcgaccaaacctacctggcagagatgaaacaacgggcagacgatgcaggggtaaagagcctgctcatcatgatagacggggagggccatcttggggacactgatgaggcagaacgtgtaaaagctgtagaaaaccactacccgtggctggaggctgcgaagttcctcggctgtcactctatccgggtgaacgccgctggtaatggaacaactgaagaagtaagcgccgcggctgttgacggcctgggacggctggccacactcgcctcggactataacctcaatgtgatcgttgaaaatcatggaggttactcctccagcggccagtggctgtcaggtgtgatggcagaggtgaatatggacaactgcggcacgctgcctgattttggtaatttttgtattcaaagagatgaatcccgtacctgcgttgaggaatacgaccggtacaaaggagtgaaagagcttatgacatgggcaaaagcagtaagtgccaaatcccatgactttgatgagcagggcaatgaagtccacacagattacctcaaaatgatggagattgtgaaagatgccggttacaaaggctacgtagggatcgagtatgagggaaaacaattgggtgaaatggaaggcataaaggctactaaagcccttttggaaaaagtgagaacggagttgacaagttgaccccgtttttccgtttccggttatgtttctctaagggttgccggttgcggatcgcctcataaccgggcaacccgcaactggcaacaaaacaatctacattaatttcagattcagggacatgaacatattcctgccgggagcaaaaatgggctgcggctggtttccacgtacagaacgattcaggtgttcataataggcctcatcaaaaatgttttgcaccccaagagtgacattcaacaatctgttgatctcataggaaaccctggcatctactgtaatgaaagaaggagtcactgtttccccaaactcatcggaagttctgccttgcccggctacataacgaaacatcacctcgggatgcagtttgttttgtaaatagctgcctgaaagggtatacctcagatcaaggggtgcaatttccggaaggggttcattccgctcaaggtcctggccataggtataggctatattgagctgatgctgtagccccttgaacaacacctgaccccagcctagctcaaagccggtcttccatgcctcgtctatgttggtaaattgccgcacacccggactgttgggcaaacgggcggtcagggtagtatcgatcacagaagagatgtaatcctgcagccaggacgcaaacaaatccagattgatggtggtattagcgtttttgtattcaaatgtcaggtccagctggtggtttgcctcaggatccagtccgggattgcccaacatctcaaagggatcctgccctacaggaaaataattgataaaacgctctgttaggctggcgcttcgctgtgcacgggcaagccagagcccgacggaataatggttatcgatgttctttatactcccaatgctcagactgggattgacctgtgtggtttccgtgtcaggatagacactggtaaactcttcttctgcctccgaaatatgtgcgtcattgacctccagcctgccggaaaaaataaattgaaggctatttttctgcaggtgatactctgcaaaaagcccacttcttgtaattcttccgttttgccaggcattgtccgtaaaaacccttccggcattcgggcctgccacaaattcacgtacacgactgccttccgcttcttctacccgcaggtcagcgccggcaaacaacgttaccccctgtcgtttccatactccttcggtccgcgcaccgtaggttttggtctctgccgctgtttcggcattcaccatacgagggtccagtaacttgagatggttattcatgaggtggtcgacaaaagtcccgtatacggtggtgttccatgattgcaggaagtcgtggttaaatgtgatatcatgccgggcattgagcatccacgtgtcgtcctctctcaggtccattggtagtgcaggaaaatccacatccctggcaagattacgtgtgccggaaagggtcagacgctggtcaggcaacagcctgatcccaagttgcgctccgaagctacttcttaaaaatccggccggtacggtattatcattaccatcctcatagtcatcgccctgtgaccatgagccaaagatgcccagatcgtagctttctcctctgaaaccgatcaggccttcatttctgaatatattaccattactttcccacgctcccgaaagtctgccataggtctgaaaacgctctgaaaaacgagcagaagctggtacaaaattgatcgttccaccaagtgaactaccatagcgcaaagcatggggtcctttcagtatctctatacggtccatcatattaggagcgatctgactggtaggcgggtccatacggttgggacaggccgctgtggcagattgggcgccattgaccactatattgagctgatcatacttaaaaccacgcatgaccggatcaaaaccatagcttccactcttgcgaatgctgttgatgacaggtatctggttaagaatagcccctccgtcatgcgccatcctgtccttgtagtcgagttccagcgtttccttttcatctgttttggcacgtagcgaaatgactgttaccggataaagttgcaatgccaatggcgctctgtaaaccgttccttcctgtattaccgctcttagttcctcatcacttagcttccattggccgtaggtgatatgcgaaagggtcatggcctcaccggaggtgtaaacaaattccaggtacccctcatcgtcggacaatccggactgtagtgcgtattgatagctggcagcagcaatgggttgatcagaagtggcatccagcaatcggatcttctgcagttgctgggcccgtagtgctgccggattgggccagcacaaacaaaaaagtatgtattggcaaaccgccaatagcgttttatttattttcatcgtgtttgttttttaaagttgacatagagaaaaaggagcctgaggttgtcagactaccttacaggatcatcctatctgtcaactttggggcgggcggaacaggagtgaggaataatcacccttccatttattgtcagaaatgatttgaaatgagcgaagtatttctatccttccatacacgatctggcagggagtattcaggcagaagggggaaatgggtttgttttcagttttaggggccggcagagtttcatcttcaatatggttttcccaaagtcttgccttcagaaagcaggagcccatgcacacggtaatggtctcaaagcgattaacacaaagattctccgctatatatttctgatctattttgaaggagacatacacaacagcatccttcaggctgaccgtgagtataagaaagataagcagtatggtaacagatctcctcaattaagccgcattaaggtacaattttaggaatatgctaccgacccagaggagatttatatcataatgttatgtgacagagatcattgtcagtatatttctgtacctctgttcattttttacatccaaaactgtcaggtcaggaaagcaggtttaagaaacaagtataaagtattgtccggttaaaatccggtatcctttctgacaaggcgctgaaatttgccctagttttcggcctttaatgttatcaaccagacttgttatgaataatgaaaagctcgtccgtttttttgaattgctgagggtttgtgaacgcatacaaaaccggctcctgacccaggagaggaatatgcagcataactacgtgatcgtaaatatgtacaggctggccaccgagcatcctatgcttcctccataccggcttttgacagtttacagaaccctgttgaaatcatcctgcacgttcggcagtgttgagatcccactggacgaaaaaaatgtatttgttgcccgctcactgtgttttcaatgagtaatcaatcacaaagatcgctttagatcctgttgaggttcagtagagtattttggataaaatcaaacacagacaatgtggataaccgctttacaaagtgtttcttcctgatcaacagtcccaactgatatgtacagcagtaatgtaaaaataaaggggtaaagagtcgaatcctgggttggggggtttgtctggcgtctgtctccactactactcgtcatagaaggagtcaggcgcacctcttttttgatcaggatcagtgtcagccgttgtttttcacagtatcaaacagttttttcacctgtaggtcaccaaatccgtagatattttcacgtttattgaattccctgaaaacagttccgaagtcgtctgtttttaattccttcattatggccgttaaagactcaatgggtctcccggcattatttgcggtaggtattcttgccatgtgggcctcaacagcaggaagaatgaacgggtacaattccctgagttcattggctgtattcatcagtgcttccgtgtcgcccttttgataggacctccaaagacctgcaaccttgccaggttccctcagaattattctgtttttataaattgaaaccaactcagattgatttagcccggcaaaaccgtattgtgtatgtacctggggtctgaccaaataaacagaagtatcggaatctgtgatcttttccaacagacttgcaacaaaccaaaaattcacctggcagaacaggtcatcctcgaaccataaattgacggatgactgctttggaatagccatgatcttttcaaattccgaaaccgcatcacgataataatcctgggtggaatgaccaccataaaactcagcgataaacttagctctgatctgaaagagctcatccaaattgtcactctttacatctccatctacaagacattcacgggcaacgataatttctccttctatttcctcagggaactgttcttttagagcgtcaccgtttaaaatatgatattgtttacgcatacatttcaaattaccggttacaaatacagtgttttatgtcatgttcgcccaaaggctaacggatatcagtagttaaaggtatttacagaaagttaaaaattcaaccggagttgatcagagggtcaaatatgccataaaactccattggcatgatgctttgacaggccattttatatttcgtttcattaggttgtatcgtggcgtttggataatgctttcaaagcttccattgcctttttcctgtccctactatggacaaaaatgtgatcatgataatagcctgctatcacattgcaactgatgttctgcctggccagttcgcctgaaaaaacagccgtcagccctactgcctccaatgatgaatgcaccttcagggtgatccatgaagcgatgaattcgtatgagagccctagtttgtccgctttgtctttttccaggatcaatgttgttccttcttcttcctgaaattcgcaaatggtatcctttcgttcaatttcctttggatcattaacagtacaaaatacatattctccgttgttcagaaccggagacagcctttttatgagattcgtcaattcagttttgttattcatgatctattgatcagatacttcatgagtgatactattgaaataaacaagtgccggactatcgttcttaatgatggttaatcgatcaagtccataggccacaagtatggaggaaatcccgataaagccgatccaatctgtcatattcatttatgaaattgccttagcctggccatttaaatcccttaacggctctttgcttttgctgataaactgctgtttttttctttgaatttgatcgatatgccaatactatttctggaatcataatactgaactccgtgctgagtaagagctctttttcatacaactgaacacgaaataccgatgcctgaaggccggcttattaattgagatgttttgtgaggtatagctgaatttttttcaactacaacccatccataaaaatactatcttccacttatggaactcaaatatttcagattgatcaaagccattgctgaagaagggaatatagccaattcatcggaacagctgttcctcacacagtcagcgctaagtcatcagcttcgtgagttggaggatcggctgggttttaaagtgttcaaccgaagcagaaatcactggcgacttacaaaagaaggagaagagctttataaactggcaaatcagctacttcaaacgatcgaagatggttttgccaacatcaggaaaataaaggaaggagccaaaggttcaataaaggtgagcgccgaatgtcagtctttttttcacggtctccccgcctttgtacagcggatgggcatactttatcctgagataagcatcgacctgaacatgggtgcgacccaccaaaccatatcgcagctgttatcacaggaaattgatgtggccatcgttaccacggagcctgcatcggaacagcttgcggtgaccagagtagttgaagatgagatactcgtagtcatgcataaagagcattatttaaatgaacagcctgttcttgatgccagccatttttcagacctacacttacttattaattcctttcccctggaaaatgtatcggttttcgagcattttctaaaacctaacagagtagtgccctcaaaagtctcagccatcccttatactgaagtggctcttgagctggtgaacgccaatatgggcgtgatgtgtttgccaaaatggaccttaaaaccctttaaactgtcagaggatctgactttcaagagaatagggaagaacggcttgaaaagaacacattacctggtaatgcgcgaggctgagcgtaatctggaatattttgcaaatttcacttcaaactttctggaggattttagtgatgtaggggggtaggaagatgaggatatccggagatgatgagaaacttagttaaatccttaactgtcagattaaattgtagctacttcaggttatgcctgtgctttatcgccatttgttgtaacacgtaattttatttagtcgttttcatgtatcaaatcataataattcagcagatcattgatcatggtcgcttcaactccactacaaaaactatgcttataatcaactgaattgaaaagtgagccaattcttatgtattcacttgaagtgcaacctccataatcttcttttccaatttttgttttcaaatagtctttcagagagtccattttaacgttgggtacccaatgacttctgcctgtccttttcgattttaacagatactcatcattctttctactcacagaaaagtactcttcgcttccaccgaaacatccccaattttgaatctcaatatcaaaatctgacatagagaacactttttctaaagtttcagggttgttttttattccaggtagacaagaataaatcaatcctattgatattatcaaaaacagctttttcatatgtgctataacttacattggcaaagtagtagcctgggctttagagcgcaaagttttgcggggctattacgtctgccttcagtttttcagccctgtcatttttttggtattttttgaaatccgtttaataaaatcgctgattttccttcatcaaagaagcatccacacagctatcaggactccaaatattcgagtacagtttaatccccgctccatacaatgcatctgtgtttgtaagatgtttaaagtattgacctggaatccactccagagtatcaaagccttgatcatgtgcatcttgataagctgcattttacccttcttagagtcctggaggaagaaaaaaacttattccccgagctctcacttcccgattggcccgcgaccagttaaagaattgtcaatcaagcttttgaatacagtaattatcaatgaatgacttaaggtaatgaatagcttaatcgatgaaaaatgcttaatttttcacaaaaaaaatgaaactgtgttactgtttcacttcaaatagtaccaaacattgtcaacgcatggttagtttgaattgcaattgatcagaacagcacacctttcttcttgcagaaggtgaactgccataaaaaagtcagttacaaaaaaagcgaccgaagccgctttgcatgttttcacaacggaataatccttattgtgattagctttcaaattgtatctgaaatatacattagtcatatgtaaaataaaaatgaatgaaaaagatccttggcttagatattggtgtatcctctgtaggcctggccatagtagaggatagcgccaaaggaaaaaaagttttaaaaatggcatgccgtgtagtgccggaagaccccaattttcatgggaagttctactccggcaatacagccagcaagaatttggccagaacagagaaaagaggtattaggagaaataatcaacgtttcaaaaccaggagaaacaagctttatgctttactgaggctacacgatatgtttccggacaaagcattatttttattagacgcatatcagctatatgggttgagggcaaaggcagtcgaggagaaaataagcctgaagcaattggggaggatcttaattttgctgaaccagcgaagaggttttttgagcaatcgaaagtcggtttcggaagaggaaagctcctcggcttataaagaccggattgctgaattggaaaatgaccggtccgggaagacgataggccagcaactgtaccaggaattacaggaagcaaaagaaacgcagcacattctcttaagagagaggacctatttgagggccagttacgtagaagagtttgacaggatatggaataaacagcaacaattttatcctgaactactctccggtggccctggtcaaagtgataacggaggtaccctttatgatgagatatgtaacaaaacgatttactggcaaaatcccctgaaaagccagaaaggtcttgtgtcagcatgtccatttgaaaagcatcataaggcggtggctaagagctctccgtattttgaaatattcaggatatggcagaaggtcaatgaccttaactggaaaacggaaagtggtgaggaacagacgccttcagaacagcagaaagaggcactttttaatgcacttttttacggtaccgggcttaataagcactataagctaacaatcacggcgatcaaaaaaatactggggttctccaggaatgaaagagtatacctgagccatacggaattggatggaagccgtacttactccatgctgaaggctgccttgatccgggcaggtgttgatgacgcggagcaatatcttttttttaatttggatcagcacgatgaaaaaggagggctcttcgaattatggcatcttacctattcattgcctgacgaacagcaggtggtcagcagtttaatgcggcgcttcggctttactgaagatcaaagccaaaccatagctcgttctgtaggctacacgtctgactatggaagactgtctacccgagctataagaaaactactaccatatcttcagaaaggactccaatacagtgaggcatgcgatgaagtaggttatgatcacagtggatataaaactaaaattgaaattcaggacagacttttaccggtccgtcagaatagtcttcgtaatcctgtagtagagcaaatattgaatcaaatggttaacatggtcaacatagccatagatcaatacggaccatttgacgaaatacgtgttgagcttgcacgcgaattgcgaaataatgcccaatccaggaaaagaataagtgcacacaatgcaaaagataaaaagactaatgatagtatcaggacgtgccttaaagaggaatatggctttaagattgtcaataaccgtgatataaaacggtacaagctttggcaggaaaccaagcagcaatgcctctattgtaacaatcccataacggttaatgaatttcttcagggtcaggcagatattgaacatattttgcctaagtcaagaagtttcagcaatgcaatgaataattacatactggcgcatcgtacctgcaataagacgaaagaccaacggacggcgtatgattttatggccagccttggagaagaacgacttcatcagtacatagaaaaggtaaatgccttatacaaagatggcgccggcagtattagcaaggtgaaatttgagaacctgctctgccgtggtgaggatatcccttctgacttcgtggaacgaatgaaaaaggattcacaatacatagccagagaggcggtgaaactacttaaaaccgtttgtgaagctacctatactactacaggccagataactgacttattacgaaaagaatgggaactggaacacctgctgagggaaataaatcttgaaaaatataagctggcaggtcaggtggagatgaagaactacaagaatagccggggagaaactgttccttatactgccattaaaaactggagcaaacgggatgatcacaggcaccatgccgttgatgcactgatttgtgcgcttactgatcaaaaggtcatattccggctcaataacctcaataaaatatatcaatacaaacgaaacgagctgaccggggaagagctggcttcatttgaaaaggaaacaggaaaacatcttgacctgaaagaatttatagatcagggggcttatgaatttcaatgccccatacccaatttaagggcacaggttaaacaccacctggaaaacctgctggtctcttttaagaaaagtaattccaaagtactcactccaaacattgatcagaacaccggcaaaaaatactggacgccacggggcaggttacacgaggagaccgttatgggcaaggtgaaaagaatagctgccaaacctgcaaaactggatgatagattcagacaacatgaggatattgttgacccggccattaaggaactggttattcatcatctggaacaatatgactataaccccagggtggcatttacagccaaaatccttaggaattatcccttacgctataagggcaaggtactgaaggaagtcaaggtgtatgaaaaggtaggcaccaaacgtatagccctcgatgaaaatataacccatgcgcaggtcaaaaaactcacggaccaaaggatcaggcacctggttgaacgtaggatagcagaggcaggaagcattaaacaggccttcaggaacctcgacgaaaatcctgtatggctgaaccaggaaaaagggataaaagtaaagcggatcacagtttttgatgaaaacacggtcattcaaaccagtgtaaagcgggatcactttggcaaagagctattaaaagatggccgccccgtacccaccaataatgtggctaccggtggaaatcaccatgctttggtctataaaaaccacaagggcgattacactattaaagtaatctctttctgggaggccgttggtataggactggccaacattgaacaaacctcaaagccctacccggtcgttgaccggtcagaccatatcgaatggggggcgttccggttttccatgcagatcaatgaccttttcgtattcgatctgaaacacagggcagattcacggaatgatgatgaactggattttctggaggttaaaaaccttgatcagatcagttgtaagctgtttaggatacaaaagatcagcgtggcgaaaacaggacagacgatcattgatttcaggcatcacctggaaacacgtgttgacagaaaagatgccaatggtaaatccatagacgaagcgccgctgaaggggatcacgtggaatcgtatttcaggaaagaaggacctgggcaggatcacaaaaatacgactgaaccacctgggtaatattattaaggtaggtgaataaacctgattaccatgatcaagcgtacgctttactttggcaacccggcctatctcagtacaaaggctgaacaacttattgtgcaattccctgatgatcagaagcctctcgcaaaggtccctattgaagatataggggtgatcgtactggaccactaccggcttacgttaacccacggcctggtaggtaagctgttaagcaataatgtggccatgatcacctgtgatgaaaagcacctgcctcaggggcttatgctcaaccttacaggcaacaacgtacagacacaacgtttcaaggcgcagatagaggccggcgaggctcttaaaaagaagctctggcagcaaacggtgaaagccaaaataatgaaccaggcctctttgctccaacagcagggcattgccactgaaaacatgatgtactgggcgggcaaagttaaaagtggtgatccggaaaattatgagggaagggcagccgcttattactggaagcatctttttgaatccgaaatagatgattttacccgcggacgttttgacgccgagcccaataacctgctcaactatggctatgctgttttacgggcgataatagcccgcagcctggtgggttcaggtatgttgcccacattaggcatacatcatagcaacaagtacaatgcctactgcctggcagatgatatcatggaaccgtaccggccttttgtagatcgtatggtattgtatatgatcaggaataaagaggatatctatcaactcgacaagtcgatgaaggccgagctgctacagttacctgttcaggatgtatccatcaatggcaatacaagtccgctgatgattgccagccagtatacggcctccagtctcagtcagtgtttcggagacaacacccgtaaaatcaggtacccttcctttgaatgacatccgatcgtttcaatcaatatcgcatcatgtgggtgtttgtattttttgacttgcctaccgagaccaaaaaagacaggaagaactatgttaagttccggaaaagcctcgaacaagacggcttcaccatgttccagtattccatttacatcaggcattgtgccagccgggaaaatgctgaagtgcacattaagcgggtccagcgtagcctgccaccattaggaaatgtatgtatactacaacttacggacaaacaatttggtatgatagaactgtttgtaggccggaaagaggtggaaaaacctcaaacaccccaacaactggaattattctgaagccgggtaaaacataaaccgggcacttgttttatcccggttttatgttttgttcccatcgcttgggaggcacaagtgtatgattatctgagttttagatcatactatcctgtgctaaattacaatttgaaagctaatcacaacttaatgatttcactggcattgattggccatcctgtgctaaattacaatttgaaagctaatcacaacttattggtttgctcatcattatgcgttttccctgtgctaaattacaatttgaaagctaatcacaacttgaccaacattgccagttcatagaactgcctgtgctaaattacaatttgaaagctaatcacaacccttagtgttgcagggcatacaggtatcatcctgtgctaaattacaatttgaaagctaatcacaacggcagtgcagcaggtagtgctgatgtgttgcctgtgctaaattacaatttgaaagctaatcacaacagcaaatgttccagccttccattccgaatgcctgtgctaaattacaatttgaaagctaatcacaacgatagaggaaaccatgactttatcggttccctgtgctaaattacaatttgagagctaatcacaactactacactaaggtagagataattaagatccctgtgctaaattacaatttgaaagtcaatcacagcatctctatccagtggtaaaagtagtcttgtgttagatacaagcttctacaatccatgaaaacctatcaggttctggaaccggataggttttcaaaaacggaaaactatatatccacctcatccacggcttccacggtattgttgtttgccggtgttctgtagcggtcccttttggcagcagagtcataaaacacgtgctcggctgccgcgttgtaatcccgggtgtgcctgtgaagttcgttcagcttgcggatcctcccttcagtatccaccgtacggttgcctttcttcttttcctgcgcgtcattggctgctctgagggctgaggcctgtccggctacgctgtccagcagggtaaccggcgcttttgctgcttcgagttgagtacggtagtcattaacggattcggccagcccgctcatgaatctgatcagggcctcctgactgtcagcgatcttgctgaacctgccgatgccgaactgccgctgtaccgctttcctgccgggaaaggccttggccacccagtagcgcagctgaccgtacagctttcgagcgttttccatttcctcctgcaccttttcagtgtagcctcccaaccggctcacgttcacctcatcgcccccctcgctcaatgcccagtcggtcagcacctgcatagcatcacgctttgccgcccccaggtcctcgtcaaaagcctcaaaggcagacaggtcttcctgaagatagctcagttggtcgctggcatactgaattaatgtttcatcggagtaattataatttctactaatcataggggtataggtttgttttgtcgccaaattaagccacggggacataacttcacaatagcgaggcacaaattttcaagggcagggctggaaatgtcaagggcagtgtccgcaaggttgagggcatcatccactaagccgggggacacgtccacttttttgaggggagtcctcaccagatcgagggtaatattcactatgcggagggggaactccactgtgaggagtgcatccctcacaatttcaagggcgcttattaccagcttccggcgtaaagcggctatggcagaggtagtagcaacgggctacggtgcaggagcagtaaggtcaatattactaatggttaattgagctttaaaaatccattcgaagtattcgctcttatccgcttctttacttacatcaaagggacactagtttttagatccgggtttatcagaaaagatttggagaagcttcaatccattttccagttcttctttgatctgctcaaacccaattacgccggacatagaggacatatccaggatatattgcttgcacaaggtttttatactgtcttccaatactccgatggctttactatcggcattttcttcttttaaaattttaacagcagcaatgatggaggttagcgtatctttcatttaattgatgtcttggtttaaaactttacgaagataaatatttgatactatttttccagtgggcgatagtcgtccagatataacaggtgcctccggactcttttaatatccacaaaaggtatcggtttagcacatcagtttcaattgataatttagaggaatgtgtcatatcgttttgttagccttcgttgctaaacaaattaatgtattctctaaagaaatagaccttacctctttttcctcctgttacttcatgaaggatttttaagttttccatttcttctatcagtttataaacagacggcattgataaacccgttgtctctttcacgttacgggcctgaattattggatgccggtataattgctttataacagtgctggcattagcggaccggctgcccaaacgttgcaaacgtgtctcaacgtcctgttgcagtttaaatatcttgtcaaaagtggatatactgtttttggctgtttctatcactccgaccaaaaagaatttaaaccactgggtaatatcgtttttctcacgaactctcatcaggttgtcatagtatagcattctgttcctcacaaaaaaatcagacagatacaagactggtttcttcaaaattcttttttcaaccaaataaagtgttatcatcaacctgcctactcttccattgccatcgaggaatgggtgaatagtctcaaattgataatgtatcaatgctatttttaagagttcagggaaatagtactcctgattatgggcaaagttttccaggtcacccatgtattcattaattgaggaatgcaccggggggatgaaagttgcatctgcaatacttgctccacctatccaattttgacttgtgcggaattccccgggtaatttatgtttacctctaacgcctgatagtagtgttttatgagtttgtcttatcagtcgtgatgaaaatggtaactcttcaagcttatgtatagcctggtttaatgctgctatataattttgaacttcttcccaatcatctcgttgttcttctgaaatatcttctttatcaagtaatgcttcttcaatgtttgttttggttccctcaattttactcgattgggttgcttctttcagaacatgcatgctgatgaacaaatcgatatttggaatatattctgaatacatatccagtcttcccagttgtctatcagcctggcttaacaggttaagtaattccatattctcaattttccattttctacagatcttctcaggctgaaagctcttgtaagagccttgactgatataccttccagcaataaagtttagcatgctttcttacctgtttaattaatcaaagatagctcttaattaagaaaaatgtaaaaaaattaaacaaggaaaattataattaagaattgttaataaaaattaattagagagatgtctaatgaaggccctgtatcttttagtaccagcctcgcggcgatcccaaaaagaggaagtcatttatcacaagtaaagtgcagaacccgattacatggttttcggtgtgttgggtgtgggttgacattattttttggatcaggttttcccaggtgtctcggagttctctctgagaaaagctaaactgcgttcaatgcagtttagatccatttagctactggttttgtcttaatttttctcgtgcatctcatttacagtttttgatgatacaccttgtcttccttttttagaacctttcagtaagtcaaaaaaggaattataaaagtgctcatataccttttatttttccttcaaaacatgaagatcatattcgcgttctctggcttttctgttgtttattgagactgctaatgcagaactgccataataactgcaactatttcggaaattaagatcttattttctattttctctacataccaaataccccaagcgaataatccaccaggcacagcaaaagaataagcatccataaatattaaagaaaatcttttttcatgtttcttacttatcgctaacggtcaccgtgctaatcagcgaccctgtagatcagcgctgtctcatcccggtgtgctttgggattgagcttgtgcaacagccggtcaaaggcagagggctcgatggttttttccagtacaaactgcttatccgaaaacaaaggctttaaccgctcctgccgctgctccagattttccgtgcccttgaatataatgtagttcggttgcttttccaccattagcagctcctgttggagctcttccgtgcttttatccgctcctatgctaaaaacaaagggaaatccattatcaagatatgttttgtccagcttccactcattcatacccagtatattacctttttcaaagtcggaataatccgctgctattctgcccagataatacaccggcacctgtttcaccgacccgctgctgctctccacgatcaccgatcgtacatcctgctttttggacaggtagtagataggctctacccggtcctttttggtgaaggtaaatgccagggccagcgcagccagcaggttagcagaccagaaaaatttccatagtccgttctccagccgcatattttttgaccaaaaggccgactgtgcacggaaccggttccatccgatcgttcccaggatcaccaggagcggatacatgggcaggataaagcgctcctgcttgttgggaaaagccgaatgcgctatgaaaaagacaagaaccgctaaaaagatcttcggctcaattttccacgtacgaatgtaaccccacatcagcattaaactgaccggaggcaccagaaatccgaaagtagtgagcatgaatttgaagggtgatccggtaatgtagttataggcattgtccacattatgcgtaaaatagcctatgatgtactgaaaagggtattcaaagaacaggtaatccggtatccccacgatgacagccactatggcaagatatccgagcgtgaataaaatgctatcccgtatctttttttcaaacagcaacaccagtccaaggccaccggcaaacaaaatggtatgcatacgaatggtaaaggccacaccaaacagcaggccggcaattaatgccacccacgggttgttatttcccgcacgttcattttttaatagaagataaaagccggccagcacgggcacaatacacacgatttctgccataaactttacacttaaatagggcataaaccatagcagagacaggatccagcctacaagtgcagcatctttggcagaagctatcagctccgtaatcctgtaggaatagtacacaataagcagagaaaagaaagcatgcaccagccttagaaatgtggttttaactatggggtcctgaacacctactgactcagccagccagataaaagcggcattgatgcctgcatacagcatgctatgcttcggcggcacaggtgattcaatccagtgtggaataccgtacgcccagttctgggccacccttattacacaaaagtgatcgtcatgaaaagcatatccctttgaaaaaagagctgccagtagtctgaaaacaagtgctaccagaagaatggtctgcagcgacgtataggaaaaacgaaaaccggatctgttcaactgtcaggcttttataaaaacccgacaaaactaaaaatatctggcttaatctgaaaaaacagggaaggccggaatcggtaccagctttttagccagcagtcccctgaaaaatgactcataggtattgatagtgtttccaatgcagaaatccgatgaagccgtcgtgtatgcattgcctgtcaatgcctgacaatccacatgatcatggtaaacggcttctatctgggttttaaggcattttatatccgcgttgtcaaaaagtaatccgttgtggttgtgctgtacaagatccacattgccggccgccctggtggctatcaccggcactttcagatacatggcttccagaactgactgggataatccctccatagtcgaaggcaaaaccttaagatcaaaaagaggatagtaattcaggatcatatcacaggctaccattccctcatagtatatgtcatgatccactgtatactccctggttatttcatcatgataatctggtttttcaatgcctgcaaatatcaccttcaccttaaagtcgatatacttcagggcttcaagaagctgctcctggttctttatccgtgatacacagccgatcacaaagtcatgactttttatgctgaatttcctgcgaagatcttcggttatggcactgttcaggtgattgtatttttcctttggggtaccgttgtaaatgactttgatatggtgatcagggatgccctttttcgttagcgattccttcactcctttgcttacggctattatcttgtctgttcctttacagtaaagccagctctgcaggcccccaacactttgtgaaacctgccttctggtgtgcaccaccgacaccggtaaccggtaaagccaccgggcaaaaatggaggtatatctgtccttgctggattgtgcgttgatgatctgaatgttatacctgtatactacctctctgatctgttttatatttgactgatcaaattttgaacgaaaggtcataggtattaaatgaacatgggtattccgcagagttttataaagtaacgactcttcgcggcaaccgacatagataccatggcctcggtctgcaagcccccgggtcaggtaaatgatggaattggtagagccggcaatatcaccctgataggtaaggaaaagaatattcatctcttggaaatctcttctaaatatgatggtcgggacgctgtttcccgcaaaatggtgggttacctttctgtaaaaaatttaagcaatgaatgcgcaggagttactgggcctgcaagggcgtagggagagctattaatgatagggaaatagtataattacatggggtaaaggttcgaaacatttctgtaacaataaagtaaccgctgaatgggtcagttaaccggattttcaccggtatcaggttttaacgtaacaatgagatactccctttccttgatcacaaatccataatgaacagtaaattgttcctcgtccacagccttttggtctacaaggtagtagtaacccttatccagctcagggcaacaggccagtatctcctgcctttcacgggtaagataaaaagggatcagcagatgcatacggtcggcttctgttacgcataaccggtctcctttggtgagctccgctacctcataggcaatatccttgagttgttttgagtcactgtatttactacgtaccgggaggacggttacatcaaaaagcacgcggaacagcgccactaccagtacaagacagatcagggagttttccgggcgtttccgctgataccggaaaataacagctacccctgcggccagtatccacgaaatagtcaggatccagggcagctccttcacctgaggaacaaaaggaagcacaagacaggccattccaccgaaaccgatcaggacactggttactatgctgaacacgcgggatctgataatatcacgtgcaatgaatttctgataactgtaaaggaatactgccaggataaatggaaacagcatgaatacatacctcagcctggcaccaggagagatccagtaaagccagaaattggcaataacaataaccgcggaaaagagtatgaattggttttccctaagggtggtggcaagttccttccgctttctaacaaagaagatgagcaaaagcgacccgggaagcattcccttcagcacttctatgggataactgaaaagatgactgaacagaccggaccacccctgctctaccagcgttctttcactggaatcatgaaacagggtttgcagataggcttcaaggctatgccttttttcatagactatcaggtacatacctatgatacctgtataaagaaggatccctgacaggtgtgacaaggaaaaaagtcgcttccaatccctgtgataaagaaaccaggccgtaagagaacaggcaaggaaagccagggatggcaggcttttcgtgagtgtacccagagccccaaacaggtaaacccccggaaaaagtgcataaaaattcttttgctggtagaaatggaagaggctaaggaaacccagtaccgtgatcagcgcatagaacacatcaatctcagcgtatatggtggcataaaacaaaaaatcaacacacgtagcggttaaaagtgccagcaaccatccaaactccctgctcacgtacctcatacccacccaacccaccaaaacaacaaggacaatgaacgaacatacggttacaaaccggatcgaaaattcggagtagtcaccgaaaagacgaaaagagcctattaaagcccagttaaaaagaggtggttttttgtaatagggaacgtcattcacagtaggtacaatgtattcgttgttcagcaccatttcgagtgccaccagtgcccggcggggttcttccagtttaaggggaaagctaccaagattgagaaaccatcccatcaatagcgccagacaggttacagcgatcagaatatcctgttccttttttgccaatgtcatagatcagggggttagaactcttttcttttacggagagtttgtatgcataaagatctgtca

SEQ ID NO: 2818 - DNA, 23612 bp, synthetic construct
  misc_feature 1..23612: note = Synthetic
  source 1..23612: mol_type = other DNA
agtgccagatgcagcagtgaggccagatggcttttaatgctgctgcaacggaacggataagccgaattgttgagtttatacatttgctcaaaatataagttggcaagctgagcctgttcatctgtaaggaaaacaaccggtttgctccattccttaaaaagtgaagtttttttaaacagattaaattccggattcccgtggaaaaattcctgattaaacaggcagaagtagccttcctgttccccgtcacactcccaggagtaagggatgttgggcgatggaaaaaacaggatagggcggtctacatagatttggtgagatccatattgaaaggttcctttgcctatgacaaaacttactttataataatcgcggcggttgtacggacttttaaaactgcaataccttcgcattgaaatattaaaatgcgattttcctgtttcaaaatcatcggaatcaaacagctttatctgattcttacggatgcgattataataatcttcaatagtttccagctgatcactcatgaaaataaaaaattataaaaatcaaagatagtgaaatctttaatttttatggatttccatttttaaaatataagaaggaagtctgaaaggtccggtttgatcatcagcaattacagtaaaaccgttttccttgaaaaaatccaaaagcggatcatgagtgagcatattgatccatatctcgtccgtgaagcttactgctgtcctgtattttttccagagagactgcctgatttccggggtgtccaggtcagggatgatgacaaagctgatttctgtggctctttttccttccgagatacccggatatacagaaccgcttttgataatgctgtaccctacaggtcgctgatctgcataggtcataacaagctggtttgaaagattattcagctcattaatcattcttctcggatctatttcattattgatatagcttttaatatcatcttcagagacaaagtccttgtgtaaactatacaccgaagaatcgataatggttataagatcagaaattccctcttcagaacccaccgtaaattttgaaatgatttccatgcttttttcttcaaaattatgagattaatttctttaaaaaggatacagtttgttaaaatattaccggtacagtttctctggcggataaatgcaactatcatttccggattatttttgcataaagaatcagtcccgaaagctttttattgctggaaaaatgctggtaggaaggtataaaggttgagattgtcaatcagataaataccgtaaggttttattccggtctatgtgtagctaaaagaatggtattaatttctgagggtaatattcccggaaaagtgcgaatttttctataaatttttaattttattttaaaaattaaattgaatttgagattagtcaattaaatttgattaattatagtattttttttcggcacaattaggctggaatcaccataaaacctatatttgcagcctaaatttttaaataaatgaaagaactaattgaaaaaatcaacgcggaatttgaagcgttctccacagaggcaaaccaacaagcggaaaaaggaaacaaggcagcaggaacaagagctcgtaaagcagctttagaactaagcaaattgttcaaagaattcagaaaagtttctgtagaagaagctaaaaagtaattcacctttagccggcttttggagccggtttttttatgcactgaattttactgtctcagctcagaaagtcaaaccattaactctgctaaaaattcccgggttgtaatgttcttttatgctgaattttaaaattagcgttaaatgttattaaattgtattaaatctttatttttctttatccttctgaatctatatttgtgctgttaatctaaaaactaataatacaaataccatgaagttctttaatttcttgttcattttctttttttgcgtgtgttccgcacagaaaataaggattgtagatgctgaaaacggaaaccctattccgaatgccaggattatgctccgtgatcagattgtttataccaatgaagatggttttgccccgcttagtcaggatgcagggaattttgaaatttccgcttcgggatttcagaaagagatcatcccagtctttaatgcggaggtaaagcttaagcctatctataaaaatattgatgaaatcagaatcatcaatgtagatatcagaaagatctttaacgaggtaagcaaacactatgatgaaaggtattacaacaaaccctccctttacgatgtcgtttataaagaaaaaggttttgataatgataagcttcatttcctggttattgcggaagcaaaattctggagtaaaaataaccgttataatttcaaagatggtttccggaaaaattatgatgatattcttcagatgcagctcaataatgtgaaatattttaaaagtgttaaatccgatagtatattttccggtaaaacagatgagttttctcacgaatacctggggaactttttctttaattacgagctttacagaacacagcagcatctgaaaataaaagactgtaaatactcaggaagactgatctttgaagaaggtgatgagcaggtgattacctttaaaattcagtccggaaacggggttcagatagaaggagaatttaaatataacaaaacggataaggtgattacttattttgaatcccactattttcagacagattatcccaccatgaaaaaaactacaacagatggcagggaatttatgtataagctgggagatgcggcagttatctttgatttttataaaaaagacggagtatatgtccctgcactgaccaggcttgaaggagatcgatttacagtcttctataaggatgaaacgcatgtcagaaaattcagccgtgaaatcatctataacacgtttaccaaaacggataagaaaggactcgatccaaaggtagattttaatataagcatttggaaaaatgttgctgtaaaagaagatagaacaggaacaacactgctttccgaagaagaacaggcttttgtcagtcaaaaataattttttctggtcggatggaaaaggaaatacgattttttagcttaagtgtccccatcaacagttgttagcaggtagattacattttaagtgttcaaaaatcttttgtggcttttggtgataaagggtagtgaatggtgttgaagaaggaattcataatttgattcataaatgaggaaaatgtttggaatatccttctatacaaactttttttgtgttcattttttcatcatctccttaaattcctctatctttaagcaatcaatatatattatgaggataaatagattttttgcagtgcctgcaataatgctggctgcccagttctcgtgggctcaggtaaaggtagatccgaaagagaggcttgatcctatcgtaaaaagttttgtagatgaagtaaacagcaattcccagctggaaaacatggcctatgagctgctggacggtataggtccacgtcttgttgggactcccgaaatgttggctgccaacgaatggagtgccggtaaattacgctcatggggagtagatgccaatctgcagcaatttggaacatggaaaggatggcagagaggaactacccatgtagatatggtgtatccaagagtgaaatcattggcagcaacacagctggcctggagcccggcgactaaaaaagccatagaagcagaagtggttattcttcctaaaatatctaccaaagcagagtttgataaatggcttccatccgtaaaaggaaaaatagtgctgatggcccaatatcaaaaaatcggacgttctgatgagcagatcaaagaatttgcaacccctgaactttatgaaaagctgaaagcagaaaaagaacaggctgctaaagatttcagttcttatataaagaatatcggctatgacaataatacacttccggaagctttagaaaaagcaggagctgtaggagtcgccatttcaaactggaccggaattatgggagccaaccggatttttggagcaaaaacatcaaaaattccaatgattgacattgatgtagaagattatggaatgctttacagaatggcagagaacggtgcacagcctaaaattaaaattgatgcccagtctaaggttcttccggaggctaaaagctttaatacgatcggaatgatcaaaggaaaagagaagccggatgaatatgttattctttctgctcaccttgattcatgggatggggcacaaggagctacagataacggaacaggaacgcttacgatgcttgaagcgatgagaatcctgaaaaaatattatcctaataataagaggacaatcgtgatcgggctttggggaagcgaagagcaggggttaaatgggtccagaggcttcgtagcggataaccctcaaatcattaaaggagtacaggccgctttcaaccaggataatggaacaggccgcgtcgtaaacatcagtggtcagggatttgtaaaagcgtatgattatataggaagatggcttgatggcgttcctaaatcagtaagaagtcatatcaaaaccgacttcccgggaatgcccggaggaggaggctctgatcatgcatcgtttgtagcggcaggagtacccggaatttctttaggttctttgaactgggggtattttggctatacatggcatactacaaaggatacgtatgacaagattgtttttgatgaggtgaaaaacaatgtcattttaacggcagcattagcctatatggcttctgaagacccggaatttgccaacagagagaagagagtaatgcctaaggatgataaaggagaaacgataaaatggccggaagcaaaggagccaaggagaagctctaaggattataaatagatgtcggaaacaggaggtaagtttttaaagtctggaaatataagatagctttcctgattgcaaaaatcttacaaaagtgtcgacaaatttaaattataaattaagaaggggctggttcagtaaagaatcagtctctttttgattagatacaaaaagatatatcataaaaattagcatggatgctcaaatattttgttttcaaggatgttaaaacagatggatttttgacgcaaaggaaatcgattcagcttttttgtcgttgaagaagttttacagctatgcgtccacttattcgaatcaatttcattaattccttctttgcttgcttaagtctggacgcaaggaaaataaaaactctgcgttgatattatatagcgtaagtatccaccttaattttcatacctgttccgtttggattcaagcacaaaagctgtcacgtaaaacgtaaggcatataatataaacattcaggtattctgtatttaggagcgcatcaaactgatgaattttctaatgcaaaggaaaatgattcaaatgttttatttgagggagcaaagaatggcgacattgtcgttgaagaagctttatggttatgcgtccgcttattcgaatcaatttcattgattccttctttgcttgctaagcctggacacaaggaaaataaaaactctgcgttgatattatattgaatatttctggcattcaggtcagcccaaataaaggcttatacatacagcttcagatctgagaataccgaaagggagggtttatgatgatccgaactcagctttccaaagccatactcacaaaaaataaaaggaagattatttacggttgcagaatcataatcggtctgggtgtcaccaatgtaaacggaatcttcagtggataaatcatttctttccatgataagtcttatattctctgatttctgttttttggtccgtccatgggattcaaaatctacaaataaattatgaaactgataatagtctaaaaatgattcaatatatccgtcctggcagttacttacaataaagaggttatgtgtatttgctaagctttttaaagtatcttcaactgtatcatacagtctaccaccctgtatacgcaatattatattttcctgagctacaatttctgaaaggatatcctgaacctgcaggtctgagattccgggaacgatatctttgataatgtcatgggctaataaacccatatactgatccatatcttcaggtttgagttctttttttatcaggtgatatttgtttaaaacatcattccatattttaattatcgttgctctgggatcccataatgtaccgtctaaatcgaaaattaaatttttatagttcaatgtgtattgtatttaagtttaataatttaccatcaagaaataatgttttcaatcttctttttttgagaaaggattagagttaacgatttttcctgacgttgcacatattcatttgttttatctgcaatgaattggatgagttcctgtaaaatagatggattgtcatacagaaactgaagaaaatcaatatcagaaaaattaatagggtaggatttaaactctccgatagtttctatacctctccaccatccattgatctttagttcaggaaaatattctttaaataaagcctgatgggtattttcaaaatccagtattccgatgaacaattcattttgactattaccacaaccactaaacggttctagaccaaaacaggtaatttgtttgtcattctctctaaattcctttaaactgaaccagatatgtgagtttttatctccgactttgtgattattctcaaagaaataatatctttcgctataaacttctattaacttgttttttagtccgttccttatagtattcaatacaatagcctttgcttccagaaaattatcagctatttctttggcactttttaaatctttcaaaagaatattctttatttctttactcatatcgttgtttacggtttggttagtcagtttttttatcagatgaagatactgtttaatagattcccttaagactggctgatccgctgtttctttatgacatttttccagccagtttttaatatggtttttataagtaaccaggtgaaaatcttcattgatcttcagagtgcctttgctatcatcagaaggttcatcccccaataaatttaaatagagcagtactgcagatttatagtggtttttatacctttcaagctgagctgcctgatctggagcataaattttattttcaataataatcgtatgtttattatcctcaataataagatcgataaaacctccggtttttctttctatatctacaactccaagatatttttcggaagtaattctggcattttcgaaattgaattcattgatggattttaagcattcaatttcatcaaagaacagtttgagaaaaatactgccttgtccgtgtgaccctttgggatttaatagttcaccaatgatggcagaatgggtatacctttcattggtttccatactcattattgaaaaaatattaaatttttcgcctgttattttagcaatgtcgtcgtatttttttgatattactgagacattttttaataaatttctaatatctgaaagttgaatgttattctccatgtctataaaatcatactcagctgaactctttttctcgcctcatctacttcggttactttcaccctgacatgctgatgcagctttaccacttcattcacatcggatacaaagccgtctttcagctgggaaatatgaacgagtccgctttctttgattcccaggtctacaaaacatccgaaagccgtaatattgttgacgatcccgggaaggatcatgcctgccttcaggtctttaatgctttttacattgggatcaaattcaaatactttggctgtttttctagggtctaacccaggcttttcaagttctttcaggatatctttaattcctaaaattccgatttcttctgttgtatagttttcaggtttcaccaaagcgattttctccttattggcgatcagctcattcgttttaatccccagatctttggccattttttctacaattccgtaagcttccggatgtacggcagaattgtccagtggatttttggcgttattgattcttacaaaagcagctgcctgctggaaagctttttcaccgagtcttggcactttcttcaattgttttcggtcttcaaaagctccgttttctgcacggtagttcactatattctctgccattttttccccgattccggaaacatagctcaataaagatttgctggcggtgttcagattgattccaacagagttcacacatttcatcacggtggaatccagttcatttttcaattgggtctggtctacatcatgctgatattgtccgacgccgatagatttcgggtctatttttaccagttctgccagcggatcagaaagccttcttccgatagaaacagccccgcgcaccgttacatcgtaggctggaaactcttctctggcaatcttgcttgcagaatatactgaagctcctgcttccgacactacaaaaacctgtaatggcttatcgaaagcaatttttttgatgaaaaactctgtttcacggctggctgttccgtttccgatagaaatcgcttcgatattataggcattcaccatagaacggatttttttcatggccattccactttcattctgaggggcgtgtgggtagagggtttcgttatggagcagatctcctttttcgtccagacataccactttacatccgcttcggtatcccggatcaatagcaagtatccttttctcccccaaaggcggggcgagcagcagctggcttaagttctcggaaaatatttcaatcgctttctgatccgctttttctttggcctcctgtagagcttcattagagatagccggttccagaagtcttttataactgtctttgatagccagagctatttgctcagaactttcgttattggactttataatcgctttttcaatgaaatcgattgcttcttccttgtcaataccaatatttgttttgacaaaaccttccgcttctgctctgagcatggccaaaagcctgtgggatggagttctgctgaggttttcctcccactcaaaatactgtgaaaacttctgtgcctcttcttcgtcttttttagctttaaccactttagacgttatcactgccttacgttgaaaagtacggcggagatttttacggacatacatattttcattgatccattccgccataatatctctggctccttgcagagcttcttcttcagatgtaacttcattgctgagatattttgaagccagaaaatgtagatcattgttcttctggctcataataattttagctaaaggttccagtcctttttctttagcggtatctgctttggttttcttacgttttttataaggcagatacagatcttccagctcctgaagatcaaagctatcctcaattctttgtctaagctcaggcgttaaagcctcttgttcctctatagattttaagatagattcccttctcttcataatgtcttcaaactgcttgctgatcttggcaatctgctcgatctgggtttcgtcaagatttccggttttatccttccggtaccgggcaataaaagggatggtgcagtcttctgctaataattgtaaggtattgttgatgctcttttcagaaatactgagctgtttctgtataaatgctacggtcgtcattgtttggttttcggatagctaaaataaggtttttaaaaagaaaaaaggcgagttgtcccgtcttgaatgttttgttcacttattttaattgttttcatggagttcacaaaatatttaaataaaaaatcccccgtatggtaagacgagggggcttaaatgttttcacaacggaataatccttattgtgaattgctttcaaaatttataatccaaagataataaaattcattttacagggcaatacgggaacccgtaatttgaataatttttttcttcttatttttataaggtgtcaaaaagtaataataatgaaaaaatataaacttggattagatgttggggtctcgtctgttggcgttgcagttataaaagaagaaaacggaaagtcatcagttgaaaaattatctgtgagaattgttcctgaagaccctaattttcatgggaaattctactccggaaatacagcaagcaaaaaccttgatagaactattaaaagagggattagaaaaaataatcagagatttaaggcaagacgggataagctttaccagactttgagagaaaataatatgtttccaacggataatttattcgatcttcctgcaactgaactttacggattgagggcaaaagctgtttcgaaaaaggtttctttagaagaattgggtagaatttttatagtactgaaccagcgcagaggatttttaagtaatcgaaaatctgtttcggaagaagagaattcaaccgaatataaagaatgtattgctacacttgaaaaagaattggctggtagaactattggacaaaagttatattcagaactggaggaaagcgagagtgattttgaagtattattacgggaacggacctatcaaagaagttcatatatagaagagtttgatagaatttgggacgagcaaaagaaatactattctgttttaacaggtggagcgaatgaagataataataaagaaacattgtacgatttaatccgaaatagaattatttattatcaacgtcccttgaaaagtcagaaaggtttaatttctgaatgttcttttgaaaaatatcacaaagcgacagcaaagagttccccttattttgagttgttcaggatttggcagaaagtaaatgatttgtcgtggaaaactccaggtggagagacttttaaaccgacacttgggcaaaaacaaaatttgaaagaagctttatggaatggagaaaatcttaatgctaaacacaaattatcggtaactgaaattaaaaagcttttaggttacggaagaaacgaaaaaatatatctgaattttacagaattagatggaagcagaacctatacggtattaaaaaatgctttggaagaggcaggaatagaaaactttcaacaatacttattctttaatttggatataagcgatgaaaaaggaggtttatttgaattgtggcatattacctattcattgccaacggaaaaagaggtggtaaatgcattaaaaaatcgtttcggattttctgaaaatcaatcggaaattattgctaaaaaagttgggtatccttctaattatggaaatctttcaactcgtgctatccgaaaattacttccatatttggaaaaagggttaggttacagtgaggcttgtgatgcggttggctacgaccacagtggatataaaacagaaatagaacttaaaccgaacttaaagcagcttaaaaagaatgaactgagaaatcctgttgtggagcaaattctaaatcaggttgtaaatgttgtaaatcttgttattgagaagtatggtaaaattgatgaaataagagttgaactagcgagagaactaaggaataatgcgaaaactcgaaaaaatatttctcaggcaaattcaaaaaacaagaggaataatgatgttataagaaaaaaacttatagaagagtatggattcaggttagtgaatggacgggatgtaaagcgttatattctttgggaagaaactgctcacgaatgcttgtattgtaataatcctattaatggaacagatatgcttacgggtaatgcggatattgagcatgttttaccaaaatcccgttctttcagcaatgcgatgaataattatattatagctcacagaaaatgtaactccaataaagggcagaaaaccgcttatgattttatggagtctaaaggagaagaagtattagggcaatatatagaaaaagtaaatgctttgtataatgatggaaaaggaagtatttcaaaatctaaatttgataatttgttatgtaaaggagaagatattccttctgattttgtagaaagaatgaaaaaggattctcaatatatttccaaagaagtggtaaaaatgctaaaaaccgtttgtccgaatgtttatactacgactgggcaggtaactgattttttacgtgaagaatggaaattgaaaaatctgttacaggaattaactttcgacaaatacaaagccattggtcaggttgaggaaaagaccataaaaacaaagaatggacaaactaaaacgtttgaaacaattacagattggagcaaaagagatgaccacagacatcatgctgttgatgccttgatttgtgctttaaccaaccaaaaaatcatctttaaactcaataatctcaacaaaatttatcaatatgaaagagatgcattgagccaaaaagaaatagaggagtttgaagaatttttagaaggaaagttttctctgaaagaattttcgacacaacaggaaaatatcatagaatgttctataccaaatattcgcagagaagttcaaaagcatctcgaagagatttttatttctttcaaaaaagagaatagcaaagttcttacaaaaaatatcaatgcacctaaaaatgtagaaccgaaaacaacttgggtcccacgtgcaagattacacgaagatactattatggggcgtgtgaaacgtattgccgaaaagaaaatgaaactcagtgataaagtttcaatggaagaaatcgaaatggttgtaaatcctgaaatcaaagaaatactttatcagcatcttacgaaatttgacaataatccgaaaattgcttttgctcaaaaaacgctgaaaggagaactgatttcttataagggcaatgaaataaaagaagttggtgtgtatgaatgggtgaatacaaaaagagtaaatgttgagaattttttaacagataatcaaaaaacgacgtcagctaaggacaagtttatagaaaatattctaaaatcggataggggaataggagttttattagatagacgattaaaagagtttaatggagattataaggaggcatttaaaaatttatctgaaaatcctatcattaccaaaaatggaatgattgttaaaaatgtaacaatttatgatgaaagcaaggtcgagagagtaagaaatggttacgcaaaaacaggtggaaatcatcatgctttaatctataaagataaaaacggaaaatacaatgataaagtagtttcattttgggaagcggtagaaatcgggttattaaacatagcggtacaccataatccttatccgattatcaatagaaatgacaatgaagaatttggaactttccaattttctatgcaaatcaatgatttatttgtatttgatttaaaacattctgataatcctcaggaagaaaatgaaatcgacttttttgatgtgaagaacagaaagttgatttcaaataacttgtttagagttcagaaaatgacaaagaaaagttctggagcttttgaagtaacatataggcatcatttagaagcaaatcttaatagaagtgataaaattttaaagggatatacctgggatgaacacggttcaaataaacatttggaaagattaacaaaaatcagaattaatcatcttggtgaaattataaaaatcggagaataataaattagtatagaatgataacccgctccatctatattggcaatcccgcttatcttaagctcaaagacgagcagatgaaaattctttgtcctgaaacaaaatcggagaagggaagtattcctgtggaggatctgggactgctgatgctggatcattttcagattacggtttcacaccagcttattcagaaaatgatgggcaataatgtagtcgtgataagctgtgactcgcatcatttaccacatggaataatgcttccgatgtacgggcatactgaacattctgacagggtaaaagatcagctggaagccagtgaaccccttaaaaaacagctttggaagcagactgtggaatgcaaaattgaaaatcagaaagaagttctgttgagattgggtaattattatgagccaatgctggactatcaaaaaaatgtaaaaagtggtgatattacgaatatggaagggattgcagcgcaacattactggaaataccttatcagcctggattttcttagggagcgttttggagattctcctaatcagtttttcaattttgggtactctgttctgcgaagtattgttgccagggcgattgtagaaacaggattgcttccggtgctaggaatttttcacaaaaataaatacaatccctactgtctggctgatgatctgatggaaccttaccgtccgtttattgattggctggtgatggaatggctggcaaagcatcccaattctgatgaactgacaaaagaatttaaagctcatatattgcagatggcaacaaaagatgtgaaaattgacggtaaaaccaggccgttgctggtagctgtaaaaacaacggttacttcgctttataaatgctatacgggagaaaaacgtcttattgcttatcctgaactgttatgaacgccgaaaggtttaatgcgtaccggattatgtgggttttagtattatacgatttgccaacggagaccaaagccaatatgagagatgccaaccgtttccggaaagctctgatcgatgacggatttaccctctttcagttttctatgtatgtgcgtcattgtccaagtcgtgaaaatgcagaagttcatatcaaaagagtaaaattcatgctgccgaaagccggaaaagtggctattatgtgtatcacggataaacaattcggggatattgaaatcttttttgccagaaatagagaagagccgccaccgaccttccaacagctcgaattattctgattttttaattctaaaaacaaatttaacccgctgaattttagtgggttaaattttgaggctgtgaataatcacgaagataataaattttgaaagcaattcacaaccctaatttgtctagtaaacacttaatttctgctgtgaataatcacgaagataataaattttgaaagcaattcacaacgtctgaggcttatagatcagaggtagcatagctgtgaataatcacgaagataataaattttgaaagcaattcacaacgtgtttcccttgacctacgaggaacgcagagctgtgaataatcacgaagataataaattttgaaagcaattcacaacgtggttcccttgaccttgaaggaacgcagagctgtgaataatcacgaagataataaattttgaaagcaattcacaacctaaaccgacagagtacaacccgatccagtgctgtgaataatcacgaagataataaattttgaaagcaattcacaacatatgtacttcaccatcgttaggcgtttgggctgtgaataatcacgaagataataaattttgaaagcaattcacaacacgcggttagaatatgtgttaagctgccgtgctgtgaataatcacgaagataataaattttgaaagcaattcacaacatcattcggcttaaaagtggttaatatactgctgtgaataatcacgaagataataaattttgaaagcaattcacaacttgcaaacggttgatactgatgccaggtatgctgtgaataatcacgaagataataaattttgaaagcaattcacaacgagtgtgaagcaatcaataattataaagatgctgtgaataatcacgaagataataaattttgaaagcaattcacaactaagatggcacggggttaaacttccaaatcgctgtgaataatcacgaagataataaattttgaaagcaattcacaacttagttgttctaactaccgcatttcttgtggctgtgaataatcacgaagataataaattttgaaagcaattcacaacggtaatcccattggaccgagaagttactccgctgtgaataatcacgaagatagtaaatttttccagatatcaaaataaatttaactcaataaaaatcccctgctcaaagcaagggattgtgatacattcaacattaattattctctgtttttaacaagtacccagccgttgtatctgaccgaagtgttgtttttatcattttcactccacgagatggtgtaccaataggttgcggtaggaagctttttcccggacgaggtgccgtcccatttaaagtttcttattgtattggcttcataaagtctgtttccataccggtcataaatttcaaaaaccagatttttcttgtaagccagagctgaataatcgacattgtcatttttgccgtccccatttggagtaatggcatttacaaggttaggaactgtaatttctgctgctataggaacgcagttgtactggtctttcacatagaaggtatgttgtcctcttgtaagattactgaaaataggggtgtcctgccagttaccggtctggtccacggcgtactgataggaaggagtcccaccggtgacattgattgttgcggtattgttggagatatcaatcgatttgatgacaggattaggagaagcatagatctttaccatctgttttgtggtgcattctccggattttaaatgaacccaatacgtacccacccctacattgttgatttgctgagttatggctccggtactccataaatagccattgaaaccggggccggcatcaagtgtggtcttatcctcaatacagattattttatcagtcaatacagatgatgttttgggcgggataacctctaaagttacttttgctacggaaaaacacccgttgctattggtgactctgatgtagactacgccattgggagcaatataagaggcggaatttgtggtgatttcattcgttccgttcgtggcatccgttaacgatgggaagtatcgcctggtaactcctgtctgagaggttacattggctgttgtaagattgaaagatgctgtggagggattgctttcgatataacatgatttcacggtagtatcattgactatcggaagactgcttatcgttacagtggccggctggctcactgcattgcactgtgagtttagtacggagccctgaggtcccactttaaatctgattaaataattacccgcgggcagcccggcagaattgaaggtgtaattgggactggaggttggagatccctgatctgtccatgttgctccgccattgctgctgtattgccattggtattcggcaggattgtaggaacttccggttaatgtagcggtgaaattgacgctcgcattttggttagggcataatgttgtgctggcaccgggggaggctgtgatggtcgcagggatgcagggagatacagtaatgtcatcaatggccaggtcgttgccacagccggacccaacggaattattgacaaattcaagagttacagaagaactggatgcgttgttgaaaataacagaatattgcgtccatgttgagttgataggaacattacctgtagccgatgttcctaaaatgcttcctgtggcggtatcaatagctctgagggtaatgttggggaactggtagactcctgcacagactgaagtctgagtactgggaggatttacattaaggatccagagggagagccgtaaggttgtattggaacagagattgtccatacggtacttaaaaaatacggtggcagcagtagaaggggcattgatgagcagcataagcccgttaggatttccggtatgatcgggtgaatttaaaaagccgtttcctcctacactgggagttttaaccaatccggagtaaccgtctgatagtgctcctccgttaggagggcctgctgtacctacaaaagtggttgaagtagtggcacccggagcataagtggataatggaccgtaccatttatctgttgcattgccctgcccaaaagtttgattcacaatcggtggtccccatgttccggcacaggttggaggcgtttgggcattaagccgcaaaacaccgaaaatcgaaaataagaaaaccaatatagaaccggttttctttcgtgaaagtaatgttttcttcatatcttaaaaaagtgtgtttttttattttaatggatagtttatatcataatgatgtgtataatttttttaagtttgttaatgcttaagattttcaatgcttaattaagagttgtagaaaattttcagaaaagttgataattttagtttaatttttgtgtttttcatatttaatttgatttaatttttacaatttagtttgttttagctgttttatttgtgaaatttacataaaaataatggtatttttaaattataattattttttttaaaattttcatgtctgatggtggtttgaatgtaaccggttggaatttagaattgtatacacaatggatttatctcagactttaattattgaggaaataaaaagaaataaaaattttcatttcttgatatatgataagatgccggaaaagaggtttctctatttttgtaaccgaaaaacaacaaaaaatttcgatcaactttttaaaacagttcaataatatgaaaaaaattagcgtaattgcattagtaggagtaggattgctggcagcatcatgtaatagcaaagaaaaatcagatacagctgtagctacggaacaggctgttgcagaaagcaaaggtgaagtactggcagtagatactgtagcttcagtagtcaactggaaggctttccataaaggaggtatggcacctcgttggggaactcttgctgtaaaatcaggagatatcagtgttgacggaggtcaggtttccgcaggaaattttgtaattgatatgaactctattaaagtagacccggcttcagtaactgaaaaagataaaaaaccaggagaccttgaagcgcatttgaaaaaccctgacttctttgatgtagcgaaaaaccctacttcagatttcaaaatcacaagtgtttcagatctgaaagaagcaccaaaagatgcggtagcaggagctaacaagaacgtaagcggaaaccttaccttatcaggaaaaacaatgaatgttactttccctgctaaagtagaggtagcagaaaattctgcggctattcaggctaaatttacggtgaacagagcagattggggaatcaaattcggaacatcggaagcagatccggctgaatggatgatcagcaaagacatcgaaattggaattgatgtaaaagcgaagaaataagttattaaacctattaataataacagagctgccttatcagggtggctctgttactttttatacttactccgccggattcaaggcaaagaaatcaattcagctcccatgaattctgaatacgtactccatactcacttcccaggtataaaggattgccgtgtttttcagaccagaacccatccagtatatctttgctcagacagcggtataccgcaactcctttatagattttgtgatcgtctccctcatagttgaaattgatgactaaaatctggtctttataaaatcccgtaccgttttgaatatggtcaccaataacccatcgggcagcaatacggttattttcattaacagatagagttaatgtgccgtggtaggtagcttcagaactgtcttcctgattgcttcctgcaatagaataagttcccgccagatcatgtattgtcattggtttattttttatggaggggcaaatttaaataatcctgttctgataatcctgtttaatagttcacaatagcttaaattttccacgacagactttttcatataaacattaaactttatttttgcagcaaattaattgtagatgattccttttctgctgatcgctaaccttattacattcggcgtctttggatttgataaatggcaagccgggaaacgccaatggaggatttctgaaaatgtccttttaggactttcgttcatcggagtagtgggagccgcttcaggaatgatcatctttaatcataaagtttctaaaaaatcatttctggttaagttttttctcgttgtcttaattgatgttgtactgctttacaggctgatcagacactgataattgaccggttttgcctgtcagacagactatttttgagacatcttaactttttttggcaatctgtaacaggaggacggcattattttttctttactaccagggtaacaccttaaatcataatatcatgtcaaaaaagattgcaattctggccacaaacggctttgaagaaagtgaacttcagtcaccaaaagaatatttggaacaacagggatggacagcgcacattataagtccggaatccggaacaataaagtcctgggcagaaaaagattggggaaaagaatatcctgtagataaaagccttgctgaagcatcagcttctgattacgatgcacttgtgcttccgggaggggtgatcaatccggatcagctaaggaccaatgatgaggctttatcctttgtgaaagattttttcacacagaataaacccgttgccgctatttgtcatggacctcagatcttaatcaatgcagaggttgtcaatggcaggaatatgacttcagtaaattcaatcagcaaagacctgataaatgcaggagctcattgggaagatagtgaagttgttgtcgataacggattggtaacaagcaggacacccaaagacctgccagctttcaatgccaaaatggtagaggaaataaaagaagggagacacgaacgacaggtttaattaaacaaaggcttagattgaaaatctaagccttcattatttcattaattgaatgtattattatactactgttcccgcactatccttccattgtgaattttgagcatcaaaccagattggttttttgattgtattatcgtaaaaaaattgtgcattcctaaggtttttagttggccgggtataaccgtcttcaaaggtactggaggttaaagcagtactgttaaccgttttaaaatgagctccgtttctgtaatatgaacccgaaaaattattttccacgccggcggtataggtaggatcttttacaatgattgcattgggataagcaataaagttattgtcccagtttaaactttccacactcgttacataggctgcatatgggacgttgcttccgctggagattaaaaatttatttccaaggacagatgttcttcccattgcagtcaatacatagatattggctccttcatcatttaccgcaattttgtcaccgcagttattaaaagtattgttgaaaatttcccagtcataactgttggttccctgatagattgcattcttattaataccgttaataacacaggatgtaattgtaattctgttggaattaataccttgtacaaaatgattggtgtaagcattggaagttgcgtataacccttggcctaaaacattgattccatttaaaataatttcatctgctttatcaatatatacaagactgttcactgcaacgttttgtgtgtcagcatgcacaaagaatgaattggatatttgcacctgctggactctctttgtatcattgccaatgattctgatagcatatccttcgcttgaaccacttttaacctcaccaatatagagattggtaatagaagtgttctgatgtcctgtagcgttatccagaggctgtaaatccaaacatgaaaccttgccgttgttgcaccatacattaaccagcctgtttccccctgcaaccagccttaaaggggtatctccttctgtgaattctgaatttgaaatagtgctgtcggaatagatctgggctccaatcttattatttctgaaatagcagttttctattctcagcaatccttctttggagtataggccatattcggaaaaatttttcacaacgactctgtcgagattaagtacccctccataagtaaaatccatagcgatggcccctgatacagcagagttatcggtaagctttccatccaatacaatatttgaaattttagctgtattaagtccctgttctcccttaaaaatggttcctgaagctgttgtcgtaagaattgtactgcttacttcccatatatcactgctgcttccgataatactgaggccggaaaatgcctgtgaaattgagataggggtattgataataaattttccagggtcgaatctgactgaatgcagggaactgattgctttttgtatcgcagcagaatcatctgtcgttccgtcgcctttagcaccgaaccatttcacatttacagtatcatctactaagactcttctgtaatatttatcattaattttcttataaatgatatcatcacacatgctgtcagtaatatctgctccatgataagtttttgttgtttctaaaaagacggtccattctccggtatacgggtcatttaattcaattgttgccattttctttgttttaaaaggttaataattattttaattttcttgcaagaagctgaagcaaaaataacagagcattacgccaggacttgacgtattattttatttattactcttaattatttttcgggagcagattattgtggttcaataactttctcattatgaatttgttaattaattcgtaatcatgacagattattcatcaaaatttactatttttgcacccgtaaaaatcctatatgcaaaacattagaaatattgcgattatcgcacacgttgaccacgggaagacgactttggttgacaagatcatccacgctaccaacattttcagagaaaatcaggagagtggagaattaattatggataacaatgaccttgaaagagaaagagggatcaccatcttatccaagaatatttctgttacctataaagacactaaaattaacgtaattgatactcctggtcacgccgattttggtggggaagtagaaagagtattgaaaatggctgatggagttattttgttggtggatgcgttcgaaggacccatgccacagacaagattcgtacttcagaaagctttggaactgggactaagaccattagtggttatcaataaagtagacaagccaaactgccgtccggacgaagttcacgatcaggtatttgatttgttcttcaaccttgaagcaacggaagagcagttggatttcccaacattctacgggtcatctaaacaaggctggttcaacacttcattagagcagacagaagacattttaccattattagacggtattttacaatatgttcctgctccgactgtcactgaaggaaatcttcagatgcagattacttcccttgattactcttctttcttaggaagaattgcgatcggaaaagtaacaagaggtgagattaaagaatctcagtggattggtcttgctcaggcagatggtaaaattgtaaaaggaaaagtaaaggaactttacgtttttgaaggattaggaaagaaaaaagtgacagaagtacaggcaggagatatctgtgctgtagtaggtttcgatgcattccagatcggagattcttttgtagatcttgaaaatcctgagccattggaaagaacggcaatcgatgagcctaccctgaacatgacgttctctatcaacaattcacctttctttggtaaagatggtaaatatgtaacttctaaccacctgaaggaaagattaacaa

SEQ ID NO: 2819 - DNA, 23612 bp, synthetic construct
  misc_feature 1..23612: note = Synthetic
  source 1..23612: mol_type = other DNA
cggaaagatccgattcatacgactgaccctataaacaagcaaaacttttatgccgtaaagtctggagagacgctggaaagcattgctttggatcttatgcttgaaaatccccggtatcttctcgaatatcataatcagcgctgtagtttcctggatacaattcctgagaacggaagattaaggctgatgcaaaagctttgtattcccgctccggaagaaatttcggaaataaatacaattatacaggaacggggagaaagtgtatataagtcattttctaaaggaaaaattcccttcaatgctgaggcggtttccggagtatataaggtcaggcaaaccgaaagtgatgatggaatactgaagagtgaatatgcttattcaatctattgtaattatataaaagaagaggaaaagggataccgtattcatttttcaatgagtgatttcactaaagatggtgaagaactggaacagaagatcaacagtctggcttcagcgtttgtgaaaattatttatccggtaacattcattatagatcgttctggaaaattggtggctgcagaaactcataaagagatccggcatataataaatgaaattgaagcattaaaaaaatatcatcaaggctcttatgcatcgctgcatatcaatcagatgaaagataaaatggctcatccaaaggttatttatagcagtttgaaaactatagtacccgtacagttcattttcagttctttttatcaggctcattataatatacaaggcttttcagttccatatacagatgaattttcatggctggctccagcttctcctatcagaatggaaataattaatcaaaccttatcagaagaaaaatccggatgtatagaagtagtacagacagggaaatctgtggattaccggacggttgaagaattgtacgatacggattgggaatatgatgagctggaaaaacctcattcaaaatcactgatcgccagccattcggcaatatatacattaaaggctgctgatttttctatacagaaaataaaagcagggtttcatattcagatggccgattatgaaaagtccatgacttttgagctagaaaaattagcaggataattaaaagaacacaattgaacccacacaacacaaaaaaatgtcagaaaatttatcaacacacaacggaaagcattttgtcatccaaaaaggcaaagccagctgcaatcagggagatgtgttccctcagtttaaggtaaattcccatcaaaagcattattggaaccaacaagacgttacagcagattatcttgcggtaacagaagaagatatacacttcaatcctgccgggccaagcttcggaaaatgcagattaaaacccacatctggcggatatttaccctgtgcgtatgtccctgccggaaaatggcaaaagacttatgaaaaggtaaatattatggggaaaagctgcctttctgaaatctccgaactgatgtgcagtactggaggaatgattactgtgaaggaacatggccagacttctactatgaacaggcaaggtataacacttgctgatccccaaagttaccatcttattaatccgtttatggatttaaaagaatctcaggcagaactggaagaacccgatccgatttatgaataaaacatttcaaaactaacaagtatggcaaaattgactattacaggcaatacccaacctattgttggaaatacggaggcatattcactttcagtctttgataatctgatgtcttccaattctttttcttttccaccactcaaagtacaatggaatattcatgtaaaggatcagaaaggatggcggattactcatgggaatgtcaaagatggagaacaaataacctataaattcacccataaaagcttaaaatacaaagctttaaaaattgaagtgacaagagggaaggacaaaggtgaattgtatatacaaccacagccggctgaagaacccaaaatactccgtgtagatctattagatattaattctcagcgactgcagaaaggaaaactactttattatacagatactttaattgctaaggcccattgtgtgggaatgttcggacataaagtatcttttactttatgggaagacgatgcaataggtgaggggcatgatccggttattaatatgatgaacaggatcaatccggtgcctcttgttggggaagtggatcatgaagggattgctaaagtcattttcaggttacccagctataccatggctgtacagatcgctaatgcccaggtggccaggggagatcaaaatgaagggaaaacccatgagtattatgtgacggcagaaatggcttccaaacatattctgaaggccagtcccaatgtaaatgtggctaatcccactcatgttcctgagcctcctaaaaagcaaaagcccaaagaaacgcttctcgctcacagaaaacctccggtggctcctgaaaagaaagacacaaagcctgctaaacccaaacctaaagagaatactccaaagtttccgcaaactccggcggcctggaaacaggccgatcctgaaggaaagattataagtgtggaatttacagatgctacaggaaagcctttgaaaaatgctaaaactggcgatgttgtatctattaagatcagcacccggaatatgagtgggaaaaatgtaaaggtaaggatctgggaagaagatttctcacgctatagcaatgatctggtatatgaagtatccgcaaagctggcttacaatacgacaaactttatcaatggggttgtcttaacaaaagatatgtataccaaaagctacgaatggggtgaagggaacgaacgggaatattttatagaagttgagcacttgaatacctctgtaacctctcaggtgattccggtaagcccggatgctgaaccggtgaaagtggaggctaatgattctccctcgattattaaaggagcaaaattagaaactaaaaattgtggtggtaaatattgtattgacaaaaactcccctccaagcgaacttataagagaaattaatattcgtttagccggttttggaggcaatgtcccaacagataaatttacggacagaaccgaaaaaatgattaaacagtttcagagagattatatgaaagttcctgaaactggaaaagtttgtggaagtgttttaaaggcaattgatgagttttcaaataaatattcaattccttttaagcgcattaaatgtaaatgtggtaaatgttctggttttggaaatggaaaatattttgagcaggcacaaaaaaataatatttctgaaaaatataggaaatatgagtatccaggaatacaccgttcaatatattgggcaactaaagcaatcatgcattattttgcaacgttagaaagtgcattgggatataaaataggtgacatttcttcaggatatagatgccaagaagataatgttattaataaacggggtacaactaatcatatgggaaaggcattagatttacacgtatataaaacaaacgataataaacgagcaaatggaaaagacaggggagcgaaagaaggtagaagccttttttcaaaatattcaaacgctagaataaattggactaccaaaaatgaattttcattagaaccagctaatattgctcccacttggatacatgttgatgttcgggagtttgaattaatttacttaaaagatcaattttttgtaagctctgcccaaacagcagaaggaggtaatattatttctattgcaatgaaattcagtaataatatgtgtagttgtgggggtgatttttcatctgaccataaagaacaaaaaatagagcatatagataaagaatttggtattgaagatgctagagaagcattaaaatacatcaatgataatttcggacgagaaagagctgttgttattgagaaaatgtatcggctcgaaacatcacattttacatctttacaatataaggagacaggtacacctggaatggaagcccatggagaagctccttattatggatggaattctaagtactgggaaaagaatccagagtatattccaatgggattaactggaattaaagaagggataggaattggctacaataaacaagatacaaaaaataataaacaatttattgtttttccatctgttaaagcaggtatgctatatttaaacgcttatatagacaggtacaatggaaattatgccagatggtatagcacttctgaagaggggcagaaaaagtatatagagtcactaaaaggaataaaaccacacatagtaaataatttttaaaaatgaaaaatttagtattgtttttatgcattatagttgtaagcttattaaatgtatcatgtaaaaaaggtgaagcattattgatttcatcaaagaataaaaataatgaagcatataatattcaggttaatgaacagaataataatgctttattaaattttgtaaaatctacatcctttgattttaaaggatattctttaggaaaagtcggggcatatatagataatatagcaaataatttcgctctaataaagatatatattgaaaactctggaggtaccggaacactagggtggataaaagttgattttttaagtgataaggcctatgatattactatcaatccggaaaatcctaaaggattaacattcaataaagaaaagtatttagcttttaagaatgaaattcttgataatgaacctgcaaataaggctataaatgataccataaaagctcataagcttccaattgagtggtcctcagaaaacaatttattatctgtgaaattatcagatacatttttcaatatagaaatggacaatccaaacaatgatcatttcattacctatttatctaaaacaaaaagctttatacctattattttgtcgaattgttatgaatcaggatattgtgaggaatatttaattaccataaaagataataaggaatattctaaattaaaaatttattataatacagctcctgatggaaatttgaaaaattatgaaacaagagtttataaaattaatgaagattttgttattgagctaaaaacagaaaaatatattaatgatgagctcatttctgaaaaaaaagaaaagtataaaatcaatcctgagggaaaaataattctacattaaaaaagaaggagctttcgggataggtgataatagagatatttaggtgaggatagcttttgtattaactattgttgcaaaataattgcttcaaaaaataaatatatctaaagatattaaagaggtaaaaagtgggaatacagctaatgcatctaaacaaaatgtcaaagcaaggcatttacactttgaaattactgatgcaaaaacgacaggagacggtctgaataatagagaaaaccctgcattttatgtaaggctaaaaactccaaataaaaataggcaggagaataataaaaactaaccagatgaaaaaaattatactaagcattttctattttattggaacactgttgatatcatgctttggtgatggaagtcataaacagaaaaatattaaacagaaaataaatgttgatacaataaatactaggcgagcggataatataaataattatgataatgaactggaatctaatgatgaaattatagaagataaacagttttcaaaatggaaagatgaatatcattactttttccaatatatagatcataagggaatttcatctgatttgaaagccaaaattaacttaataaaatcagatagttgtgtttttgaaagttggtttgaagatccaaatgatgaacaatacaataaaaatgggtatttaaagctgttagggcatatatatgtttcagatgataaaaatttaaaaattatttttttagaaaatacagtattaaacggtgaatctcctgagttggatccggttttcactttaatcaataaaaaaaatgaattttatattgaaagttttttgacctctccacctcataacggaattattgaaatgccgatacaaaaaatcaaataaaaataaagccatcccgcaaaactgtgagatggcatttatttaaatataattctttaaatcagacaatgttgaaacctgggcttcatgcggtttggaaagttttccaaaaccatagtcacaaaaaataaaaggcaattcgttggaagcagcagaattataatccgtctgcgtatccccaatgtatatagaattttcaatggatagaccatttctttccataaggagatgtatgttttctgactttgtcttttgtgtacgtccatgagattcaaagtctacaaatagagtgttaaactggtaatattctaaaaaagattcaatatatccatcctggcaattgcttacaataaaaagattgtgggtattggccagacttttcaatgtatcctcaacacctggataaagaatgccgccttgtatacgtgatatcttattttcctgggctactacttcagaaaggagttcctcaatctgaaggtctgaaattcctggaagcatatccttcagaatatcatgagccagtaaacccatatattgattcatatcatcaggtttcagttcctgttgtatcagttgacgcttacttaaaacatcattccatattttgataatcgttgctctggaatcccataaagttccgtccagatcgaaaattaagtttttataattcaaagtgtttctttttaattacgatttttttaattttattaagcaattatttgaccattaaaacatgtacagagagtaaaaaaaattaaagcgaaacttaccttaatatgctcaacctcttaaaagaatttaatggttgaaataatagatattgcttataaaatcatgcttaattgcactcttttccttgcctcatccacttccgttacctttactcttacatgctgatgcagttttacgacctcatttacatcagaaacaaatccgtctttaagctgagaaatatgaaccaaaccactttctttaattccaagatccacaaaacatccaaaagcggtaatattgttcacgattcccggtaagatcatacctgctctcaagtctctgatgctttttacatgaggatcaaattcaaatactttggcagctttcctcggatctaagcctggtttttcaagctcctttaaaatatctttgattcccagaattccgatgtccccggtaatgtaattttcaggttgtatcagggccactttttccttattgccaatcagttcatcagctttaattcccagatctttagccattttttcaacgattccatacgattcagggtgtaccgcagagttgtccaatggattttttgaattggtaattcgtacaaacgcagcagcctgctgaaatgctttttctccaagccttggaactttcttaagctgttttctatcttcaaaggctccgttttcagctctgtagttcacaatattttcagccattttctctccaattccggaaacataacttaataaagatttactagctgtatttaaattaattcctacagaatttacacatttcatcacggtagaatccagttcatttttcaattgagtctgatctacatcatgctgatactgtccaactccaatagattttggatcaattttcaccaactcagccaatggatcagaaagtcttcttccaatagaaaccgccccacgaacagttacatcataagttggaaactcttcccttgcaattttgctggcagaatacaccgaggcacccgcttccgaaactacaaaaacctgtaaaggcttatcaaaagcaattttcttgataaaaaattcagtttcacggcttgccgttccgtttccgatagaaatagcttcaatattataggcattcaccatagaacggatctttttcatagccattccggattcattctgaggagcgtgagggtagagggtttcattatgaagaagatctcccttttcatcgatacaaaccactttacagccgcttctgtaaccaggatcaatcgccagaattcttttttctcccaatggcggagccagcagtaactgactcagattttcagagaagatctcaatcgcttttttatccgctttttctttagcttcctgtaatgcttcattggaaatagcaggttccagaagtcttttatagctgtctttaatcgctagagcaatctgttcagaactttcattattagacttgataatcgctttttcaataaaatcgatagcttcttctttatcaatcccaacgttggttttcacaaagccttcggtctccgctcttaacattgctaaaagcctgtgagaagggattctgctgaggttttcttcccattcgaaatattgggagaacttttgagcatcttcttcatcctttttagccttcacaactttggaagtaacaacagcttttcgttggaacaaacgacgcaggttcttacgaacatacatattttcattgatccattctgccatgatatctctggcgccctgaagggcatctgcttcagaaagaacctcattattcaaatattttgaagccaaaaattgtacatcattgttcttctgactcataatgattttggctaaaggtccgagtcctttttccttggcagcatcagccttggtttttttacgctttttaaaaggcaagtataaatcctccagttcttgaatatcaaagctttcttcaattctttgtctcagttcaggagttaaagcaccctgttcttctatagattttaaaatagattcctttctcttcatcatctcctcaaattgtttgctgatcttggcgatctgctcaatttgcgtttcatccaggtttccggttttatctttccggtaacgggaaataaaaggaatggtacagtcttctgctaataattgtaatgtattgttgatgctcttctcagaaatatcgagctgcttctgtataaattctacggtcgtcattgttctgttttcggaaggctaaaataatgttttacaacgaaaaaaggcgagttgccccaccttgaatagtttttcctgtgaattaaaatttaattgacaattgctattgccattccatcatattcttttgctcctacggtttgcataattgtggcggtaacttttgggttgccagccagcatttgattaaaacgctgtacccctctcactttttcatcattgctattttcatccaaaatctggccttcccggatgacattatcacaaataattattgttcccggatgagacagttgtaatgccagttcaaaatattcagtataagggggcttatctgcatcaataaaaataaagtcgaaagcttcttcacctgtagcaatgagttcattcaatacatccattgctttaccgattcgtaaatcaatctggtcagaaaggcctgcttttgcaatgttttgactggcaatatcagcgtgatgaggatcaaattctactgtaatcactctaccgtctgcaggaagtgctctggtcatccaaatagtactgtaagcacctaaagtccccaactctaatacacgtttagccttgcaggtaagaagcatcagttgaagaaacttcccctgtgtaggagagatgctgatctgaggcatggaagcatcatcgagagattgaatagtttcctggagtacactatcttcagtggctaccagattgctgatatattgatctactttttcaaataattgctgattcatattttagatttgattgaaacgaaggtagtgaattttgaaagctgttacaactgaagctatagtattaaaaataaaaatcccccgtattggaagacgagggggcttaaatgttttcacaacggaataatccttattgtgaattgcttttcaaaattattaagacaaatatagaagaaaaaatctttaatgtaattatggaaatccgtaattcgaatgatttttttatttctatttttatgtagttatgaaaaactagataattatgaagaaaattatagttggggtagatgttggagtttcatctgttggaatagcagttatgtcagaggaaaatcaaaaaaaaacaatagaaaatttagctgtaagaattgttccggaagatcctgattttcatggaaagttttactctggtaatactgcaagtaaaaaccttgagagaactataaaaagaggaatcaggaaaaataatcaaagatataaagcaagacgagataaactttgccaaactttgaaaaataacaatatgtttcctgctaataatttgttccatctttctgcaactgaactttatgggctaagagcaaaagctgcttcagaacaaatctctttacaagaattaggaagagttctaattcttataaatcagcgaagaggttttttaagcaatagaaaatctgtttcggaagaagaaaattcaactgaatataaagaacggattgctgaacttgaaaaagcattagaaaataaaacaattggtcaaaaactttattctgaattagaggaaagcaataatacttttgaggttctgattcgagagcggacttatcaaagaagttcttatatagaagaatttgataggatttgggatgaacaaaaaaagtattaccaaattttaacaggaagcccaaatgaagataataacaaaggaacattgtatgatttaattcgtaatagaatcatttactatcaacgtcctttgaaaagtcagaaaggtttaatcgctgaatgtttgtttgagaaatatcataaagcagctgtaaaaagttccccttattttgaattatttaggatttggcagaaagtaaatgatttatcttggaagactacaaatggagagacttttaaaccaacgccagagcaaaaacaaaagttaaaagatgccttatggaatgggggaaatctgaatgcaaaatacaaattatcaataactgaaatcaaaaaacttttaggttacggaaaaaatgaaaaaatatatctgaattttactgaattagatggaagcagaacctgtgcgatattaaaaaatgcgttggaagaggcaggaatagaaaatactgaacaatacctattatttaatttagatatcagtgatgaaaaaggaggtttatttgaattgtggcatattacctattcgttaccgacagaaaaagaagtggtgaatgcattaaaaaatcgtttcggattttcagaaaatcaatcgaaaattattgctaaaaaagttgggtatccttctgattacggaagcctttcaactcgtgccattcgaaaattactgccacatttggaaaaaggattaggttacagtgaggcttgtgatgaagttggctatgaccatagtggatataaaacagaaataggacttaaaccaaagttaaagcaacttaaaaagaatgaattaagaaatccagttgtcgaacaaattctaaatcaggttgtaaatgttataaaccttgttattgagaagtatggtaaaattgatgaaataagagttgagttagcgagagaactaaggaatagtgcgaaaactcgaaaaaatatttctcaggggaattcaaagaataagaggaataatgatgttataagaaaaaaacttatagaagagtatggattcaggttagttaatggacgagatgtaaagcgttatattctttgggaagaaactactcacgaatgcttgtattgtaataatcctattaatgggacagatatgcttacgggcaatgcggacattgagcatattttgccaaagtctcgttcatttaacaatgcgatgactaattatattattgctcacagaaaatgtaattccaataaaaggcagaaaaccgcttatgattttatggagtctaaaggagaagaagcattaggacaatatatagaaaaagtaaatgctttgtataatgatggaaaaggaagtatttcaaaatctaaatttgataatttgttgtgcaaaggtgaagatattccttctgattttgtggaaagaatgaaaaaggactcccaatacatctccaaagaagcggtaaaaatgctaaaaaccatttgtccgaatgtttatactacgactgggcaggtaactgattttttgcgtgaagaatgggaattgaaaaatcttttgcaggaattaactttcgataaatataaagcaattggtcagatagaagaaaaaacaataaaaaccaataatggacaaaccaaaacttttgaagttataacagattggagcaaaagagatgaccatagacatcacgctgttgatgctttgatttgtgctttaaccgatcagaaaattattttcaagcttaataatctcaacaaaatttatcaatatgaaagagatgcattgagccaaaaagaaatagaggagattgaagaatttttagaaggaaagttttctctgaaagaattttcgacacaacagggaaatatcatagaatgctctataccaaacattcgcaaagaagtgcaaaaacatcttgaaaatattttgatttcttttaaaaaagagaatagcaaggttcttacaaaaaatattaatgcacctaaaaatatagaacagaaaacaacctgggttccccgcgcaagattgcacgaagatactattatgggacgtgtaaaacgtatttctgaaaagaaaataaaactcaacgataaaattctaatggaagaaatcgaaatggttgtaaatcctgaaatcaaagaaatgctttatcagcatcttgcgaaatttgacaataatctgaaaattgcttttgatcaaaaaacgttgaaaagagaaccgatttcttataaggataatgaagtaaaagaatttggtgtttatgaatgggtaaatacgaaaagagtaaatattgaaagttttttaaccgataatcaaaaaacaaagtctgctaaggataagtttatagaaaatgttctaaaatcggatagaggaataggaattttattagaaaaacgattaaaagagtttaatggagattataaggaggcattcaaaaatttatttgaaaatcctttcattaccaaaaatggaatgaccgttaaaaatgtgacaatttatgatgaaagcaaggtcgagagagtaagaaatggttatgcaaaaacaggcggaaatcatcacgctttaatctataaagatgaaaacggaaaatacaatgataaagtagtttcattttgggtagcagtagaaattggattgttaaacatatcagaacacaataatccttatccgattataaatagaaatgatcatgatgaacttggtattttccaattttctatgcaaatcaatgatttatttgtatttgatttaaagcattctgaaaatccacaggaagaaaatgaaatcgacttttttgatgtgaagaacggaaagttgatttcagataaattgtttagggttcagaaaatgacaaagaaaagttctggagcttttgaaataacatataggcatcatttagaggcaaatcttaataggagtgataaagctttaaagggatatacttgggatgaacacggctcaaataaacatttagaaaggttaacaaaaatcagaattagtcatcttggggaaattataaaaattggagaataataaattagtataaaaatgattacccgttccatttatatcggcaatcccgcttatctcaagctcaaagacgagcagatgaagattctttgcccggaaaccaaagcagagaagggaagtgtacctgtggaggatttaggattactaatgctggatcattttcagatcacggtttcacaccagctcatccaaaaaatgatgggcaataatgtagtagtgataagttgtgactcgcatcatttgccacatggaataatgcttccgatgtatggacataccgaacattctgatagagtaaaagaccagctggaagccagcgaacccctcaagaaacagctttggaaacaaaccgtagaatgtaaaattgaaaaccaaaaagaagttctccgaatattgggaagctattacgagccgatgatagattatcaagccaacgtaaaaagcggtgatatcaccaatatggaaggcattgccgcacaacattactggaaatatcttatcagtctggattttctgaggcagcgttttggagattcacccaatcagtttttcaatttcggatattcggttctcagaagtattgtagcaagagcaattgttgaaaccgggttgcttcctgttctcggaattttccataaaaataaatacaacccttactgtttggccgatgacctaatggaaccttatcgcccttttgttgacatattaataatgcactggcttgcaattcattcagaaacggaagaattaactaaagaatttaaagcttttatcttacagattgcaaccaaagatgtgaaaatagacgataaaaccagaccgttactagttgcaataaaaacaacagctacatcactgtataaatgttatacgggagaaaaacgtctgatctcttatcctgaactgatatgaatgccgaaaggtttaacgcttaccgaattatgtgggttttagtattatatgatcttccgacagagactaaggccaatatgaaggatgcgaatcgttttcgtaaatctttgcttgatgatggttttacattatttcagttttcaatgtatgtaaggcattgcccaagtcgtgaaaatgctgaggttcatattaaaagagtgaagtttatgctaccaaaagcaggtaaagtcgccattatgtgcattactgataaacagtttggtgacattgaaatatttttcgccagaaataaagaagaacctcctccaacctttcaacagctcgaattattctaaattttgaatcctaaaaacaaaaacaatctattgattttcagtagattgttttttgaggttgtgactaatcacgaagataataatttttgaaagcaattcacaactttgtaaggcttacagtatattttatttttgttgtgactaatcacgaagataataatttttgaaagcaattcacaactcaagggaaatattggtaattatctgttcagttgtgactaatcacgaagataataatttttgaaagcaattcacaactgataatatgttcttgcgaaaatgtactatgttgtgactaatcacgaagataataatttttgaaagcaattcacaactccttcaattgaagaaaaaccccaatattagttgtgactaatcacgaagataataatttttgaaagcaattcacaacggtacatgctgtacaaattcacatctgcatgttgtgactaatcacgaagataataatttttgaaagcaattcacaacatactttctacggttgcaaatactattttcgttgtgactaatcacgaagataataatttttgaaagcaattcacaacattattggattgccggatcgaataatattcgttgtgactaatcacgaagataataatttttgaaagcaattcacaactgactcgccataataaagcgactgatctcggttgtgactaatcacgaagataataatttttgaaagcaattcacaaccggattgattaaccactaaaaaacaatacagttgtgactaatcacgaagataataatttttgaaagcaattcacaactctgtaaacttgtttgaaatttgacgatcagttgtgactaatcacgaagataataatttttgaaagcaattcacaaccattaaaacagataggatttttcaaatgaagttgtgactaatcacgaagataataatttttgaaagcaattcacaacagaccctgtgcattttcagcagattgaccagttgtgactaatcacgaagataataatttttgaaagcaattcacaactacacttaagagcctcttttcttttagcctgttgtgactaatcacgaagataataatttttgaaagcaattcacaactataaattagtttttataattcgtcttaaagttgtgactaatcacgaagataataatttttgaaagcaattcacaacctttgagctgcgtcgataacgttttccatagttgtgactaatcacgaagataataatttttgaaagcaattcacaacatgtcttgccactcacctacgacttcagcagttgtgactaatcacgaagataataatttttgaaagcaattcacaacataaaagacgttgggacttaaaacattcatgttgtgactaatcacgaagataataatttttgaaagcaattcacaactacttttccttttcagcttttaacctaattattgtgactaattacaaagacaataattttgaaatcaattcacatgtaaatgactctattgaagtaataaaaaatagaataatgtgatcattaaaaaaatataaacagttattacctttgattgctcaaaattcatattttaaacaaacatttttatgtcttcaatgtcttgggaggtttttcataccacaaaaagaacgatttcattaaacagtgacgtaattggcacacgcattgttaatgttaaagcaagttttgaagagaaaactttgtttaacaccacatcactttactaataattcattttgaacttttgcctccctattgacacgggaggttttttcttttattcattcacttttgtggaaataatttaacgatttattatattattgcagtgattggttcctgcagacaaatgctagaatggtgtggaaatgaaagtattgcattttatgcatgtaagtattatatttactttataattcctctaataaatagagtttatgattagttttaatcctcggagagatccggggatttttttgtacgctttggtctcaatgaaatgaatataaataaagaaagaaatccctctagcgagggatcttatttatggtacatagggaatacatctacaagagcaaggtataccaagctctgcatcacatatagccatgtcatcgcaagtatacaaatagccggctggacaataatcaattcctcctttaatagcttttagattttctcttgtgattttttttaattgtttcatagtataattttaatttgtaagcgctaaatatataaattattcttggttgagggatttaacatataaatatttttgggaatatctggatgtagttttaaaaccaaccaattttcctatgggtagcataaaaatcaaaataggttgatgaaataaatattttcaattttcgtttatttcttaccatgttacaattcctaacatgggtagcgaaatttacatttcttgatgtatgataagagaagacccataaggtttttctatttttgtacccgaaaacaataaacttttttaaacagttcaataatatgaaaaaaattagcgtaatcgcattagtagcagtaggattgttagctgcatcatgtaacagtaaagaaaaaacagatacagcagtagctacagaacagactgttgcagaaagtaaaggtgaagtattggcagtagatactgcaacttctttagtgaattggaaggctttccacaaaggaggaatggctccacgttgggggactcttactgtaaagtcaggagatcttagcgttgatggaggtcaggtttctgcaggaaactttgtaattgatatgaattctattaaagtagatcctgcttctgttacagaaaaagataaaaaaccggcagatcttgaagctcacttaaagaatcctgatttctttgatgtagcgaaaaaccctacttcagacttcaaaattacaagtgttacggatttaaaagaaactccgaaagacgctgtggcaggagctaataaaacagtaagtggaaaccttactttgtcaggaaaaactatgaacgttactttcccggctaaagtagacgtagctgaaggtacggctgctattcaggctaaatttactgtaaacagagctgattggggaatcaaattcgggacttcggaagctgatcctgctgaatggatgattagcaaagatatcgaaattgcgattgacgtaaaagcaaagaaataaagaaataaactttctataaatcaagagctgcctgataaaggcagctctttttcttttccctagtagaacaggagagtaatgaagtaaggaataatatttcataaccttttttcattaaaagtccttccaaaagagtgatttatttttttacagatcatcttaaccttattttaggacttgataacgcatggacggcattattttttctttccattagagataacatccaaaatcataatatcatgtcaaaaaaaattgcaattctagctactaacggctttgaagaaagcgaacttcaatcacctaaagagtatttggaacaacagggatggactgctcatgtggtaagccctgaaggagaaacaatcagatcatgggcagaaaaagattgggggaaagattaccatgttgacaaaacattgaatgaggtaaccgcttctgaatatgatgctttagttttacccggcggggttatcaatcccgatcaattaagaacaaatgggcaggcattgtcatttgtaagagatttttttatacaaaataaacctgttgcagccatttgccacggaccacaaattttaatcaatgcaaaggttgttaagggaagaaagatgacttccgtaaaatcaatcagtaaagatttgataaatgccggagcccattgggaagatagtgaggtggtggttgataatggtctggtgaccagcaggacaccaaaagatcttcctgcttttaatgctaaaatggtagaagaatttaaagaaggaaagcatgtaagtcaaggtttatagccacactaaagatgaagatataaggcccggaaattcaaattccgggccttgattatgaatgatgctgttaattaaaaatccatgaattttgaatccgtacacaatattcacttcccaaatacaaagggttaccatgtttttcagaccagaatccatccagtatgtcctgactcaaacaacggtataccgcaacacctttatagattttgtggtcatcaccttcataattaaagttaagcactaaaatatggtctttataaaatccggttccattctggatatggtcaccaatcacccattgggcaatgatgcgggcattttcatcaacggataaaattaaggtaccctgataagaaacctggtcagatgcctcctgattgcttcctttgatagaataggtgcctgccaaatcatgtactgtcattgattcattttttatgggtgtcaaatttaaagaaacttactctgataaaccgtacaaatattacgttggaaaaaagacattaaccagatggttttctctatgtataaattaaacttatttttgcagcaaattaattttataatgattccttttctgttaattactaaccttattaccttcggcgttttcggatttgataaactgcaggccaaaagacatcagtggcggatttctgagaatgttcttttaggtctttcattgatagggattataggtgctgctgcaggaatgattattttcaaccataaagtttctaaaaaatcttttcttgtaaagttttttatagtgcttttaattgatgttgtattattgtacaggctaataagacattgataaataaaaaacagccttaatggctgtttttttattaattgttaataataccaaatggcttccatgtattcgttccatcagttgtgttgacccacccgattggcatattaacagaaggaccggtattcagaataatatcacctcgcttccagtcaggagaagaaaccgaaggaaaagtatctgcataagttatttttacttttcccaaatgaagagaatcattcaagttttgatagtaaaccgttcccaggttgtcattggtaataaaattacctataatattgggactaatgccagataagcatttattgtgggtaatggttgtctttaatccggaatctgctctgatatcatatactttgaaatttttaattgaatttccccttacatcatcataaagagattcctttcccataatattaacgccaatggaggtgtcatccggtattgcattgtcgtaaattaatatatcattgtcaataattttatttcctcttgtaaatgacgaattcttgatgctattggctaaatagattccgtatccggggtgggaaagtgcaatgtaattactgttaatattccagttatggctctccgctccaatcacaattccaatatgtctgcagaaatcaatcatactgttgagtacattaacgtgagaagttttttcagcgtaaattccctgataaacattaaagataaaagtatcaataattctccagccttcttgtgaagtgcttccttcaaaaaagatacctttactgccaggtatatctataagttcttcctcatttgtctcctcgtttattactttgacatctatcgaaatgctggtattgttggaaatttcattgttcacggaattgtttttgatatgcattcctatctgacaattaccaatttttacagtctgaatttgggaagaccaaagataatttgcttccagtcctgtttgataaccattgatggcaagattttttaaaataatatcataagcatgaacctccggtgttccgattattttaataccggtaacattattaggagtggttgtgtaaagagtcgcattataaattccgaatccttccaaaacagtacccgaagcattggttgtgatctctttcccattaataacagtcttgtatgcgttaatgataataccatgattattgttggttataagaaaagggggaagacctattgtacttttagtagaggaacctgtaattttaatggctttattgatctgtaaaggctgataaagcatatatctcctgttatcaagcttcagaacctgtccggcttccatttcatcaatcagcttttggatttcaacggaatcatcggtcatgccatctccacgaacatctgcaattgtaatagaaatatcatcagtaataattcttttatagtatgaaaccggaccattgccgttttttttaatgcggtataggtattttccatcaggaacaggaagatcttgttttttaaaattggcaatttcaccactgaaaggatcaatcaaacttacaatgttaagatccgaagcaggatctgaagatgaaaaaaaagaatcaatggttaaaagatttaaattgtttgtcatttttttgtttttggtgattaataataggataatactcttgcaagaatgtattgagacaaagataaaatggagtagcgacagaacttgacgtgtaatattttattatagcatagtggaaagagctagattttaaatttagttatgattaaaaaacattttttgaattccgttttttcttacatttatcattcaacaacaaaaacaatataactatgaaaaatgtaagaaaaattaccagaagtgaaatgaaaacactgacaggaggaattgcaaaaggaatggtaagatgtaaggatcccgatacttgtatattgagatggggatggcctacaggatcttcaagtaattgtgatgaaatggccattatttgtggagatgcaccagcagttgatccatgtgattcgtctttatgtccataaccatttaagagtgttttttcaacactctttttttatacctctgtaaacgtgtattttaaacagaatgttaattatttatccaataaaattgtttttcattaaaaatcactatttttgcactcgtaaaaatcctatatgcaaaacattagaaatattgcgattatcgcacacgttgaccacgggaagacgactttggttgacaaaatcatccacgctactaacattttcagagaaaatcaggagagtggagaattaattatggataacaatgatcttgaaagagaaagagggatcaccatcttatccaagaatatttctgttacttataaagacactaaaattaacgtaattgatactcctggtcacgcggatttcggtggagaagtagaaagagtattaaaaatggctgacggggttattttgttagtggatgcgttcgaaggaccaatgccacagacaagattcgtacttcagaaagctttagaattaggattgagaccattagtggttatcaataaagtagataaaccaaactgccgtccggacgaagttcacgaccaggtatttgatttattcttcaaccttgaagctactgaagagcaattagatttcccaacattctacggttcttctaagcaaggttggttcaacacttcattagaacaaactgaagatattttaccattattagatggtattttacaatatgttcctgaaccgaaagtaactgaaggtaatcttcagatgcagattacttctttagatttctcttctttcttaggaagaattgcaatcggaaaagtaacaagaggagagcttaaagaatctcaatggatcggtcttgctcaggcagatggtaaagttgtaaaaggaaaagtaaaagaactttacgtttttgaaggattaggaaagaaaaaagtaactgaagtaaaagcaggagatatctgtgctgtagtaggttttgattcattccagatcggtgattcattcgtagatcttgaaaatcctgaaccattggaaagaactgctattgatgagcctacattgaacatgacgttctctatcaacaattcacctttctttggtaaagacggtaaatatgttacctctaatcaccttaaagaaagattaactaaagaattagagaaaaacttagcattaagagttcaacaaactgatgatgcaaatacgttcctggtattcggtagaggtattcttcacttgtcagttttgatcgaaacaatgagaagagaaggatatgagatgacaattggtcagccacaggttatcttaagagaaattgatggtgaaaaatgtgagccttatgaatctttagttgttgacgttcctgaagaatacgcttcaagagttatcgacttggcaacgcaaagaaaaggtgaccttcatatcatggaaactaaaggagagatgcagcacatggaattcgaaattccttcaagaggtttgatcggattacgttctcaaatgttgactgcaactgctggggaagctattatggcacaccgtttcacagaatataagcctttcaaaggagctattcctggaagaaataatggagtgttaatcagcaaaactcaagggcctgctacagaatattctattgctaaattacaagacagaggaaagttcttcgttgatccaggtgaggaaatctatgcaggaatgatcattggggagcaaaacaaaccaggagacttagtggtaaacatcgtggaagcaaaacagttgaacaacatgagagcttcaggaaaagataaagatactggtgttgctccaaaaatcttattctcattagaagaatgtatggaatatatccaaggtgatgaagctattgaggtaactccgaatttcatcagaatgcgtaagaaacttctttctgaagaagaaagaaaaagagttgaaag

SEQ ID NO: 2820 - DNA, 23600 bp, synthetic construct
  misc_feature 1..23600: note = Synthetic
  source 1..23600: mol_type = other DNA
aatgattttgcttgtttattataactaaaacctgcacttaaataaataatagatgcggctgcaaaaagagttacaacccctctcactatcgtccaatttttatacggcgtatcatgcggaaattttaatttgcccaacataaataaaagcaataaaaacccaatgatgatccataagcccataaataattcatacttcaatattccccaatgttcaaccaaatctgcattcgataaaaatttaacagctaatgctaattcaataaatcctaaaacaacttttactttcgagagccatccacccgattttggtaacgcatttaaccaactcggaaatgccgcaaataatgcaaatggtaaagcgagtgccaaaccaaaaccactcatgcccgcagttaattgcatagcgccaccgtcagaggttaatgatcctgcgagtaacgatcccaaaattggtcctgtacaagaaaaagaaacaagtgccaatgtaagtgccataaaaaatatgccgattatcccacctaagttagaagcggaatctgctttgttcgctaaactacttggtaatgtgatttcaaaatatccaaaaaatgaaatcgcaaacacaacaaacacaataaagaatgcaacatttaaatatgcatttgtagaaattgtatttaaaatatttgggtcaattgaatctaataaatgaaatggtaaacttaaaataacgtacaccagtaaaataaaaaatccatacagactcgcattaaataatcctttttttccttcactgttttttgtaaaaaaactaacagtaagtggaatcattggaaacacacatggtgtaagcaaagcaagtagaccacctaaaaaccctaaaataaaaattgataaatatccttttccttttatttcatctgctttaattgaacattcgctcaacggtttgttgatgtcaattgttggatgtttgtatggaaatatttttcctgaagtaggtgcaactattgtttcgtttttagcttcctctactttcgtgaaaattccatctgctaatgaaaattcaaatggaattttttttgcaagtaaacatttcacatcgtcacacgtttgaaattctaaaattccttttatatacccattcaattctccttcaaactcttgagtaaaaatagcttcgttctcgtggtatcttaattcttctttaaataaagggtccttcttttctgtaattttcgagagagaaataatttctccctttaattttaatccttgcaatgaatcaaatgaaaaagaagtaggcacaaattcgtttgactttaatttattcgcattaatatgaaaaccttttccaattgttgctttaaaagtcatgacatatttcaagggtttatcggaaacttttaatccttgaatatcccagctaacaggatcaataattccatttggtgtactgttattaaactgtggcgggttttgcaaattcaaagtaagtgctgatgtagtcgctgttgtctttgcttcttctttagctgtggttgtttttccgggagtcaccggtgtaagatcaatcccttctaatacaaattcaaaattctcatgacctggcggcaaacatctttctgagttgcatgacatgtattccaattcacctttgagtttcgttgtctttaaaatttttattttttgtgtaaaggttacttcattatcaaacgatgtcaacttcatatcaaaattaggatcgtattcttcgtgaccttttggttcttctgttttaccaatcaactcaacatctttgtttttttcgaatgtaaattttgtcggtattggtccattatctcccggcaaattttgtgtgtagatatgaaagcctccactcattgttgctttcatatatacctcataggtattatcacctgttttcttttgagagaaactccattttacgggtgtataaatttgagtgaatccaattaatggaaaaaaaagtaaaagaaaaaagcgaaaatgtttttgcataaaatttttattaattaagatgtgtgatctctcacaatgacccatttgtcatttatttttttccaaagcaaagaatagtagccacctatttgtgaatcttttcttttgatctgccatttgccaactacatgtaaagcagttgttgaaagtgtttcgtatgaaatatttgtaaagattaattctcccattaattctttgctcgaataatttttcttgtagttttccaatgtttgtttccaaccgtaagtgattcctttgctgccaataaacatcagactgtcgctgttccagtaatacaacataaaaccatcgatatcaaaattattccaggctttttcttgtttcttcattatttcttcaacctcttgttttggcaaaagtttatgttgagaaaataaatttagagaaaaggcaaataaaataaatgctaaaaaatgttttttcaatttcataagatcagattttaacacctattaccaaaatgtcatctacttgttcactgtttttcatccaatcatcaataaaatcattgaggtgtttatgttgatcagcaatagataaaccttgaatattgagaatgatctctttaaattttccggtcattaattttttctttttcggtccgccaaactgatcagcatatccatcgctaaataaataaatggtatctcccttattcaattccacatcatgttgttcaaatacctgactatcctgagttaaaccaccaatagcaacttttgttgcttttatttcttccacttcattcgaatcttttttcacgatccataaaggtctgtttgcacctgcatacgaaatagtagttgtatcttttttattttttattggaatacaacacaacgccaagtccattccatctcttgtagaagttgcgtcagaagattgacgtaaagcaattttaacgcctttatttaattcagataaaattgcgcccggttgatttgcaagatccactgcatcttttaatttctcataaccaatcatgctcatgaatgcgcccggtacaccgtgaccagtgcagtcaacagaagcaatgtatactttattttcatctacccgtctatcagagaaaaaataaaaatcgccactcacaatatcttttggtttgtataaaataaaataatcctggagatactgattgatctcttctttcggtggtaaaatagcatgttggattcgtcgtgcatattgaatactttgttcggtctccaaacttttttgttcaatcaatttgctcttcgcttcaatctcagatttttgcatactgatttcattcgattgcttttctaagagaagattcgcttttttcttttgttggaaatttctgaaaatgaaaaaagcaaaagcagccattaacaataccccaccaactaaaacatacatataaaacatttgttgctttatctctgcgtcttgaattgctttttctctgttggcaaactttagttcgttggcacgcttttcattctctgccgtttctattgctaaattttgattcgatttattaagtgcactttgttgctcttttaattcatactcttgcacttttcttactacagctaatcgctcaaattcttttgcatttctctctgcttccaactgctttttttccaactctatttgttgttgttcaaattgaagatccttgattcgtttttgttgttcagccagtgccaaatctttttcttttttctctccttcgagcttttgcgctacaatctcggcctctttctttttaagttccgcttcttttaaatcctgagcttgtttcaatgcatttatctcagccatttttttatcggcctccatccttaaattctcaatctctagttttttattatcatcggctgtttgcgttaataaaaatttggtagactcactaatgccttttacttgctttgtaaataaattgagataagctccgtcagaagtaaatttcttttttcgtttattaaaataaatttttccggctggtttgttaagcaataagctcattaaatcggtactaacagaatttgcaatattatctgtcatatgcactttccatttatcaagtttataaatagaagtgtcaaataaattatctacatccgcatcaacaataatagaatgctcgctaaatccttccttattaaatcgaatcacgtaatcaaaattcaattctaattttaattcaaaagttccatcaggtttgctttctgtttcatagatcacaaaattatctatgtctatagtaatcttaacgcctcctaattcttttcctaatttctcaaccttccctctaaaatcaagataagcgtattgatatcttctggaagaattcttttttaatttatttccctgatcatcgtaaagaaaataatctcccacaaaatctttcccttttaaaaaaccttcggctgccaatttaccatcatcactaaaaaatttaaccgctccatttggttcattatttacaaacctcatttcactttctatttttccggcactattatatgttttccaaagaccaacctttttattgttttcataataaccgtcctcaacaatttggttgtttttataaaatttatactttttcccttttttgtcttttcctaaataaacccaccgaccttgtttaacgctgttattttcaatcacattaacagtatcccccaagtacatatcatatgaagtaacaataggtttttgcgccagcataaaagaggcggttaaacataaaaatataagggcaattttcttcactacatcaaaattataatgaattttcaaataattaaataattgtttacctttgtatcagttcttttgacaaacttatcaagaaaggcctagggaaacgcccgaagaagccttaccaacccttgtaaaatgttgaattatgaatgttgaattatgagttgtaacccaattcataatttataactcaaaattcataacttttgctagaaggtgggaattcgtcttggattaaaccaagaaagataagtcggatacaattagatttaaagttaaaaatataacctaatcccttccgactaaaaacgagaagggattttttattttaatgagtgcagaagtaataaatagattcgctgatagagttgataattatatcaaatatcgcccgcattacccgcaggaattatttgattttttattggctcaacatatcatttctaaagattcagtaattgcagatattggttctggaacagggatttcttcagagccatttctaaaaatgaatttaacagtttacggtattgaacccaataaagaaatgcgtgaagcagcagaaaatttattagtaggttataaaaattttaaaagtattgatgctactgcagaacatacaacattagaaaataattcggtcgacttaatagttgccggacaagcgtttcattggttcgacagagaaaaaacaaaacaagaatttaaacggattctaaaaccaaatggaactgtgttgttaatgtggaatgataggagaactgatagcactcctgccggccggcaaggcggggatttcttaaagtcgtatgaagactttttacaattatgtggtaacgattacaaaacagtaaatcataaaaatgttcaggacaaaaagatatttgatgacttttttggggaaaataattatcatgaaaaatggttttactcatatcaggacgttgatctaaccggattaacaggtcgtgtattatcttcttcttatatgcccaacaaagggcatgtaaattatgaacatatgatgtattgtttaaaaaaattgtttgcgaggtatcagcaaaacaatcaagtgcgtttagattatgatactaaaatttattatggctctctcaataattaatataacaaattaggaactatatgaactcagacattaaaaaagaattagagaaacggatcttgatcattgatggtgcaatgggtaccatgattcaacaatacaagttggaagaaaaagattatcgcggaaaacgttttgcagattggcataaagatctacaaggcaataacgatttgctgtcaatcacacaaccaaatattatcaaagctattcataaagaatatttgaaagccggtgcagatattattgaaaccaatacatttagcggaactacaattgctatggctgattacgatatgcaagaactggtacacgaattaaattttgaatcagctaaaattgcaaaagaagctattgcggaatttaataaagagtttcccgaacaagcttccagagccaaatttgtagcgggtgcaatcgggccaactaatcgtacattatctctttcgcccaatgtaaacgatcccggattcagagcagtaacttttgatgaattggttacagcatatacgcaacaagtaaaaggtttagtagaaggtggtgcagatttacttttgatagaaactatttttgatacactcaatgcaaaagccgcattgttcgcgattcaaaattattgtaaatctattgaccgcaaaatgcctgtgatggtttccggaactattacagatgcgagtggaagaactttatcaggacaaacaactgaggcatttttaaattctgtttcacatgttgatttgttaagtgtaggattaaattgcgctcttggcgcaaaagatatgcgcccatatctagaagagttatctaacaaagctccgttttttgtaagcgcttatcctaatgccgggttaccaaatcagtttggtgaatacgatcaggatgcacatgaaatgggacatcagatagaagattttttaaaagcaggtttcataaatattgttggtggctgttgcggtacaactcctgcacacataaaacgaattgctgaattagcaaaaaatattgcacctcgtaaaaaaccaattgccgatcatttaatgcatttgagtggcttggagcccttgacattaagaccagaaagtaattttatgaatgttggtgaacgcacaaatgttaccggctccaaaaaattcctacgtttaattaaagaaggaaattacgaagaagcattatcaattgcgaaagatcaggttgatggtggtgctcaggttattgatgtaaacatggatgaaggtatgttggatagcgaagcagcgatgacaacatttttaaatttaattgcgtcagagccggatatttctcgtgtacctataatgatcgactcttcaaaatggacagttattgaagccggattaaaatgtgtacaaggtaaagcaattgtaaattcaatctccatgaaagaaggagagcaaaaatttattgaacaagctgaaaaaataaagcaatatggcgcagctgttatcgtgatggcttttgatgaagttggtcaggctgatacattgcaacgccgtatagatatttgcaaacgcgcttatgatatcttggtaaacaaagttcatttccctcctcaggatattattttcgacccgaatatttttcccgttgcaacaggtatggaagaacaccgcttaaatgcacttgattttttcaatgctacaaaatggatcaaagaaaatttacggtatgccaaagtaagtggtggtgtgagcaacgtatctttttcatttagaggaaatgatcatgtgcgtgaagctattcattccgcatttttatttcatgcaattaaaaatggtatggatatgggaattgtaaatccaagtcagcttgttatttatgatgacattgataaaaaattattagaattagttgaagatgttttattaaatcggagagatgatgcgactgaacgtttagttgaacatgccgaatcactaaaaggtattactaaaaaggaaacagaaaaagacgaagagtggcgaaaaggaactgttgaagaacgcttaagtcatgcacttgttaaaggtttggtagaatacattgatttagatactgaagaagctcgcttaaaattaggccgaccattacatgttatcgaaggtccgttaatggacggaatgaatattgtaggtgatttatttggcgcaggaaaaatgtttttaccgcaagttgtaaaaagcgcgcgtgtgatgaaaaaagcagtcgcttatttggaaccatatctgcaagcagaaaaagcagataacaaagcaaaaggaattgttggagatggtagacaaaatgcaggaaaaattttaatggctactgtaaaaggtgatgtccacgatattggaaaaaatattgttggcgttgtattggcttgtaataattatgagattattgatttgggtgtaatggtttcttgcgataaaattttagaagaagccaaaaaacacaatgtagatattattggattgagtggtttgattactccatcattggatgaaatggttcacgttgcaaaagaaatggaacgtttaaattttaaaatgccattaatgattggtggcgctacaacttccaaagtgcataccgccgttaagattgcgcagaattattctggtcctgtaattcatgtaaacgacgccagtaaatcggtgcctgttgcaagcagtttaatatctaatgaattgcgtgcagcatttatgttagatgtaaataaagattatgatcgcgttcgtgaacaaaataaaaatgcacaatcgcaaaataaatttgtttcgttacaagaagcgcgtcaaaataaattcccgattgattggagtaaagcagaaattcagaaaccggcatttattggcacaaaagtttttgataattacgacttgaaagagattgctgagtatatcgactggacgccatttttccatagctgggaaatgaaaggcgtatatccgaaaatattaacggatgaaaaacacggtgttgaagcaacaaaattatttaatgaagcaaaagaaatgcttgcaaaagttatttctgaaaagtggttaatagcaaaagctgttattggcatttatcctgcaaatactgtaaatgatgatgacattgcggtttacaaatccttcgactccgctcaggatgacaaacccgtgtatacattccattcgttacgtcaacaaacaaaaaaaccggcgggtcaatacaatatagcactctcagatttcatcgcgccaattcaaaattcaaaatttaacattcaatattccgatttcctcggctctttcgctttatcaaccggatttggaattgatgaacacgtgaaaaaatttgaagcagcacatgatgattacagtgccattatgttgaaagcaattgctgatcgtttagcagaagcatttgcagaattaatgcataaaaaagtacgtaaagaaatttggggttatgctaaaaacgaaacgttaagtaacactgaattaattaaagaagaatacgatggcattcgtcccgctccgggttatcctgcacaaccagaccatactgaaaaactaacaatttggaaattattggacgttgaaaaaaatacgggaattattttaacagatagtttggctatgctaccaactgctgctgtaagtggtttatattttgcaaatgcgaattcgcaatattttggattaggaaaaataaataaagagcaagttgaagattatgcgaagcgcaaaaatttaagcattgctgaagcagagagatggttagggcccgtgttgagttattaattgagcttttccaaagtttgaaactttggtaagcacattattcttaatgttttcgatcaaaaaaatacgtataaatacgtatttcataattgatagaattttagtataattacaacgtactaaaatacttgacatgtgcactataaaaaagtacgcctaatatctgagcatttgtcattaaaaaaattaattgaagctaatagctgaacttggtttttgatctaccggaactctttattgattattactaaaaaagaaagcgagagattgctctcccgctttagatgttttcacaacggaataatccttattgtgatttgcttttcaaaatgaactataaatataaaatttaattttaatatatgataaaaaagattttaggattggatattggggtttcttctgttggcttgtcagttgtaatagacaacgaagggcaaaaggaaattaaagaattggctgtaagaatagtccctgaagatccaaactttcatggcaagttctattcaggaaatacagcgagtaaaaatttaagccgtactactgacagaggtataaggcgaaataatcaacgcttcaagcaaagaagagatgttctttataatactttgaaagaacagcaaatgtatcctacggatatactatttaatttacctgctttagaattatatggtttacgagccaaagcagttacagataaaatatctctgcagcaattaggcagagtattaatcttattaaatcaacgtcgtggtttcttaagcaatagaaaatccaactcggaagaagaaaactcaacggattataaaaaacgtattgcagagttacaaacggaattaaacggaaagactatagggcagcagttatataatgaattacaaaggactaaaaacatattggaaatattaatacgtgaaagaacgtatttaagagtttcatatatagaagagtttgacaggatatgggaataccaaaaacaattccatccggatactttaactggcgggataaatgaagatgaaaataaaggtactttatataacatcattcgtaataaaattatcttttatcaaagacctttaaaaagtcaaaagggtttgatttcaaattgtctttttgagaaacatcataaagctataactaaatcatctccatattttgaaatttttaagatatggcaaaaaatcaacgatcttgaaacaacatttgaagatggctcaaaacttaagccaaacttagaacaaaaagaaaaactattccatgatttgttttatggagaaagtcttaacaataaatttaaattaactgttactgaaacaaagaaaattcttggccttaaaagaacggaaggatatttaaattttactgagcttgatggcagcagaacatattcaattataaaagatgcgttaataaaggcaaaaattgaaaagcctgaacaatttttatttttcaatttggataaacatgatgaaaaaggaggattacttgaactgtggcatattacatattcattgccaagtgaatccgaagtaataaatgctttacataaaagaattggttttacaattgaacaagctaccattattgccaaagccgttgggtataatgtggattatggtagcctttcaacccgcgctatacgacaattaattccacatttacaaaaaggtctgggatatagcgaagcgtgtgatgctgttggttacgaccatagcggttataaaaccaaaatagaagtaaaagaaaaactaaagcctattcttcaaaacagcttaagaaatccggttgttgaacaaatattaaatcaagtagtcaacattgtaaatcttgctattgataagcatggtaaatttgacgaaataagagttgagttagcgagagaacttcgtaatagtgcaaaaacccgaaaaaatattgccaacctcaacagcaagaataaaaaagaaaacgacaaagtacgagaaattttaaaaaacgaatacgcttttaaaattgtaaatgccagagatactcaacgatataaattatggaacgaaactgataagcaatgcctttattgtaataaccctatttcaaaaactgatttcattaacggcaacggagagattgatcatattttacctaagtcgcgctcctttagtaataacatgaataatttcattcttgctcatagaaaatgtaatagtggtaatgaaggcaaaaatcaaatgacagcttatgattttatgaaatcaaaaggtgatgaaacattcgatcaatatactcaaaaagtaaacaatttttataaagacgggaaaggctccatttcaaaagcaaagttcaagaatcttatgtgcaaaggagaagatattccttctgattttgtggaacgcatgaaaaaagattctcaatacatagcaaaagaggccgtaaaaatgttgaaaacagtttgtgagaacacttatacaactacaggacaaattacagatttcttgcgtgaaaaatgggagttaaaaaatgttttgcaagaattaagctttgataaatataaggctattgggcaaatagaaacaagagagtataaggacagaattggtgacattaaatcttacgagacaattaaagattggagtaaaagagatgaccacaggcatcacgctgttgatgctttaatatgcgctttaacagatcaaaaaattattttcaaattaaataatctcaataagatttatcaattggaacgtgaagcacttgggcaagatgaaattaaaaagatagaaaaattcatcagcgatgaaatcaagcctaataaaaaatttgatttaaaatcatttgctgatttatcagataattggtttgatcaaccaataactgattttaaaaataaagctaagaaacatttagaaaatatttttatttccattaaaaagtcatctaaagttttaagtaaaaacattaatcaacctaagcatgccgaaccacaaattacttggacgccccgtggccgattgcatgaagaaaccgttatgggcaaagtaaagaagattgcagataaaaaaactaagattaatgaaaaatttactgagattgagaatattgcacatccacatattaaatctatcataaaagaacatttattgcaatttgagaataatgcttctatagcttttgcttctaaaacccttaaaaagaaccctattaaatataataatgaagaaataaaagaagtgattctttacgaagaaacttgtaccaaaagggttgccattacagaaaatattacaactgcacaaattgaaaaaatagcggatgaaaaaataaaagccattataaaagtacgaatcaatgaaaagggcggaaaaataaaggaagcttttgttaaccttaaagaaaatccactatggctaaataaagaaaaaggtatacaaataaaatcagttactgtatatgatgaaagcaaagtagagaaaataagaaacggctatgttaaaactggtagcaatcatcatgcacttatatatagagatgaaaacggaaagtataatgataaggttatatcgttatgggaagcagttgaaataggtaaattaaatattgagcaaactaaaaaaccatatcctattataagcaaaaaagataattcagagctaggaaaatttcagttctccatgcagataaatgatttgttcgtttttgatttaaaacattccgaaaatctaacagaagacaaaattaatttctttgactcttcaaacagaaataacttaagcaaaaaactatttagaattcaaaaactttccaaaaatagcgtaggacaatttcaaattgattttagacatcatttagaaacaactgtaaatagaaatgaaaatgaattaagaggaattacttgggaacgttttcaatcaaacgatcacttgaaaagacttacaaaaattagaataaatcatttaggagaaattataaaaatcggcgaatgatcaaacgcaccctatacttcggcaatcccgcttacctccgtttaaaagacaaacagctgagtattgaaagcacagtcgatggtgaaattaagactgctactatacctgtggaagatataggaataatggttattgatcatccacaaattaccttaacaagcgggcttattcaattgttgcaggaaaataatgtgggcttgataacttgtgattacagacatatgccgcaaagtatgctgttaccactcgaaggcaatagtattcagcaggaacgctacgataatcaactcgccgcaagtgaaccattaaaaaaacaattgtggcaacaaacagttattcaaaaaataaaaaatcaagcgggaactttaaataatttattactaaaatcagactacttaattcccctccataaaaatgtaaaaagtggtgatacagataactgcgaagcaactgccgcagtttattactggcaaactatttttaaacatgtaaatggttttgtgaggcatcgtgaaggtccgccaccaaataactttttaaattatggctactctattttacgtggcacaatggcgcggagtatcgtttctgcaggtctcttacctacactcggtatttttcaccgaaaccgttacaatgctttttgtttggctgatgatctcatggaaccttacagaccttatgtagatgaaatcgtttatcaaatggtgaatgaatttggtcccgttaaagaattagaaaaagaacacaaaattattttactcaaaattccggcaatggatgtttttattgatggcgaaaaaagtccgttaatgttagccacacaacgcacagcggtgagcttggtaaaatgttttgaaggagagcaacggaaattagtatatcctgaaatatgaatataaataccgaacgtttaaacgcctacagagttatgtggacactcgtaatgtatgatttaccaacggagactaaaaaagatcggaaaatggctgcgcgtttccgaaaagatttaatgcaggatggtttcagtatgtttcaattcagcatgtatgttcgccatagtgccagttctgaaaatgcagacgttcacaaaaaacgtgtcaaaggacttttacccgaacatggtaaagttggcattttacagatcacagataaacaattcggtcagatagaattattttatggatcaaaagtacaggaattacctgaaatacctcagcaactagagcttttttaacttctcatcattgcgaacggagtgaagcactcatgccaacgcttttactatgtttttagattagtcgttatttttgatataaaactccttaacagaaacaaaaaatccggctaatggccggacatttgtttgataaaacctcgtttttttcattgataaaaagcaatcaaacccttgattttgttgtggtttttgacctacctgtttttatcaataagtcaaagatacattttgaaagcaaatcacaacacttatgatctttataatcaaagtatgaatgtttttatcaataagtcaaagatacattttgaaagcaaatcacaactaattctacaatattcggctgtgtactttcgtttttatcaataagtcaaagatacattttgaaagcaaatcacaactatattctacgaactccatttgattaaatagtttttatcaataagtcaaagatacattttgaaagcaaatcacaacaagctgaagctgaaaaatggattgaagaaagtttttatcaataagtcaaagatacattttgaaagcaaatcacaactgtctaggaaatatcatttttgaataagttgtttttatcaataagtcaaagatacattttgaaagcaaatcacaacctaggatcaacttttaaatcaacatttgaagtttttatcaataagtcaaagatacattttgaaagcaaatcacaacaaagtatccgtacttccaactactttaaaagtttttatcaataagtcaaagatacattttgaaagcaaatcacaactaagttattttattattgaaaaaatgaagctcattattaatctattaattgtattttcaaatttcctcatctcccttttttttatacctttatataatagtataaaaataatatcatgaaaaattttacactttactttttccttttttttataactgtatcctcttttgcgcaagtgtcaaacaaaaaaaatctccttgacaaaaccggtaacgcgccgcaaaaaaaatcatttgtcttcaaaaaacaatccacggttaattttagcgcattgagtgaagattacagtcctaaacttttggttactgaaatgccaaaagaaggagaagaaaaaatggaagaatacaattatcctcctaattataaaactaatcaagcaagaacaagtagtagcacttcaactttatccactttagttaagggtattaattttcaggctaatccttggggaatgagtactccaaatgataatgatgtcgccatttctgattctggtaaattaatttcggttgttaataccaatattcatgtacatgatgtaattactaattctgtttatccgtataaatcattagctgtattcacttcatcaattaatagtttgcatcaagaatttgatccaaaagtaatgtacgatccaaaaacagatcgtttcgttttagtttgtttggttggctttgttgatacaacaagtaaagttattattggcttttctcaaaccaataatcccgcaggcaactggaacttatacactcttccaggagatcctttaaacgttgggctttggagcgatttcccgatgatcgctatgaccaataaagaattatttttcagcgtaaattatttatataatgatagtacatggcaaaccggatttgttgagactttagtttggcaaatgaaaaaagatagtggttacgcaggtttgcctattggtgctacattgcatcacaatattaaattcaataacaaagccatccgaaatttatgtccggtcaaaggcggtagtcaactttacggaccaaacatgtattttgtttcaaacagaaatttagcgtcacaaaatgatagtgtgtttttagtaaacgtaactgatacaattggcgcaccatcaggaactgtaactactcaggtaatgataactaaccagccttattattttccacccaatgcgagacaaacagttactacagatgttttagcaactaatgattgtagaaatttgggtgcgttttatgaaaacaataaaattcaatttgtacataatacaatgagtccaactaatagtttagcaaccatttattatggcgtaattgataatccttctgcgccatcaccaaccgtaagaggttacatcgtacaaaatgatacggttgattttggttatcctaatatttcgtatgcaggaaattcatcgagtgataatacgtccatcattacttacgatcatagttcaaataaaattcttcctggttgctcagccattagtgctgatgcgcaaggaaatttttcgcccgttttaaaaatacaagatggttcccagtatgtcaatttattgactggtagtttggagagatggggagattattcaggttcgcaaagaagatataacaaccccggtgaagtttggatgagcggttattatggttaccattacaacatcaattatccttacgctcatgctgcatgggtagcccaaattgcaacaggtggcatagctacaaatattcaacaagtaaataaaaaagaaacttcttctgcaaatgtatttcctaatcccgttgtagacatttttagtgtgagtttaaatttacctaaaccagaatatctaagttttgaattatacgattcacaaggaaaattaataacaacacttttaaaagattgggttaaagtagaacaaaatatttttagttttagaactaacgagctttctaaaggaatttatattttaaaaattacaggaaattataatacgaatatttcgaagaaagtagtggttaaataattatagaactcttccaaagtttagaactttggaagagttggttaaccgcactaaacttatttttgattactcaaccgttacgctcttcgctaaatttcttggttggtcaacattacaaccacgcatcaccgcaatatgatatgataataattgccaagggataacagaaattaatggcactaaggtttcatctgtttcaggaatttcaattacatgatccgccgcttttcttacttcagtatcacccgctgtaactatcgcaataatttttccttttcttgcttttacttcttgaatattacttactactttttcataattagcacctttagttgcaattacaaaaaccggcatctcttcatcaattaaagcaattggtccgtgtttcatttccgctgcaggatatccttccgcatgtatataagaaatctcttttaattttaaagcgccttcaagtgcaaccgggaaactcacaccacgacctaaatacaaagcatttctactatctttatattgtgctgctatttttttgatttgatcatttaattttaaaacttcttctattttatttggaatcgcttccatttcataaagtaattgtctgaatctgctttctgcaattgttgatcttaaacgcgctacatgtaatgccattaatgttagcacggtgacttgcgcagtaaatgcttttgtagacgcaacacctatttcaggaccagcatgcgtatagcttccaccatgtgatgcacgaggaatagaagaaccaaccacattacaaacaccaataatagttgcccctttactttttgctaattcaatcgcagctaaagtatctgccgtttcgccactttgcgaaatggcgatcacaatatcatcctgataaataattggatttctgtatctgaattcagaagcatattctacctcaacaggaatacgcgcatattcttcaaataaatattctccaaccaaacctgcatgccacgaagtaccacacgccacaaaaataattcgctttgcatttttaaatttcccttcgtaatcaacaataccgcccaactgcacttttccttcctttggtattaatcttccacgcatactatctttaactgaacgtggctgctcataaatttctttgagcataaagtgatcataaccgcctttctcaatggcttccaattccatattcaattcctgaatataaggtgtaatctctttatcttttaagcttctaatcttcaactcatgtccacggcgaataatagcaacctgctcatcctccatataaactacgttcttagtgtattcaacaattggtgaagcatctgatgcaatataaaaatcatcgttgttgccaattccaataaccattggacttcctttttttgcagcgatcaatgtgtccggatcatttttatccatcacaacaattgcatacgctccaataacttgttttaaagcagcaataacagcatgtcctaatttcatgccttcatgcttttgaatatcttcaattaaatgaacaagaacttccgtatctgtttgggatataaattcatgtccgcgtttttttaatcgttctttaattgaagaataattttcaatgatcccattatggatcataacaatatctttgctgtttgaataatgcggatgagaatttatatcatttggctctccgtgtgtagcccaacgtgtgtgaccaataccaatgctcccgcttaaatctttttctttacttgcggcaacaagttcacttaccttcccttttttcttataaacagataatgttccgtcaggattaataagtgcaactccagcactgtcgtaaccgcggtattcaagtctttgcagacctttaatcaaaataggataagcatctttgcttccgatatatccaactattccacacatagtatcaaatttaacgaaaaaatttattttaaattgtttaacctaacatttttaagaaagaaatttccttatccgttaaaaaacgatatttccctcttggcaaatcttttttagttaagccggcataagacactctgtctaattttaaaacctcatatcccaaatgttcaaatattcttcttactattcgatttttaccgctgtgtatttctaaaccaatttctttttttccttctccaacaaaggcaatgtcgtctactttcacaggaccatcatcaagagttataccttctccaactgctttataatcttcaccacgcatcggtttatttatggtaacatgatacactttttttatttcatgttttggatgcattaattttgttgcaatatcaccgtcatttgtaaagagcaataaacctgtcgtattgcggtctaatctaccaacaggataaatgcgttctttacaagccggacgaactaattccattaccgttcttctttcttgcggatcatcagttgttgtgataaaatcttttggcttgttcaaaagcaaataaactttgcgttcattttttattgtagaatcagcataagtaactacatcagttggcttaaccttataacccaatgtatccactacaactccattcacttttactgttccacctaagatcaatgtatctgcatcgcgacgagaagaaatgcctgcattcgctaagtatttatttagacgaattaaaccatcatcattatgttttttcgggttgccataatccgaatctctttttttataaggtttatcaccaaagctttttttgtctttatcgtaacttttaaatcctcttccttctttgaaatcatctttcttaaatcgtttttcaccacgatcatctccatatgttttctttttttcgtaggaagaagatttctcgccatcttttttataaaaaggttttttatcgctagaatttttatcaaaagattgcccatctgtgatgcgagatcgtcttggctttacgtcctcatcctttttgtatttatcatctctgtcatacgattttttttcatgctttgaatctctgtcgtatgcctgcccgtccgtcaggcggggtttttcatcgtgtgactttttatcaaaataacttttgtcgtaagaacgttttggtttatcaccatcttctcttttgtatttatcatctttgctataaggcttcttctcaaattttgaattatcatcatatgatttcttgtcacgagaatctttatcaaagtaacttttatcataagaacgttttggtttatcaccctcttcttttttgaatttactctctctgttataagcatgcccatccgtcagacggggtttcttttcaaactttgaatctttgtcgtacgattttctttcaccaaaaggtttatcgctctttttgtatttatcatttttgctaaatgaagagcccttatcttttctgaattttgaaaaacttttatctgatccggaatcactttttttatccgaatatgatcttcttggttttgaatcatctttttttgaaaaagaagacgaatctttactaaatgatctttttgatttgcgattgctttttgaatcagagcttgatttaccgctatactttttatctgccattaccttacaaagatactctagtttattgagggataaaaggcgccgggaatgtgttttacaactaaattttcattattttgcaaaatagaaacgatgtcaaatctcgtttctccgttaaagtcaattagcagaatatattcattagctgctttgatcaaattcttttgttttttcttactcacaaacatctccggttccccaaaaacatcggttgaacgtgcttttacttcgacaattataagctcatcatttttcttagcaataatatcaacttccaattttttgaagcgccaattcatttctaaaattaaatacccctctttttccagaaaattacgtgcttccttttcgcccttttcacctaaattttgtgaattataacccataaaatatccctcgaattaattaattttcataaatttacgctaaaattcattttatgaagagactctttactatattatttgctcttattggtgtaaattattttgcgcagtcattttcgggttctattgagtttaagtattatacgcttagagacactagcttaaatacatactgggttaaggatagtaaaattaaattggatcaatactccaagaaaaacaataatacaattgaaggaagttttatatttgatttagaaggaaaggatattaaggtcgtaaacccaaaacgtaaagtttggagcgaactaaaaagtgagattcctcctgttttaaaaggaaaatgtgatgtaactaagggtaaagacaaaaccataaatggattaaagtgtcatgaatatgttgttaaaaacacagaagaaaataccatcatcacctactatctcacgacagaacattatgatttctttattccaatgatggagttatggaatagaaaagataaacaaagtatttattttagtaagatcaaaggtttagcaaaaggtactatgcctgttttaagtgaggaaagatcgatcgaagaaaataaattcgtttcaaaattagagatcaccaaattaactaaaagcgaagttgacaattccaaattggcagttcctgaagaatacaaaaagtttgatcagtaatgattaatcgcaaaaccatatttatttttatttcagttcttattttggtttttgcatttagttctgttgaagcgcagtgtgccatgtgtaaacaatcggccgaaagttccctaaaaaaagatccacactcaattgcccgcggtttaaactccggtattttatatttgatggcagtaccttacgtgatgttaggatttatattcagaaaacaattgaaagctttattttataaagttaaagctcgtttttcacgtgttgcacaatagaacgcagatgacgcagacttaataagatttgcgcagattgaaaatcattaattaagaattaccctctcggctgcaaaatcttaatccttatcaataacctttggtgctttgaaataatccgtatccttttgaggtgcattttttaatgcctctttttgagtgattgtaacagctggaatatcttctcttaaaacattttgttcgttggtcatgtatattaatggttcaacatgatctgtatccaactcatttaatttttcaataaacgtaagcatgcgattcatatcattaatgatctcttctttggcttctgcattaaattctaaacgagccaaatgcgcaacctcatccactgtttttatgtcaatcttttttgccattaaatttttgtaattcgttttgtgtaaagttaaaaactttatctcttaattcaactaaattttcatccgtcattcctaaagtggaaatgggttcacctactacaatcctcggaatacctggcctgccattacttttaaagaatccaccattctccaaaaaatgccaattatttaaattaaccaccggtataattggcacttgcttttcgatagctaatttaaatgctccatttttaaatggtctcaatacacctttatcgcctatggttccttcgggataaataataacactgatatttaaatcgattatttctcctgcttttttaaatgcgcgatgcgaatccgtaacactcttacgttttacaggaatgtcgaaataaacaaaaaaatatttaaataaaggaatttgcattagttcagatttagccatgtaaaccgccgtatgatcaacataaaacggagagaaaataatatctaagtacgacgtatgatttgaaacaataacgcatggacgaggtaaattatattttttatgtgtgtattttatttgtggatataaaaaactaaggatagaaataatacgtgcccaaaaccgtttgagtttaaacacagtttcaaacttttttgtccgcaatgcaatgtaaaatattgggaaaagaataagaaatggaataataaaggaaagcgc

SEQ ID NO: 2821 - DNA, 23585 bp, synthetic construct
  source 1..23585: mol_type = other DNA
  misc_feature 1..23585: note = Synthetic
cgttggttgtatattttatttttgttccgggtttattgggaagggttgtaatttttactggaaataagtccatatttaattttgttcccagaccattatctaaatctgtcagtttcccattattatagtaggtagtttgatttttaatattttgtattttggtttttacattctgtgaaacttcatgattagcaacttttttccaattatcaagctcattacaaggaatgtctaataatagataagagttttgaattaatgctttatctagctcgttcaatcttacaaatatttgttcaggattgattgtgtcaggattttcttttagaaaattatgtgcaaaagtcaacataggttgaaattctttccatgcaattatgttattttttttaaacttcaaagcccatttgatcaagttttttgaaatatcactggagtcatgatcataataattctttagttcattataaaaatcagaattagaaggatggttgataatatcttttaaatctgaaggaagattctttacatacataaaaaatgtacttaatgtaatagtaggcaatgtaggaattccatcacaactttctccgcttaaattctccctggggtcaaaaggctgagtagcaataccattccctgtacaaggtactgttgaacctcccccaggaacatgcgtacttccaccatctcctaagataccaccatctcctcctgtgccagggttatttgtgtcacttataaaatcacatcggtatgtcatagtcatatgaagtcctggttttacatccgctttgcagttatcccattctcctgtattccatgctccatgttcatccgcactacaatttcgtattgtaaaagtttccacaaatccacaattggtcatactggctcctttagaactggatgtttttttaaggtcggtaatgacaactttatcttttgtattaatatatcccccagctgctaaaatttgtttttcatgaggggaaatattataagatactagaatttctttataagttccatctggtaaaggagttaatactaaattttctaatatggtactatttactgagtcttttcgtataatattaaaagtataagtatgataattaggaccattttctatataggtaatgtgctctgtatcaatataaaagtttttattgtactcaatgtctttaccaaatatatttaatttagcttcctgaagtttattctgaattttaaacaattcattgtttaaaactagcctatgtttactttggtttaatttaactttcctataagtgagttgatgagtattatttttattatattcatttgcattcaaaagatcattgtttctacaggaataagaaatggcaatagttgatattaaaaatgataactttaaaataaaagtatttttcattagctaagatttgatatgaaatgtatattttagattaaattcactagtgtgtgatttttaaaatttgcaatattaagcaaaaagatccgatttagataaatgtttttctatttttcgaatatatattgaaattatttactaaacatacaataaacaccctgtaattttataaggtgcttctattgaaataaatacaaaattaaatctttaactgctgaatcatattataatgatctaagctcacgagagtatgtaatcgatctaaagatctattaattccgggtttttcaaagtaatttttaatttcaagactatcagttatcaaatgagtggaacgactagaagaatagaaaataggaatttgataatttaaaatcatcctcatttcttcttcaataatgggttgagcgtgagtttcttcattattaagaagctgtaaagccttatacgttacattttcaatatctgaccatcctttttcagagagtttatttaaaaccaatccataacaaagagtaggcttgatcgtaactctcattgtatattcctgggttgcaatttcattaaaataatctagtatttctgtatagtgattggtgataaattggatagcatctctcattccctctttaataatagacgtttttttaaaatgaggaggcatagaaaaccaattatcttctgaaataggactaaaatcaaattttccctttaatggaacatcaatttcaaagggaagaacgcctgttgaataaacagattttgaaaagacttcattagttatatctttcttttttaaaggttgaaaaatactttcaatatcaacaaaacataagccttttttacttaaaataaaattttcaaaatgagcatcggtggcagataaaagatagagaaggatggataaaaatcctatttgataattaaataaatggtcgtcttcaaaatgatgatccgtttcaatgtattcctgaagtaaaaattccccatgatggccatggtgaatatgtaggctttcaacggatgctggaaataccgatttaaatttttttataaaattttcgtatataagatagttcctgagagctccttttttgtaaactctttttttatgagtagtatggcattgtacaattcttaccacatcccactgatgatggggatccgaaagaaaagtagaaagactactattttttgaataatattgcgatatgttttcctgcgtatgaataatatttttctgaattaaagctttaatatgttcaatatgatcatttaaaaatggaaaagaagactgaaaaaatgtcacatactctttagaattttgaaaataaagctcttgcactttactaagatgttcaaaataatcatattgtgttttgaagtatataggtaaagaccttcttaaatcatcatataccaaactttctttatcctgcataatcatgcttttatagggctttttttacaattacattttcagacatgaacttctttaatacatttttaatgttttcaacatcattaatatgatgagatatagaatggatagaaaactcttcgttggtgagaatatgatccacaatttctaagctggcaagtggcagactaatattttttgttccgtttaatgagttgaatataaggttttgattatgtaatgaaaatttcaaattttttcttttacgatagatatcagagtttttcaggtccaaactaggattccaaagtaaatcattatcaggtagtataatggattgtttaatattttgttcttttatttttgctttaatttttaggacaatttcatggcttagttcatgctcttttaatgaagcaagagcactggtaagaatatcatgaatattttctgcagtgatttcagaatattgtatactttttctaaagctaggaaaaaattctgcgagctcttctataaataattgagctaattcatattttctatttaaaaccaatccaaatgtaatatgtaaagaaggttctgtttcgttacaatgtccataatggataaatcctctggggatatataaaatagaatctttttctaaagtggtatctaaaagaggagtcgtttcaaaaattttatcggaaacaatcgctttttgcctttccaagggtaaatctaaaatgggagagtatatcttccaatgttttgatccctcaatttggaccataaaaacctctgctgaatcaaaatgaggtgaaaatccctgaacattgggaggtgtaagaaatgcactgcattcaacggggcattcaaaaatatgctccatttgctcacatatttttttcaaggacaaattaaatgaagaaataaaattgatcgtaatagttgctccctctcgataatctctaatgatttcaggataagaaattgttttgttaaagagattagggaaaacgagtttcccattttttgtaatttgaatagaatcgggagactgatcaataagttttactaatatatcttgaaaatcatcataagtaaaagaaatcggtagatctccttttatagactttgtaaaaggagatttttcaaaatgattttcttgaattgttctaaatatatccatatgtaaaaaagacgtaaattcaggtttataactgatttacgccaaattaagattaatactgtagtgattcttctaattacgtactaaaatagtaggcaatacaagttgttcatgtgctgctaattgagcggatgccgttaagaaatcagattctcttatttcactactggtaggttttgcaggaataacgatgttaaatgtgtcttctgtattaaataaaacagaaaaattaacgttattaggaataggaatacctaatgaatgtaagacttcgttgggatttttttgaagagatgttttgaagtcttcatccgtccatgctttcaaaataagtttggtcattgcagatttaaactctgcttttgagatttctttttccatgaattttgtttttttggtatcttttaaaaaagtaaatactaatatacagcatttagcttatatggcaaataatttaatgctatttatggacggtatggtgaaatatttttatttattactttttgtgtgaattttttacaattaattctttttttggtgtaaaatggttagataattgttgtagataaaaagaggtggaacatctataaataagttattctctgtagagagaaaaatagtatataataaaaagaacctcccgaaggaggtttaaaaaacacaaatgataaaaaaaaacctctacttgaggtattcaaatatataaaaaactaatcatataagtgatataattataaagataaaattgaaaaaaaataataaaaattatgcatatctaacaatttgaaacattttttactactataactcctttatttaaaataaaaaaaataagatgttatgtatgggataggtgttaaaattgttttgtattaatctgaaaatcaaattgttattttgtatttgaatttttaatttaaaatattatttaaaccaaccaatcataaaaatattataaatgaaatacgaaaaagctgttcagtataaaaaagaatttttagaaaaagttcatgagtcaatacctaaatactactatattattattacgccggccatcgctaacgaaagtgagcggtatattggagaatttttgaagaatcctaagctctttaatgataaaaactctaggaaatattcttccaatgatgattatatagtagtaagctttgaaaaaagtgatgtatatgagaaaaaataggagcgactatttacttaaaataggtgtcacctatagcatttatagtgcttatcggttaaaagaaaaatccccggatttccgaggataaaaaactaataaccatgaaaactcaaattaaacatgagttgcttcttgtattgagaaaattgtgccaatatttataaaataaatatattttaataaaattttaacactttacgtcctgaatcttaaaaagttgtaaatattatgaaaaaagatggcactctatatcaaaatacattttctatataagtcgttaattgggcagattgcatattcgactttcggtatttattactcattatgagtagaatacactaattaaaaatccaagctttatatttttactataaatatggacaggtggacttttgtacatcaattgtatataaaatcttctatattttcctattgtaagtttttattttagaatattaatgtgaagtaaaagctttacatataattaaaatagtgtaattttttccatcacaattaggctagaaccaccataaaacctatatttgcagcctaaattttaaaattatgaaagaactaattgaaaaaatcaacacggaatttgaagcatttgctactgaagcaggtcaacaatcagaaaaaggaaataaagcagcgggtacaagagctcgtaagtcagctttagaactaagcaaactgtttaaagaatttagaaaaatttcagttgaagaatctaaaaaataattactagataccggcttgttgaagccggtatttttatatcatctatttcacacacatcatatttttatttccttaatccaatcaataaatcatatgaaaagaaaccatttttttacatggccatttgctgttcttgctactcaactttcgtgggctcaaataaaaatagacgccaatgaaaaaatgaatcccattgtacagagttttgtcaatgaagtcaataccaactcacaattggaaaacatggcctatgagcttcttgatggaattggtcctcgtttagtagggactcccgaaatgttagctgctaatgaatggactgccaataaattaaaatcttgggatatagaagctaatcttcaacagtttggaacttggagaggatggcagcgcggaattactcatgtagatatgacacatcctcgtattaaatcattatccgcaactcagttggggtggtgcccttccaccaaaaaaccaatagaagcggaagtgattatacttcctaaagtatcttctcaatctgagtttgatcaatggttaccttctgtaaaaggaaaaattgttttgatgtctcaatatcaaaaaaatgggcgttctgatgaacaaattaaagaatttggaactcccgaactttatgaaaaattaaaagctgaaaaagaggtggaatctaaaaattttcgggattatatgaagaatattggatatgatattactacgcttccccaagctttagaaaaagcgggtgccgttggaattgcagtttctaattggaccggaattatgggagccagtaggatttttggtgctaaaaccattaaaactcctatgattgatattgaaatggaagattatggaatgctctatagaatggccgaaaaaggggcaaaaccccaaattaaaattgaaacgaattcaaaacaacttcctgagactaaaacttttaatacgatagggatcatcaaagggaaagaaaagcccaacgaatatgttgtattatcagcccatcttgactcttgggatggagctcaaggagctacagataatggaacagggactcttaccatgcttgaaacaatgagaatattgaaaaaagaatatcccaataataaaaggacgattgttttaggactttggggaagtgaagaacaaggtttaaatggttccagaagttttattgaagataatccggaaatagctaaaggtattcaagctgtctttaatcaagataatggaacagggcgtgtagtaggaatcagtggacaagggtttgtgaaatcatacgattatataggaagatggttgaatgcagttcctaaaatggttagggataatattaaaacagattttccctctatgccagataagggaggctctgatcattcgtcttttgtagcggcaggtattccagggttttcattgggatctcttaactgggggtattttggatatacatggcatacgacaaaagatacctatgacaaaattgtttttgatgaattaaaaaataatgtagtattagcggctacattagcctacatggcatcggaagatccggaattcacaagcagagagaaaagagtaatgcctcaagatgaaaaaggagaatccataaaatggcctgaaatgaaaaaacctataaggagttctaaagattttaaataatatcaatagagtttagataaaatttgggcagtcatttatgactgccgaatttatttttattttacaaaatcatacttaattgtaccctttttctcacttcatcgacatccgtaactttgacttgtacatgttgatggagttttacaacttcactcacatcagagacaaatccatcttttaattgagaaatatggacaagaccactttctttaatacccagatctacaaaacatccaaaagccgttatgttgttgacaattcctggtaagatcatacccatttttaaatcttttatactctttaccgtcggatcaaactcaaatacttttgccgcttttcttgggtctaatcccggtttttccaattcttttaaaatatctttaatccctaaaataccaatttccggagtcagataattttccggatttatttgggcgactttttctttattagcaatcaattcatgcgttttaatacccaaatcttttgccattttttctacaattccataggcttcagggtgtacagcagaattatctaaaggatttttagcattagaaattctcacaaatgcagcggcttgttgaaagactttttctccaagtcgaggtacttttttcagttgttttctatcttcaaaagctccgttttcggctctataattaacgatattttctgccattttctctccaataccggaaacatagcttaaaagagatttactggctgtattaagattgattcccaccgaatttacacatttcatgaccgtggaatcaagctcattttttaaaagggtttggtctacatcatgctgatattgacccactccaatggatttgggatctatttttaccaactcggctaatggatcagagagccttctaccaatggaaacagcgccccgaacagtaacatcatagctcggaaattcatctctagcaattttacttgctgaataaacggatgcccctgcttccgatacgacaaaaacttgcaaaggtttatcgaatgcaatttttttgatgaaaaattcagtttctcgacttgctgtaccatttccgatagatatggcttcaatattataggcgtttaccatagacctaatttttttcatcgccattccggattcattttgaggagcatgaggataaatggtttcattgtggagtaagtcgcccttttcatctaaacaaacaatcttacaaccacttttgtatcctggatctatggctaaaattcgcttttctcctaatggaggagcaaataataattggcttaagttttcagcaaaaatctcaatggcttttttatctgccttttctttagcttcttgtaaggcttcattggaaatagcgggttccaaaagtcttttatagccatcttttatagctaaagaaatttgagcggaactttcattattagatttaataatggcattttctataaattcaatagcttcctctttgtcaatttcaatatttgtttttacgaaaccttcagactctgctcttagcatggccaaaagtctatgagatggagttctgttaaggctttcttcccattcaaagtattgagagaacttttgagcgccttcttcatcctttttagcttttactactttagatgaaatggtggctttgcgttgaaataatcgacgaagatttttacgtacatacatattttcattgatccattccgccataatatctcttgctccttggagggcatctccttcattggcaacctgatcattaatatattgtgcagccaaaaattggatatcattatttttttggctcataattatttttgctaaaggttccagtcccttttcctttgcggaatctgcttttgttttcttacgttttttataaggaagataaagatcctcaagttcctgaatatcgaaactgtcttcaattttttgtttaagctccggagttaaagcattttgttcttcaatagatttgagaatggattcttttctttttacaatttcttcaaactgtttattaagtttggaaatgtgctctatttgagtttcatcaagatttccggtcatatcttttcgatatctggaaataaaaggaatagtacaatcttcagataataattgaagagtattattgatgcttttttctgagatatgtgtatgagtgtgtataaaatgtaccgttgtcattattaaattttcgaaaggctaaattaatgtttttgaaatgaaaaaggcgagttaccccgccttaaatgttttcacaacggaataatccttattgtgaattctttcaaaatttatagaataaaaataatgattttttacttataatgggactgtttttttgaaaattttctttttaaatttattatactaaaaactaaatgattatgaaaaaaattatagtaggtttagatataggcgtgtcatcagtcggtgtagcaattttagaagaagataataataaaaaaataattaaagagctggctgtaagaattattccggaagatcctaattttcatggaaaattttactctggaaatactgcaagtaagaatttaccaagaacaacttcgaggggaatcagaagaggttatcagagaacaaagcttagaaaaaataaattatatatctttttaaaagaattagatatgtatcctgatgaaaatttgatgaaattagatgtattaaatctatataaactaagaaatgattctctaaaaagaaaactttcattgcatgaacttggaagagttttgattcatttgaaccaacgtagaggatttttaagtaataggaagtctaaaacaacggaagaaaactcatcagactataaacaagctatagctcagttggaaaaaagattggaaagtaaaacaattggtgaacaattgtatactgaacttttagaatccgataatatacaagataaagttttacgtaaaagaacatatcttagatcttcatatattgaggagttcaatagaatctggaattttcaaagtgtattttatccagaagttttaacaggtaattctgaatcgaaaagtaaaaaaaacatttattacaaattaaaaaatgaaatacttttttatcaaaggccattaaaaagccaaaaaggtcttgtctctaactgtgcctttgaaaaaggtcacaaagccataagtaaatcttctccctattttgaattgtttcgaatttggcaaaaggtaaatgatcttgaagctatttttgaaaatggagagaaatataagcctactttagaacagaagcaaattcttgtcaataatttatttaaaggaataaaattaaattcaaaatttaagctgtctgcagcagaaatcaaaaaaatattatccttgagtggacagaatgtttatcttaattttccagaactggatggaagtagaactcactcaatgattaagaaagctatggagaatgctggtttagatgaagaaaaatgcgagaagtatctacattttcatccttataaaaatgatgataaagggagtttgtttgagctttggcatattacttattctttaccaaccgatgaggaaattataaatacacttcaaaaacgttttgctttaacagaggaacaggcaattacagtagccaatgaagtttcttataattctgattatggaagtttatcaacaaaggcaataaaaaaaatcctaccgttcatggagaaaggactggggtatagtgacgcgtgtgataaaataggttatgatcatagtggatataaaacaaaaattgaattgatggacaggctgcagccaattcttaagaatagtttaagaaatcctgtagtagaacaagtcttaaatcaagttgtaaatgttattaatctcattcttcataaatatggtaaaattgatgaaatacgagtggaacttgcaagagagttgcgaaatagtgctaaacaaagaaaaagaataagtctttctaattcaaaaaatagaaaagaaaatgataagataagagaattacttgttaatgaatatcaatataaaatagttaatggaagagatattcagcgttatagactttggttggaaacggaaaggcaatgcctttattgtaataaggagattacaatgtctgactttatttctggtcaggcagatcttgagcatatacttcccaagtcaagatcttttaccaataatatgagcaattttattcttgcccataaaaaatgcaattctacaaaaaatcaactcactgcatatgattttatgaatggcaagaatcaagatatttttgaacagtatcttgaaaaagtaaatgaattatatagtgatggaaaaggaaaaattaataaagcaaaatttgataatctaatttgtaaaggtgaagatattccgtctgattttgtagaaagaatgaaaaaagatacccaatatatttctaaagaaacagtaaagctacttaaaaatatttgcgaaaatatatctacgacgactggtcaagttactgattttttaagagaaaaatggatgttaaaagagatcatgcaggaggtgaattacgaaaagtataaacttttgggactagtagatatccaaactataaaggacggggttaatcaaactaaagaaatccagataataaaggattggtccaaaagagatgatcatcggcatcatgcagtagatgcattaatctgtgctttgactgatcagaaaattattttcaagcttaataatcttaataaattttttcagtatgaaagaagtggaatgacaaaagaagaactcgaatcaaatgcaaagtttctgaatgttgacagttttgatctaaaagcttttgccgatcaaattgatgattggtcaaaaactccgatagataatttaagagaagaggttcggaaacatttggaaagcatttttatatccatcaaaaaatcttctaaagtattaagtaaaaatattaacaagccaaagaactcatctaaagaacaaataacttggacaccaagaggaaggcttcatgaagaaacggtaatgggtagaataaggcgaattgcagaaaaaaaagaaaaattaaatcagaaatttaataatgttgaaaatatcgttgatttatctattaaggaactaattgctaaaagagtaattaaatatggaaatctggaaaatgctttttcttctaaaaatagaaaagatgatcccttaatatatcaagataatgagcttaaagaagtttcagtatatgaaaatatctgtgttaaaagggtttcattaaatgaaaattttacgaatgctcaacttgagaagattgttgatcaaaaaattaaagaaaaaattattagacccaggattgaagaaagaggagtaaaaaaagcgttttcaaatttagatgaagatccaatttggttaaataaagaaaaaggtattcaaattaaatctgtaaaagtttatgaagagagtaaagtggagaaagttaggaatggttttgttaagacaggaggaaatcatcatgcattaatttatcttgatgataatgggaaattcaatgaaaaagtaatttctttttgggatgctgtggaaattgggaaatttaatatatctcaaacaggaaggccatatccaattattaatagaagtgatgatgcatacttaggaagttttaaattctcaatgcagattaatgacttatttgttttagattttaaacattctacaaatcctctagaggaaaatgaattagatttttttgatcctaaaaatagatccgtgataagtaagaaattatttaggcttcaaaagatgagtaaaaagtctagtggtcagtttcaggttgattttagacatcatttagaatctacaattgatcgaaatagtcttgctttaagaaatataacatgggaaataattacttccaatacaaatctaatgcgtttacagaaaattaagatcactcatttaggagaaatcataaaagtaggagagtaatgattacccgatccatatacataggtaatccagcttatctcaagcttaaagacgagcagatgaaaattctttgtccagaaactaaattggagaaaggaagtattcctgtggaagatttgggattgttgatgttggatcatttccagattactatttcacataacctgattcagaaaatgatgggtaataatgttgttgttataagttgtgatttacatcatttgccacacgggattatgctacctttatatgggcataccgaacattctgatagagtaaaagatcaattagaagcaagtgagcctctaaagaagcagctctggaagcaaacaattgaatgtaaaatcgaaaatcagaaaaatgttttgatgaggttggggaattattatgaaccgatggtagagtatcaaagaaatgtaaagtctggtgatgtcactaatatggaaggcatagctgcccaacattattggaggtatttgattagtttagactttcttcgagagcgttttggggattccccaaatcagttttttaattttggatatgccgttttgcgaagtattgtagctagggcgatagtggaaacaggattactccctgttttaggaattttccataaaaataagtacaatccgtattgcttagctgatgacttaatggagccttatcgcccatttattgatgtattggttatgcaatggttagaacttaatcccaacctagaagagttgacaaaggagtttaaagctcatattttacatatagcaaccaaagatgtaaaaatagatggtcaaacaagacccttgttggtagcggtaaaaacaacggctacttcgctttataaatgttatacaggagaaaaacgattgatatcttatcctgaattgatatgaataccgaaaggtttaatgcctaccgaattatgtgggttttagtattgtatgatttgccaactgaaaccaaagcgaatatgaaagatgctaaccgctttcgtaaaggtttaattgatgatggttttacattgtttcaattttcaatgtatgttcgccattgcccaagcagggaaaacgcagaagttcatattaaaagggtcaaatttatgttaccaaaagcagggaaagtagctattatgtgtattacagataagcagtttggaaatattgaaatcttttttgctagaaataaagaagaacctcctccgacatttcaacaactcgaattgttttaaattttaaattccaataaatgaaataatctactgtaaatcagtagattatttttggaggttgagactcatcactaagataataaattttgaaaggaattcacaactatccctttaccatataaaaaaaatcctcagttgagactcatcactaagataataaattttgaaaggaattcacaacttatcgtcggccttggctttacccgccgaggttgagactcatcactaagataataaattttgaaaggaattcacaacaatgaaactcacgaaatgttaaagtctatagttgagactcatcactaagataataaattttgaaaggaattcacaacatagtcttagctggccctagtgtaaatctagttgagactcatcactaagataataaattttgaaaggaattcacaacttatctagccatgttacctcagcaccttttgttgagactcatcactaagataataaattttgaaaggaattcacaactagcagttgtagtagtagcgccagcaactagttgagactcatcactaagataataaattttgaaaggaattcacaactatgaatgctcttgagtattgcatgtgggggttgagactcatcactaagataataaattttgaaaggaattcacaactcgtctaagcccgtgaacctcatcatattagttgagactcatcactaagataataaattttgaaaggaattcacaacggagcaagattcgtaattatgctatcggtcgttgagactcatcactaagataataaattttgaaaggaattcacaacttgttgtgggttataataattattcttacagttgagactcatcactaagataataaattttgaaaggaattcacaacaagtacgagtactaagtcgtacttaactccgttgagactcatcactaagataataaattttgaaaggaattcacaacctttcctttcttgtcaactctgtagcatcagttgagactcatcactaagataataaattttgaaaggaattcacaacggggcggatggatacacaactgattattatgttgagactcatcactaagataataaattttgaaaggaattcacaactatcttgacgtttgatccattcaatagattgttgagactcatcactaagataataaattttgaaaggaattcacaacctgatataaattcagattggttttgaaatagttgagactcatcactaagataataaattttgaaaggaattcacaactataccccttgtttcaatagtagcctccccgttgagactcatcactaagataataaattttgaaaggaattcacaacacgcaagctgttggatttgagaatccgtaagttgagactcatcactaagataataaattttgaaaggaattcacaactaaatcctttgttaataagtaacaaagagcgttgagactcatcactaagataataaattttgaaaggaattcacaacagtttatatgtatttgattttattgattcagttgagactcatcactaagataataaattttgaaaggaattcacaactagcagactggaatcctaagcagtctcactggttgagactcatcactaagataataaattttgaaaggaattcacaacccaactcctgttgtacttgtaacactgtcggttgagactcatcactaagataataaattttgaaaggaattcacaacgcactaattgagtttagcagcctgccattggttgagactcatcactaagataataaattttgaaaggaattcacaactgtacctggattattagtatcactaataaagttgagactcatcactaagataataaattttgaattattttttgtgcagtggggctttaagatgtttattttctgggtgtttatttataaaaaaattctttagaaactgagaaaaacgtatttcaatcatataataagtaatgactgaaataccaattgtcaatattatacagaaaaatttatagacaaataggggcaaaaactgaagcaaataagtcttatgagaatctaaaataagaaggggtataatatgaataagataaattgaataggaaattttcccgagaaaaagggtccattttgaagataatatttttgagataaaaatttgtggctgctgaatgatcgaagaaagtgtaaatgagaaaaatataagaataataacatccatctttttcaatagtaatgaaataagtataataaaaagcccccatgaaatattaatgatccttcctgacttataaaaatggaagcttaagatccctaagagatatccggcaaaacatcttacaactgcagaaagtccatagggtgtattgataagccctttgctattgtggatattttcatatactaagcctttggttgaaaatgtaatggtatcgaaaaaatatacagagtaaaataatataatggctaaaggaattattaatataaggtagtgctttcgtttttgaaagtataaaaataaaaaaggaaagataaagtataaaataagctcacaagaaagagaccaggtaatccctaaagagttaataactctgtatttttcggcaagaaagataaatgtcagagaaatataaaaaggaaaatatctccaatgatctttgaatagaaataaaaacgaaatcagaacaataaaaatcaacatagggtagattcttataaaacgttttatgataaactctttataatgatctcttttaataccttttgtaaaatacttttcataggaatagcaaagaacaaaggagcttaaaataaaaaagaaatctacagccagataaccatttgataaggtattctcaatagcttttagggcaatgttttgtgaatggggtaaactaaagtagtgatgaaaaataacccataatgcagaaattcctcttaatcccgttaatacctcaatttcttttttcatgttggaaatgaatttgctgatattttcatatgagtttttttcttgtttaatctttttagctaaaaagagttcctagaaagttagcaatttaaggttgtaaaaaaataactataatctgtaactcataggcaaatataaactgtaaaaatgaattttgcctcatttaaataatggtaaaaagggatttgttacaaaatttgattttggaaaaggcttttagactcatcataaaacgattgaaaactgtttgatagaaggttttgcagaaacgatgaattacttcacgaatcttccgaaaacatgaccaaattatctgataaaaattattattgaacaaaatttaaacacgctctaaaaacaatgtaatgtatagtttttttgaaattaaaattttcagaaaataattgaagttattttgtaaatattaaaaagtgatttattctataatgtagttttactttatttgcttattagaattagtatggatcattgaataaaataaatgtaaaaaacgatcaagttacctttagatgtaggagctattaaataaattctatatatttgtttcacaaaaacataaagatgcaaaagataaaattcttatttccaatgggtagctaccctcacttgaaagattgttttttacaaaatactcttaccaaagctataaggctaaattttacaagttcttaattttttgttattactaggttttattttagaataagtgagtttataataaaaattacaataagtttttgctacatcattgactatgatgtccgacacaatgtaataaacctttcttttcttatccataagttttcatatgataattactttatggaaagaactgttttctaatttatatcctatcattggtgtaaactatttttcgatgtatccaattgtatttatcgtataaaataagtttactatacattaaatcttactaatctatttatactactttctcttctataagggaaagcaatcattattaacattttttcgagcatgacgttgatatattggacagactttagtgcgtttgacattgatttatttttttccgtttgccattcccaccttacgccccaaattgtaaaaaagcaaatgaagtataagaataaagaatctgctgtctcctttctcttaggaagacttttactttggtatggaacgattgatcttttgggaagcagtgctccgttaacgctttgttttactaacaccgaaaagccctattttgaacaaggtcctttttttaatatcagccattccgggaattatgttgcttgtgcgattaatagcaagtataatattggaatggatctggaaaatacaaaacctatttgttatactgaatttcaggattattttactcttcccgagtgggattatattgtggattctccgtctcctactcaaaccttttataagctttggacaagaaaagaagctgtgataaaagcggatgggaagggattgggaattcctttgaatagctttagtacgctagaagatagattatattttaattccaaacattttctatttgaagagcttgatttttcttcagaatatatgggacatctcgttttgatgagtgaaagggatttttctagtaattcatccgaacatatttctcattttatcccgataaaacagcttcttataaaactaaaaaccgttccctttttactatctgatttaaattaataattatatacaacacaaatgaaaaaccctcaatttttaataaagctcactccttatcaagaatctttttatcatgaatggatgcttaatccctcaaggagtgattataatatgacctttggtcaatcaatgtctggagttctggatattgaaagactcaatgcaagcttaataaaattaataaatagtcatttattaatgaatagtaatgttgtggatatttccgatgaactttactggaaaaataggcctttattatctgaagatacccaagttctcaagtattttcctcaggagttaagtcgcgaggaattattagatttggtattacagccctttgatcttgaaaaagatcagttagcaaggttttatgctattcaattaaatgatggtaggtatagaatagtgtatgtattctctcatataatagtagatggattaagtactaattccttatatgatgagctcagtacttattataatgatcctaactatataaattcagtgagtctttctgatcaggctcgtttacatgaagaattgagtaatcaatttgatcagattttcaataaaggcaaatccgagatgaccaatttttggaaaaagcatttggatggcttagaaaatatcggatttaaatttttacagacaaggacattaaaagaatattcagatacacctcatatgaataagatcagtgagtttagatttgaatttgaagaagatctttttttaaaagtaaaacaattgacaagaagctataaactgactccttatacctatggtcagatgatattggcaatagctcttcatcgaatttctggagtggaacaactagggatcaattatccgataggtataaaggaaggtcaaagttttatatttggcgcccatgtgaatacgataatcaaaggctatcattttacctctgaaacaactctttccgatcttattgatcaaaatctagattatgttacagatttaaagaaaacaaaaggacagtacctacctatcgcagagcttattaggtatgctcctacctctgatgtattagaatttagttttgttcaggctaatcttaaagatcgtactattaattatgaaggggtatatgatatagttattaataatgagttgaatatagacttgttagggaaaattatatttgaacaggaaataaaagagaatcgtttaaactacagggttaaatatgatacttttgaactagattcggaattagtttctcaatttatagaagtttacaaaagattatttgttggggtattacatgatatattggatcatacaatagatacacggatatcttcttatgaattattagataaagagagttaccaaactattcttcatggctggaatgcaacgagattagaatacgacaccaatgttacgcttcatgagttatttgaaagacaggtagagaagactcctgatcacattgctttggtgtatgagaatgttaagttaacgtatagagagcttaatgagagatcaaatcagttagctcattatttactacaaaaccatcagatccaaccggatgaattgatccctctatgtttagaaagatctgagcagatgcttgttgccatcttaggtgttttgaagtcaggaggtgcctatgtaccgatggatcctcattatcctatggatagaatagagcatattctgggagataccatgaccaaattggtaatcgttgaagaaaatacaaaagacagattatatgattataaagaattaatagaaacagaagcagaatcttcaaatctgagtatcattagcctggatacttcagagatgaaaactgaagtgattacttgttctacagaaaatccaaatacagaagtgagttcggaagatttatcttatgttatttacaccagtggaacaacaggaaagcctaagggagtgatgatagagcatagtggagttgtgaacttgatttctgatttatatttacgttgtgagttaaatagtgaagatgttattcttcagtttgctaattatgtttttgatgcttccgttgaacagatgtttttatctcttttacatgggaatactttggttttgatcaaagataagagttatttgaatgaggagctatttctgaaaactctctcagatcatcatgtttcttatatggatttaaccccttcggtattaaaagggattgatgtcacgaaagttaagagtttacgtgttttgaattcaggaggaaagtatctcactgatgatttatatgctcgattacaaaataaacattttaaattagttaattgctatggccctacagaaacaacaattacgtctattgttaatacgggaaatggcttcaataatataggacgtgctatagcgaatactgcaacctatatattggatgcatatttacgtccagttcctgtgggagctgtaggagagttatatataggaggagttggtttatcaagagggtatctaaatcttccagagcttacagcggagcgttttctattgaaccctttccagagtgaagaggagaaggagagaggttataatggacgtatatataagacgggagatttagggcgttatcttcctggaggcgatttggaatatataggcagaaatgactttcaggtaaagataagagggtataggatcgaattaggagagatagagaatggattattgagttatgaagggattagacagagcgttgtcttagccaaagagcacagttcagggttaaaatacttagtaggttattatgtatcggatacagaggttaatcctgaaggcttatctgtgcatttatcaggcttacttcctgaatatatggttccttctgtgtatgttcatttggaatcacttcctcttacaattaatggaaagttagaccgcaaggttttaccagaaccgagcttcacaggagataaagaatatatagccccaacgaccactcttgaaaaacaattggctgagatttatggagaggtgttaggtttaccggttgaaaatatcggcttacatgatgatttctttcgattgggaggagacagtatcatcagtatccagctagtgagtcgtttacgaaaacgattatcgttatctttaagtgttaaagaagtctttacctatagaacagtatatcatctttctgagctcttagaaagtagaaagcatgaagagggagtgtctcttattacagagcagggaatattagaaggtgaagtttcattattaccgattcaggaatggtttttccatgaggtagagttgggagaacattttacctcttttcatcattggaatcagtcttttatgattcatgtccctgaattggatatagatatattaaaacaaagtcttttacaattagtagataagcatgatgccttacgactctattatcctaagacagagcatggctatcttcaagagtataaaaaagaatctttctttccttcattacgtatcttggatcgtaggggtcttaaagatgaagaattagtagaagtctttacttcttggcagagaggatttgatatcgttgcagatcctttatttcatgtaggatatatccatggttatgaagatggaagttgtcgtgttcatttctgtttccatcaccttattatcgatgcggtgagctggcgaatcttaacagaagatcttcagacgatgtatagatctcttctggaaggaaatacaaaaccagagtatgtaaaaggaagcagttaccgtcagtgggttgatgtggttaagaggtataagcaagatagtcctagctctcgagaagaagagctaacgtattggaatcgtattatagagaatacgaagaagagtagtcttcatatcaagagtcttagtagttctcgttatcatcattctgatatggtattggataaagactctacgagtcgtttacttcgagatattcatggtgtatatcatacccggatcaatgatatccttttatcagctttctctttagctctttgtgatttcacgggtttgtctaatcatggtattttgttagaaggtcatggaagagaggatatctttaaaggaatg

SEQ ID NO: 2822 - DNA, 23579 bp, synthetic construct
  variation 15108..15117: note = n is a, c, g, or t
  source 1..23579: mol_type = other DNA
  misc_feature 1..23579: note = Synthetic
cctccccaaattacattttcgcttttaagaatatgtacattcgggtatttatttagaaaatctgttacttcttccccgatttgttcatttgcttttttatcaatgtgaataagataaaaattagaagaatcgtagatggctttaaaaagttttttgaattggttgggtaaacggtgtactaagatcaggtaagcaatattgataggtttcatcgggatatttccgatgctgtgcccatcgctctcgcttatgtaaacatttttcaattttatttaatttaaatttttaatgtttacaacttattttataaagtattaatagacatttttataaatatacaataattaaatgatttttttgtttaaaattctttatgatttattggaaaattgatttaatttcaaattaaagagctgtttttttgaattaaattaaatgattttttaccagagctaaaataaaagtattaaaaaattaacagacatacatctgactaaatatttaaaatgggtatttataagagtataaaaagattaattttggttaattctcacaaattttttcttcacaattaggctggaattaccataaaacctatatttgcaccctaaattttaaaaataatgaaagaactaattgaaaaaatcaacgcggaatttgaagctttcacaactgaagcaaaccaacaagcagaaaaaggaaacaaagcagctggaacaagagctcgtaaagcagctttagaactaagcaaattgttcaaagatttcagaaaagtttctgttgaagaatcaaaaaaatagttgttcccgaaccggctttttaagtcggtttttttatttcattaaattaaaattcagctttaaattttctcttatttaaggcaattttctccttttattttatattccggtcgaatctttttatctttaaaccaatcaataaaactatgaagataaacagattttttgtgatgcccgcgatggttgtggcaacacaattttctttggctcagacggctgcaggtactcaggaaaaacttaatccggttgttcaaaatttcgtgaatgaagtgaatagtaattctcagctggaaaacatggcctttgaacttcttgacgggatcggacctcgtctggtagggactcctgaaatgttggcggcaaataactggacggcaaataagcttcgttcctgggatattgaagccaatctgcagcaattcggaacgtggaaaggatggcaaaggggaatcacgcatgttgatatgacctatcctcgtgtaaaaacattggctgcaacacaattggcttggagcccatctaccaaaaaggcaatcgaagctgaagtgattattctcccaaaagtatcttcaaaagctgaattcgacaaatggctgccttcagtgaaagggaaaattgttcttattgcgcaatatcagaagattggccgttccgatgaacagatcaaagaatttgcaactccggaactatatgagaaattaaaaaaagaaaaagaacaggcttcaaaagattttcagaattatgtgaaaagcattggttatgataacaatacccttccggaagctttagaaaaagccggagctgccggaatttccatttcaaactggacagggattatgggagcaaaccgaatcttcggagcaaaaaccacaaaaattccaatgatcgatattgatgttgaagattatggaatgttgtacagaatggctgaaaatggtcagaaaccaagaattaaacttgaaactcagtcaaaggtacttccggaagcgaaaactttcaacacaatcggaatgatcaaaggaaaagaaaaacccaatgaatatgtcattctttctgcccatttagattcttgggatggtgctcaaggtgcgacagacaacggaacaggagttttgacgatgcttgaaaccatgagaattctgaaaaaatattatccggataataaaagaacaattgttgtcggactttggggaagtgaggagcagggtttaaacggatcgagaggttttgtagccgataaccctgaaattattaaaggagctcaggctgttttcaatcaggataacggaacgggtagagtagtgaacataagcggacagggttttatgaatgcttacgattacatcgggaaatggctgaacgccgctcctaaaaatgttaaagatcagatcaaaacagattttccgggaatgcctggaggaggaggttcggatcatgcttcgtttgttgcagcgggagttcccgcatttggtttaggttctttgaattggggatattttggctacacttggcacacgactaaagatacctatgataagattatttttgatgaggttaaaaataatgtgattctcacagcaactttggcttacatggcttcggaagatcctgaatttacaagcagggaaaaaagagcaatgcctcttgacgacaaaggacaggttacaaaatggccggaaatgaaaaaaccgataagggattctaaggattttaaataatagagaatataaacttcagaataattaataaaaaagcaatctgataacaccttttaaataagacagatttaataatttagcaaaataattaaaatttaaaatgaaactaataactacaattttaacagtttgtactgtaatatcaagcatttttgttttttctcagagcacaaacgaaactaaaggtaaagaaattattgaaaaagctgttaaggctacagggggcaaagggcttctgaacagtataaaaactctttattctaagtcttctacaataacagatggaagaaatgtgaattatatcaccaaagaaatggctccaaatatgggaagctttgaggtagaatatcagggaagaattgtttacagatcttggtttgacggtaaaacaggctataatatggtaaatggtgagaaaaaagttgctgaccaggaagagtttaaggataagctcgatagaaaatatattatgaatgaattagcttatctggatcctacgatgtataatgttgagtttgtagaaacggataatgatcaaaaacttcataaaataaaagcaacggctaaagatggaagtattaccaatttatattacgataccgagagttttttattaaaaaaagaagtcaaagaaaacccttcgaagggttctttttcaacaattctttgtaatgaatataaaaaatttggagatcttctttactgctcaaaaaatacatttcagtctgaggatggagaccaagtagtgaccttaattgatttatactataacaaaggcattaaaagagctgatttcaaatattaatcatagaaatgttataattttcaataataaagagcggcttattcaataagtcgctctttatttttaggtagttcaacatcaagtaaactctttatttctgttattttgctttcttttacgatgtaagttttacagattttattgttgagatgcatactgaaattcattcgggttcctgtccgtcttcccatagcaacagtttttacagtatattctgaaaaaacaggatagaaattagccagacataaaaggtttctttgtagtgattttaataatttaggataatttccctcatcatcaattactttcattctgaagattttctttcctaaagttgttccccaataaaattcggttgttgatcctaaaataatcacacaaggaatagaaagtaaaatactgacaataagaattttattgaatataaaatgaaaaattaaagtaaacacagccatatcgatccacttggcaaacaatctttgggtttcatttcctttaaaaccaggattataggctaaataatattcataagcatgatagattcttttcccgtactcgtcgaaatccggagtcggtctgtggatgatttttctttctttaatttctgatattttcaagcccgaatttttataaaatcatactcaactgaatcctttttcttgcttcatcaatttcagttactcttacctggacatgctgatgtaattttaccacctcattcacatcagaaacgaaaccgtcttttaattgagaaatatgaaccaatccgctttctttaattcccaaatctacgaaacatccgaacgctgtgatattattcacaattcccggtaagatcattccgatctttaggtctgtgatctttcttatattcggatcaaattcaaaaactttcgctgcttttcttggatctaatccgggttttaaaagttcttttaaaatatctttaatacttaaaattccgatatcttcagtaatatatttttcaggttgtaccaatgcgattttctctttattggcgatcagttcattggttttaattccaagatcttttgtcattttttctacaattccgtacgcttccggatgaactgcagaattgtccaaaggatttttagcattattaattctcacaaaagccgctgcctgttgaaaagctttttctcctaatctcggaactttttttaattgtttcctatcttcgaaagctccgttttcagctctgtaattgacaatattttctgccatcttttcaccaattcctgaaacgtagctcaataaagatttacttgctgtatttaaattaattccgacagagtttacacatttcattacggtagaatccagttcatttttcaattgagcctggtcgacatcgtgttgatattgtccgactccaatggattttggatcgatttttaccaactccgccaacggatcggccaatcttcttccgatagaaaccgaacctcgaaccgtcacgtcatagctcggaaattcatctcttgcaattttactcgcagaatacaccgaagctccggcttccgaaactacgaaaacctgcaaaggcttgtcgaacgcaatttttttaataaaaaactctgtttcacggcttgctgttccgtttccgatggaaatagcttcaatattataagcattcaccatcgatctgattttcttcattgccattccgctttcgttttgaggagcatgaggataaatggtctcgttgtgtaaaagatctcctttttcatccagacaaacaaccttacatccgcttctgtaacccggatcgatcgccagaatcctcttttctcccaaaggtggagcgagtaacagttgtgttaagttttcagagaaaatttcaatggcttttttatcggctttttcttttgcttcctgtaaagtttcgttggaaatagcaggttccaataatcttttataactgtcttttatggctaatgaaatctgttctgatgtttcgttattagatttaataactgcattttcaataaaatcaattgcctcttctttatcaattccgatatttgtttttacaaaaccttctgtttcggctctcaacatggctaaaagtcggtgagaaggcattctgttcaggctttcttcccattcgaaatactgagagaatttctgggcatcttcttcatcttttttagccttaaccacttttgaagtgacaacagcttttctctggaacagccggcgaagattttttctgacgtacatattttcattgatccattctgccatgatgtctcttgcgccctgcaaagcttcttcttcagatgaaacctgatcattgagatattttgaagctaaaaactgtaaatcctgaactttctggctcatgatcattttagctaaaggttccaaacctttttcttttgcagcatcagctttggttttctttctttttttgaaaggcaaatacaagtcttcaagctcctgaatatcgaaactttcttcaattctttgtttgaattcgggagttaaggcattctgttcctcaacagactttaaaatagtctcttttcgttttacaatttcttcaaactgtttattaagctttgaaatctgttcgatctgtatttcatcaagatttccggttttatcttttcggtagcgtgaaatgaaaggaatagtgcagtcttctgctaataattgaagggtcgcattgatgcttttttctgatatattgagagtttgctgtatataagtaattgtgttcattcgaaaattttgaatggctaaagtactgacttttttataaaagaatacagactttcaaaacaaaaaacagcacatcattgtactgttttaattttaaccacaaaagaagcaaaagcttttataaatgacaatttaagttatgaaaaaagtttacaaagaataaaaatcaaagatttttaaagacttgtgtgttcttattttcagtctattatcacacttaaaaacatttagtatgctaatcttttaatacttttgtggtttaaaaattaaagaacttatttaattatttcattgtaataaataggagtatagtccttttcatcataacccataatgatcactttataatttttcgcatcgtcattattaaagaattgtactgtagcaggttctttagactgtgtctgcaaagatggattccaataaaggacattgcggaaatcatgagaaatattggtaaaaccttcatccccgtaaaccggatttacaaatggtgtttctttatcgaaaccgtttaaagtaatctgtcttaattttgtaggggctgtagaatcacttacagaacctgtaattcctcctcttttggtataaattgcaatagctccgtttccgccaccaaaaccacctgcaaaaaagcctttgataacttttaccatggcaatatctgatgttgaaattgaattgatctgagaggcatcaaccttcatttcgtccagataaatgcttatttcgctgcctcttaattttggaatgaattctcccatactcgattctatggtcaatccggcaactctgccctgcaaccattgcaaaatgttgatagatccctgagcactgttgttatcatttacaaaatcaaaaatcatatcattagcactttggaataaaggaccgcttagtttttcattaagttctttggtcttgtctttttttatgccttttaactttacttcttcgataagagtagctttttcattgattaagctttgattgttttttgttgcaatatacctttctatttggctggtcggctgctcttcggcggaacgctgtaccagattataattactttccggcagactgtttttgtaaggaacgaaagcataatttggctggaaaattacctgaacctgttctttaggtattttgggatcattcaattgataagagaatttaattgaatcttcaaaaaataaaccgtttaaagagaaaaatccattcgcatcagtttttttctgataaaactttatcccctgatttggtgtttgaaacaataggttcagatctgtattgggagccgctttcccctgaacggaaacttttcctttataagaaatatagggttcgggtttatatctgataacaggataaactcccgtcatgatggatctccagtcaaatcttttccatttttctgaaattaaaagagcatctaaagccgccgaattatgatttttagtaaagtattgcgatggtgtatatattttcgatgtgatgtcacccgttaaccataatgtacttagtaaactgttttcatcttccgaactgtctgaatttccgtcaagcacgagaacagtataaggtctgccatcggaagtttgaggtaggccaaatgagtttgaagctcttggagattcattgagagataaagattgtagtaccggattttttatctttaatacatcaggctggacaaagcaaagtctttgagcaacaatattttccttatcatcaaacacggtaagctgtaaaattccgttgatgagctggtttgcgggaatagagtaggtttgttctaatatttttgttgattttactttaaaaaccaattgattactaattgtagcgatcactttatacagtgttcccggagcaatgttttttgattttaaagcaaatttaacggcatcattactgcttacaacctgaaggtttatccctgaatctgatacattgggtaagtcgatggtctgtttatttccttttgagtcatctacgatcaactgatatttcgttccggcttttggagttaatgaaaatgaacctatattttgatcaaagcctttaaatgaagctatctttacatcaggttttgctgtatctacaatataaccattccaatcggatggtggtaatccttttgactgcagacgaacggcaaattttgtattaataccatctacaaaagttccgctttcaggaaaaacagaggcggtccatctcgaattgctgtcgatcacaagtttttgaggagaagaaggattataaactataatgggtcttaaagcctgaaaatcttcattaaaattggtcatccatgttgtgtaggctctgacgtagtaaatatcttcttttaaattgtccggtaacgtaaaacttccgctgccttctccgttaattaagggaactaattttttgctgatctgggttttattcctgtcatacaattccacaaataaagaagtagaaatcgttgaagggctgtatccatcaaaaacaaaagatttgaaccagagattttcccccgcgatataactgtttttattaaaaaccaaatgtattttttcctgaggatatttctcagtaaatatttctaaagcgctttctgccttatcctgtgcatgaaaattactaaaaaaacttacaaagaataataaaggtaacagtttctttgacatagcaatagagattatttgcgttaaaaataataagtattaaaagtacattatttgaaattttaatacaatgcaaacgattacaaaatacattaaaatattattaaaattattgatctaagattttagtttcaataaagaaattacagtaattggaaatttattgaatttattgatgtatggtaatgaaataaagtatttatgtttctatttttgaagtcttaatatgtaaagaataaatttcttgtcggaaatttcattttgcttatatttagaaaaataaactttttaaacaatttaaataatatgaaaaaacttagtgtaattgcattagtaggagttggattgcttgcggcatcttgtaacaaagaaaaatctgcagagaatgctgctacagccacagaacaaaaagttgctgaaagcaaaggtgaagtactgacagtagacgctgtaggttcggtagtaaactggaaggctttccacaaaggcggaatggctcctcgttggggaactcttagtgtaaaatcaggagatttaagcattgaaaacggaaatgttgcagctggaaacttcgtaatcgatatgaactctctaaaagttgatcctgcttcagtaactgaaaaagataaaaaacctgcagatcttgaagctcacctaaaaactcctgatttcttcgatactgcgaaaaaccctacatcagacttcaaaattacaagtgtaacagatcttaaagaagcacctaaagacgctgttgccggagcaaataaaacagtaagcggaaaccttactttatcaggaaaaacaatgaacgttacttttcctgcgaaagttgatgtaacagaaggttcagcttctatccaggctaaattcactgtaaacagagcggattggggaatcaaattcggaacttccgaagcggatcctgcagaatggatgatcagcaaagacatcgaaatcgctgttgatgtaaaagctaaaaaataatattgttagattatagaatcatggaagctgccttttttaaggtggctttttttgtatataagtttttgttgttagcctttaaaataaaaaaaggcgagttgccccgccttgaatgttttcacaacggaataatccttattgtgaattgcttttcaaaattattgatacaaatatagaggaaaatttcttatgtcgatttacgggaaaccttattttttataaattttttctttctatttttatgttttaagaaaaaactagataattatgaaaaaactaattgttggattagatgtaggagtttcttctgttggtgttgctgtcattgaagaagaggataacaaaaaagaaattaaagaattagctgtaagaattgtacctgaagatcctaattttcagggtaagttttattctggaaatacagcaagtaaaaatttacctagaacaacttcgagaggaatcagaagaggttatcaaagaacaaaattcagaaaaagtaaattatatacttttttaaaagaattagatatgtatcctaatgaagagttgataaaattagatgaattaaacctttataaattaagaaatgattctttagaaagaaagctttcattacaagaatttggaagagttttaatgcttctaaatcagcggagaggctttttaagtaatagaaaatctaaaactgcggaagaaaattcttctgaatataaacaaactattgctcaactggaaagtaatttagaaaataaaactatcggtcaaaagctttatgctgaaattgtagagtctgaaaaaatattatgtaaagttttacgtaaaagaacatatctgcgatcttcttatcttgatgagtttgatagaatttggaattttcaaagcgtattttatcctaaagttttaacgggaaattctgaatcggtaaataaaggaacagtttatcaaagattaaaaaatgaaatacttttttatcaaagaccattaaaaagccaaaaaggtcttgtatctgattgttctttcgaaaaaggacataaagccataagtaaatcctcaccttattttgaattgtttcgtatctggcaaaaagtaaatgaccttgaagttacttttgaaaatggagataagtataaaccgactttagagcagaagaaaaatcttgtcaataatttgtttaagggaataaaactaaattcaaaatttaagctatcagcaacagaaatcaaaagaattttattatttaacggacagaatgtatatctcaatttttctgaattagatggaagcagaacttattcaataattaaaaaagctctaaataatgcgggtttaaatcaagaagaatgtgaaaagtatctacattttaatccttatgaaaatgatgaaaaaggagggctgtttgaattgtggcatatcacttattctttgccatcggataatgaaattataaatacacttcataaacggtttaattcaaccatagaacaggcagctataatagccaatgaagtttcttataatgctgattatggaagtttatcaaccagagcgataaagaaaattcttccctttatggaacaaggttttagttacagtgaagcttgcgataaagtaggttatgaccatagcggatataaaacaaaagttgaattaacaaataaacttcaacccattcttaaaaataccttaagaaatcctgttgtagagcaagttttaaatcaggttgtaaatattgttaaccaaattattgataagtatggtaaaattgacgaaataagagttgaacttgcgcgagaacttagaaacagtgctaaacaaagaaaaaaaataagtcttgctaacttcaaaaataaaaaagaaaatgataaaataagagaattacttattgatgaatatcaatataaaattgtaaatggtcgagatattcaacgttataaactttggatggaaacagacagaaaatgtctttattgcaataaagaaattacaatgtctgactttatttccggacaggcagatcttgaacatatacttcccaaatcaagatcatttacaaataacatgaacaattttattctcgctcacaaaaaatgtaattctacgaaaaatcaacttactgcatatgatttcatgagcgggagaaataaagaaatttttgaacaatatcttgaaaaagtaaatgatttatatagtgatgggaaaggaaggataaacaaagcaaagtttgataatcttatttgtaaaggagaagatattccttctgattttgtagaaagaatgaaaaaagattctcaatatatttctaaagaaacggtaaaacttcttaaaaatatttgtgaaaatgtaaatacaacgacgggacaggttacagatttcttaagagaaaaatggaagttaaaagaagtaatgcaggaagtgaattatgaaaaatataagctgttggatctggtagataccaaaattataaaagatggcattgatcagacaaaagaaataaagataattaaggattggtcaaaacgagatgatcatcgccatcatgcggtagatgcattaatttgtgctttaaccgatcagaaaattattttcagacttaataatcttaataaattattccagtacgaaagaagcggaatgactaaacaagagttggaatcaaatgcgaaattcttagatgtagagagttttgatttaaaagcttttgcagatcagattgacgattggtcgaaaactccgattgaaaatttaagagaggaaaccagaaaacatttagatagtatatttatttctataaaaaaatcttcaaaggttttaagtaaaaatattaatagaccaaaagattcactgaaagaacagataacctggacaccaagaggaaggcttcatgaagaaacagtaatgggaagagtaaaaagaattgctgataaaaaagaaaaattaaaccagaaattcaataagcttgaaaatattgtagactcaactattaagaaattgattgtagaaagaattaataagtatggtaattctgagaatgctttttcttctaaaaatattaaaaatgatccattaattcaccaaaataatgagcttaaagaagtgtcagtatatgaagatgtatgtgtaaaaaaagtttcattaaatgaaaactttacaagtgctcagttagaaaaaattgttgactataagattagagaaaaaataatcagacctagaattgaagaaagaggtattaagaaagctttttcaaatttagatgaagatccgatttggttaaatatagaaaagggtattcagattaagtctgtaaaagtttatgaagaaagtaaagttgaaaaagttagggaaggctttgttaagacaggaggaaatcatcacgcactgatttaccttgatgataagagtaaatttaatgaaaaagtaatttccttttgggatgcggtagaagtaggtaagtttaatatatcccagactggaaatccatatccaatcattaatagaaatgacgatccagaattggggagttttaaattctcagtgcaaattaatgatttatttgtcttggatttaaagcattctcaaaaccccatcgaagaaaacgaattagatttctttgatattaaaaatagacctgttattagtaaaaaattattccgacttcaaaaaatgagtaaaaaatctaatggcacttttgaaatacattttagacatcatttagaaacaacaattgacaggaatgataaaaatttacgaggcattacttgggaaatatttcaatcaaatagttatttgattagactagaaaaaataaaaataaatcacttgggagaaattataaaagtaggagagtaatgataactcgttctatttacatcggcaatcccgcctatcttaaactcaaagacgaacagatgaagatcctttgtccggaaaccaaaacggaaaagggaagtgttcctgtggaagatttggggttattgatgctggatcattatcagattaccatttcgcacaatctgatacagaaaatgatgggaaataatgtcgtggtggtgagttgtgatgcgcatcatttaccgcacggaataatgcttccgctgtatggacataccgaacattctgatcgggtaaaagatcagttggaagccagtgaaccgctgaaaaagcagctttggaagcagacggtggaatgtaaaatcgaaaaccagaaaaatgttttggtaaaactgggaaattattacgaaccgatgattgaatatcagagaaacgtaaagtcgggtgatataacgaatatggaagggatttcggcgcagcattactggaaatatctgattagtctggattttttgagacagcgttttggagattcacccaatcagttttttaattttggatatgcggtgcttagaagtattgttgcaagagctattgtggaaaccggactgttgcctgttctcggcatttttcataaaaataaatacaatccctattgccttgccgatgatctgatggaaccctaccgtccgtttgttgatatattggtgatgcaatggctggaaatttattctgatacggaagaactgtcgaaagaattcaaggctcatattctgcagattgcaacaaaggatgtgaagattgatgacaaaacaagaccattattagtggctgtaaaaacaacagtaatttcgctttataaatgttataccggagaaaagcgtctgatttcttatcctgaattgatatgaacgccgaaaggtttaatgcataccgaattatgtgggttttagtattatatgaccttccaaccgaaacgaaagcgaatatgaaagatgcaaaccgttttcggaaggcattgattgatgatggatttacattgtttcagttttcgatgtatgtacgacactgtccgagtcgcgaaaatgcagaagttcatattaaaagggtgaaatttatgcttccgaaagccggaaaagttgccatcatgtgcattaccgataaacaatttggtgatatcgaaatcttttttgccagaaataaagaagagccaccgccgactttccaacaactcgaattgttctgaattttaaatcctaaaaacaaaaataatctactgaaaaccagtagattattttttgaggttgtccttcatcactaagataataatttttgaaagcaattcacaactggccgttgcctcgagtgtcgccgtagaaagttgtccttcatcacgaagataataatttttgaaagcaattcacaactccaaaatggtctgtatagctgtaaatatacttattatttaaaaaatctttattaacataaaaataaaacaggcaaccattagattacctgtttgtgtattaattttatttaaaattatnnnnnnnnnnaatatacttattatttaaaaaatctttattaacataaaaataaaacaggcaaccattagattacctgtttgtgtattaattttatttaaaattatttttgttgatgaataaagaagataaatacatttgacgcattaccaacgacaatttagttactcatgattgatgaagaacttgggatctttatattcttttttataaataaatcttttactttgtctttagctgtttgattatttagctcatatgcttttaacagataaaaaagcgaaagatcgttatctttttgagataagtatccattttttttgtcacttaaatttataatataatatgtatcaaagtatgcttcactatacttatgtatttttgccatttttatagaataatataagaattcctgcaaatgtccagataccatataatctttaaaagcctcctgataagatagagtatcaccatgtatgattgcactatctatgagttttttcatcctttttttattttcgtaatttaccatatagggattttcctcttcttctaaattacttattgtatctttaattggagaatccgcaactttattatttttatctgtacaagagactatagatagaaatataagtaggttcaataaatttttcatagttattatatatttaatatttaagcattaaaaaagaagaatatgtcattctgttaatttcccaaccattcatgtaaaaaacaacagaacctgttccatctttaaattttaaatcttgattaacccctttaataattgatctgtttgtgacgccttctcttccatagcctacatagccatcaaaacctattactaatgtttttgtatgtttttcggaaattagtcttgcaattgacctttctccatttagctcagaagctgacatgcatgtatataaaataagtgtgctatattgcatcgcatcaacatttttccaatttttactttttaaattcatttgagtatcaaacctatcagcagttgtaattttagtttttacatcctgtataagagctacattcccatgaccatatactctaaaaatgccatctccttcagtatttttatatttcatttgagcatttttaaatacattatgatatactgcgggttcaaaacttccaaagaaattcacaggttcttcatcgttatcagttccaaactgcgaaaaatcaattcctttaaaataattccctgaactcgcataatcatcaaaagaaatagctccattttgactcaccttaaccgccacctcataagaaacacctctatcaacaaaagactgaatattagcatcagcattttctgtaccgccaccacctccggaccgcacattcatttgcccgaagaaatcaccaataccgtcaccgcctccctgcatacctgctcctacgtgacttccacccgcatacacccaccataatgaaccttccggtgcaactttgtacataatatttccttgttcagcatcccaagacaggggctttcttccatcgggatcaatattactcacaggattattatacgcataattgtacggagaatatcttctcatttgctctgccaaaggatcaatcacgccccatcttccgatatcagacatatacattcttgctccatagtcgctccagcttgtttctttctgcaattcctttccgttgtattggtaagttatatgcaggatttcctgtttgtgcattatagccttcatactttaatccaaaaggataaaaattgttttcttcaatgatctctgttcccgaaccattcttggcgtaactcaaacgtacattccccaaatagtctgtatagctgtaaatatacttattatttaaaaaatctttattaacataaaaataaaacaggcaaccattagattacctgtttgtgtattaattttatttaaaattatctttgtcaaataccattaataaagtaaaccaacatatctggaacattaccacataatctgttaatgtgatagaaaataatttaaagaaaaaataaaattaacaataatgattattgtaataaaccaaataattaatgaatatttttgtgttttagcttttgggtattcttgaaattcttgaaaataaattttccatttttcattaaaaataaataaatataaattagggaaaataaatacaacaagggtaataataatcaagcttacttttgaaagcacagtcaacgtataatataaatatgataaaagaaatgtcgattctaaaaatgctatagaaattacagctttaaaatctgacaaagttttaggacttgaaatataatcccaaagtttgtaaaaatgataaaaaatataataataaaatttcataatattttatttaggctcatgagcccctgttaaattaatcctatatggtcctgcttgatttattccattatctaattcagcctgtacttctcctaaatcttttgtgtatccacttaatccacctggatataaattatcaaatccaaaataaactattgagggcattgttccaattcctgttaagccataagcacccataattgtattagcagtagctttttctggagaaacggcatttggcgaattaggattctttttatattctggaactccatatccccaatcaagcacgcctcctaaaacaacagttccaatccccacaccctttcctaatttaattaatttggtactattaattaaactttcagattttaagaatgtttttccatttccatagtatttaattcctctataaataaatggagagttcggacgagccgttccaatatatcttctatatgataaatttgacatataagttgcattaaaagacaatagtgtattgcctaaacttaaaggtgtatatattgatatttgtgagttttccattttttcaagctgtttttcaagtgaattcactaaagcaagatgcagcaacatcatattgtaacttttgttaccttttttttcctgttattgttactccttcaagttcaacatcaacttcttctcttggagaacttgctccggagctaccggatgttgtagaactaccactactgcctccgccggacttataggaaagttcatccattctgctaaaaaaactacccatctgatccgggactccaacaaactccattaaagcacgattatttgtacttcctccgcttgcataaaacatcagcatggtcgtgggaagcattgtcgcttttatttcatcttctataggttgcggtttccttccatcgggatcgataaagcttatcggattattgtacgcatagttatacggagaatatcttctcatttgctccgccagcggatcaataactccccatcttccgatgtcagacatatacatccttgctccgtagtcactccagcccgtttctttttggagttcttttccattgtattggtaattgtaagaaggatttccagcctgagcattatatccttcatgctttaatccaaaaggataaaaattgttttcttcaagaacttctgcgctgccatttgcgtttttaaagtagctgagacgcacatttcccaaatggtttgtataggtgtaaatatacttattatttaaaaaatctttattaacataaaaataaaacaggcaaccattagattacctgtttttgcattaattttatttaaaattatttttgttaatattgatgaataaagaataccaacacgtctggaatattaccatactttgatggataaaaaaataataaataaattaagtattattagggcacatagaataatctgattgataatattttttttaattaaaaatgcacttgcaaaaagagacataattagaaaaaaatatatcacagatttagtttccggcattttataattaaaaagattatttatattatcaaaaatatttttattagatgaactataaaatattctaaaagcaaaaataattatagctgttatcgcttgtattaaactaagtattctggttttcatttaaattatattaatttctatgtacaatcttaccaccacttaaatatctgtgtgtagatatatcgtaaatcatgatatttgtatatccacctccatttgttccaataaccacattcacatttaccgtaacacctttatgaagttctggattcgtcttatgcaattgatcatatctatactcggcatttttataaatatccataatttgatcaaatctatctccttccattttaagggatgttccaactgttccagctataaaacctgctgcagatgctaaacttggattgtaatttttaaatttctcaacaacttcttttattgttttcaaattatcaatagcaaaagtcccataaccagctcctcccaagtgatctcctgcagaatcaaagtattccttcatacttcctaaaagatccattgttccctgatattcatcgacccaattagagtgatccaattgatattgtgtgacactttctatagcaccaaaataagcattggtttgatcttttaaatattttctttttggtgtcggatcaatatttccaaacttagaaaaatcaattcctttgaaatattcagtttgaccaaaaagagccataatgtccctgtaggcttgggtctctccgaaggtagtggcacttcctccaccacctccggaccgcacattcatctgtccaaaaaaatcgccaataccgtcacctcctccctgcatacctgctcctacgtggtcaccactggcataaacccaccataatgaaccttccggtgcaactttgtacataatatttgcttgttcatcatcccacgacatgggctttctaccatcgggatcagtaaagcttatcgggttgttgtacgcatagttataaggcgtaaatcttctcatcatctctgccaacggatcaatcacgccccatcttgcgatatccgacatatacattcttgctccatagtcgctccagcttgtttctttctgcaattccttaccgttgtattggtagttatatgcaggatttcctgtttgtgcattatatccttcatgctttaatccaaacggataaaagttattttcttcaagaactcctgcgccacttccattgttgaaataactcaaacgtacatttcccaaatggtctgtatagctgtaaatatacttattattttcaaaatttttattaacataacaataaaacaggtaaccattagattacctgtttttatattaattttatttaaaattatccttgtcaatattaattaataaaggaaaccaacacatctgaaacattaccattattactcacagatcaaaaatccgcgatatcaggttaaaaatagtgctatcactaaatctgatacatgaccactatttaagattaggcaattcttcaggtttcaaccaaagtgatataaattgttcattatcatttatacacgcaatacaattattcataaactcaactgcattacctttttcttcaggatttccaatacaaacccaacctgttttaacatttacataaatagaaaaatctttatccttattaactttatatgaaaagcccggatcaaaattatctttaacttttaataatccttttctacttttaggaacatcataatctccttttatccattcgccgtatggacaaaatcctaatacttgaactatttcattattatcactaactgtcaaactcagtttatttagaactatttcaaaattgatttcattaattgttggctcactatcaaaagaatattcatcgattatgtattttaataatcgattttgattgtgattagtatattctataataaatttcatattatttaacaaaattaaaatgataaattaaatttttatttatatctacaactaattcccatgtcccatttgaacctctaaatgttccaggaactctaaaatttaatgcaccctttgctgttgcatcaggtatacctttacctgtagctataatttcctgaatgattaatgatgaacgcatatatggtctagcaagacgactagcattttctccagattttatgatctcagtaaagtgtttacccgcagattttgtaaatgtgaataatgattttaatccttttaggttacccgctggtccaataggaacatcacctgttattggagctctcataattattttcccttcggaatcaacaagataatcacgaccatcagaatcagtccatgttctggcgccacgaagtttttcccaaaaaccagtaagtggttttaacacttgctttcctatttcttcaccaaatttggcaggtttaggacattttgggcaatcattattatctgtcgtaaactgcgaaaaatcaattccttgaaaataatttccggaactagcataatcatcaaaagaaatagctccattttgactcaccttaaccgccacctcataagaaacacctctatcaacaaaagactgaatattgtcataagcactagcgctacttcctcccccaccagtaccaccacgcattctcatctgcccgaagaaatcacctataccatcaccagtagcatttgtatatgaacctccagctgcataaacccaccaaagagaaccttccggagcaactttgtacataatatttgcttgttcagcatcccaagatagaggttttcttccatcgggatcagtaaagcttatcgggttgttgtaagcataattataaggactataacgacgcatcatctccgccatcggatcaatcacgccccatcttccgatatccgacatatacatccttgctccgtaatcgctccagcctgtttctttttggtattccttgctgttgtactgataattgtatgaagaatccccaaatgagataacattggcattatgctttaatccaaacggataataatcatttttttcaagaacttctgcgctgccatttgcgtttttagagtagtttaaacgcacatttcccaaatggtctgtatagctgtaaatatattgatttttttcaaaattgtaatacccttctgaagtaggtacaaattttaatattgtagcgggaagactccccgaatataaagtttcatactgaaatccgtccagataatctgtctgcaaactctcttctatattgggttttcctgaaccataagtatataatttgctgatttttgtgccatctgcactgtataaatactttgtgttgacattataatctcccccaataggaaatctcggaacataggttttatcaaattttacataatttggaaggtcaaggatattataatcaatctgtaaaatacctttatctacatggcttgtcatgcttccattactgtcataagtaataggagttcctgaagcatcaggatagccgttgtaatttcccgaagcatccgttacggtattaagtctgtttccggtgtaattataggtaagattatcaattaactcggctgtagatgagaaagtgtttcctgttctttgtaatgagatgatgtttccccctaaatcatatgctgcagtttcattgaagaaatcattctgaggaacggaagcttccggctcggagtacgatcctttcttcagtctgttgagtgcatcatactggtaattgtactgtctcaggacattatctgtagcggttttccaggttacttcagcgatatttccgttgtattttcctgtagaacttgaggtattttgaggattgtaatatttcagttcgtatccgaataattttgttcccaaattggcagggtcatttactttggtcaccgaacctctgatgttgtaggtataatcgatgctctgcatgttgtttcctacttttttattggtaagctgggagagttcgttgtaagaattctccgacaacaattcctgcgggttactgtttacctgatgccactgctttttgagacggttttggtcgtcgtattcaaaaacctgtgagatcactttttcggtatcggagctgagtcttttatgatagactttagactgttgtactacgcctgcaaaatcaagctccgattctgttttggtgtaccctcccaaatgattgatagaataggctcctaccactcttgctttgctgtcgtaataaacatagcttttcgtccagttatcatcctcaatatttttcaccagactcatcgttggtaaagctttggtgcttattgccgcattctgggtatcggtaataatggtctgcccaaatactgaagccggaaatgcaggattaaagctgtaaacaggataggtgtcataataattgacactcaacaccctgattcctgcagaaggaaaagcattctgcgaatagaaaacatccattccgttgttgataaacgatcccgtgcttcttatctcattgttttcaggatttacggaaagattattaacatcattctgcacggaagctctt

SEQ ID NO: 2823 - DNA, 23576 bp, synthetic construct
  source 1..23576: mol_type = other DNA
  misc_feature 1..23576: note = Synthetic
gtttcttcggtagaagactttatggaggttgaatattatagggttttaattgtcgcaactgaagatttagagcagacacttgatttaagtggagtgccatttatcgttcattttgatttgaaggatgataaagacagtattatcaatcgagtggtaaaacaagaaaatactccagaggatgctaaagcactattttttgcaactcaaaatgaagtgagtactttaagaaagatagaacaagcggcagatattgtaatgccaatagaagatttgcctttaggaactattgttgaaggtgatgctgagcgaattgaaatagaagaagagtcaaaaattagtgatgatccgaataaaggtgcatttcataaaaagaaagaaaagaattccaaggactataattacggaattcgtgataaagtagaaaagtttggaaagtacaaaaagaagaaggggaagcgaaagaataaataagaagaagtttattctaaaatttcagtgacgttggctttgatagtttgataaatatcatttataggtaagtcgttggcgtcatctccaaaagggtcttcaatttcttcagcaattaattctatactactaaaaatatagaaaatcaaagccactatcggcattgcccaataatcaaaagtttgtacaaaaccaattggcatggtaaatacatatagaaagatgaccttcttgatgaaaatattgtatgaaaagggaatcggagttttcttaattcgctcacaagcaccaatattatctgtaaacgactttaattccaaatttaaatagagtaattgttcatcagttaaagaaccattttcttttagctcttgaacttctctatacatcgctttggcaaccacattgggtagatgcttaaaagaggcgtaatattctgaggggtatttttctgaggtacgtaatagttgagaattggctttgttttgcaaatgatcttttgatgctaatatgtaattactaatcaaaatgctgaaaatagttttaacattttgattagtaataatcgcatcaatttttaatgctaggtttctggaattattcacaaaacttccccatatttttcgaccttcccaccatctttcataggctgaattggttcggaaaactaaaagtagcgaaagcacaaatcctactaaagaatgaatatttagggtgttggcaaattctacttgtagtacctctttttccagatagttgatgagaccagtatatattgctactccaacaataccaggaaatgttctcctaaaagtatcgcttttatgaaaagcaaaaattaatcgccaccaatcttttggattgtataaaaccattgatctaattaatagattttaggaaattgttgcggttttgcttcgtgcattaagtcgtaaattgcatcaaagatgtcttctatacttggtttagagaaataatctccgtctgttccataagcaggtctatgattcttagcagctagtgtaattggttccgagtccaagttaaagtaggctttttgtccttcaagaacttgctgcatcatgtaagctgaagctcctccatctacatcctcatcaaggaatactactcggtttgttttttttatggattcaccaatcatcccatttttatcaaaaggcatcaatgttctaacatcaatcaattctacggagataccctcttcagctaattgttttacggcttcttctgctaaattgcaggttgatccataggtcactaaagtaacatcgctaccttctgagacgatttctggaacacctagctcaacttggaattctcctaagttagtcggcatttgctctttacttctgtaggcatttaatggctcaataatcaatgctgggtcatcgccttttaataaagtattgtataaacctgcagctgtggttaagtttcttggcacacagatgtgaattccttttaaactattaataatcgttcccattggagaacctgagtgccaaattccttctaaacgatgaccacgagtacgaacgattaatggtgctttttgtccgcctttcgttctgtattgaagagttgctaaatcatcactcattatctgcaaagcatacaacaagtaatctaaatattgaacttcagcaattgggcgcagtcctctcatcgccattccaattccttgcccaacgatagtggcttctctaattcctgtatcgctaactcttagttctccaaacttttcttgcatgccttctagaccttggtttacatcaccaattcgccctgcatcttcaccaaaaataagtgtgttaggatatttgttaaaaaggacttcgaaattgtctcttaatacaactcttccatccaccatctctgcattttcatcataggttggtttgacttctcgctgatgaatcggactttcgctactcgctgaataaaggtgtgagctatatctgtcggcgttaattttagctgattcgtttacccagttgattatggaggctctaaaagataattgctccgatttggttagacgaagggcttttttggccgcgctaattatttcttttctattgggctctgtgctcgcttttaattctgcgattaatccattaatggcttcagctttttgactttctgcggctaaattggacaaaaggccgattacttgatctcgatcagctttgatgggttgaataaagtcttcccatgctaactttttctgatcgcgcacttcctttttagcgatttcttttatttcatttaatttctcttccgttgcaattcctttagaaacaatccattttccaaactgattaatacagtcgtactcactttcccattctaaacgctctttagatttgtaacgctcatgagaacctgatgtagagtgtccttgtggttgagtaacttcttctacgtgaattaatactggaatatgttcttcacgagcaatttttgttgctttttcataagtcgcaataaggtgtgggtaatcccaacctttggtttttaatatctcgaacccattacttccttttccgtcacgttgaaaaccttttaagacctcagaaatgctttccttagtggtttggtattttttaggaactgaaattccgtgtccatcgtcccaaaccgacatcaccataggtacttgtaatactccagcagcattgatggcttcccagaaaagaccttcagaggtggatgcatctccaatcgttccaaaagcaatttcatttccttgattggaaaaattattctctccagctagttctggcacatttctgtatattttagaggcttgagctagtcccaacaaacgaggcatttggcctgcagtaggagaaatgtctgctgaagaatttttctgttgagtaaggtttttccaactaccatcttcatttaagctccgtgttgcaaagtgaccattcatagaacgtccacctgaggcaggttctaattcaacactaggattggcatacaattgcgcaaagaaagatcgaatcgttaattgatcgatagccatcatgaaagtttgatctctataatatccagatcggaaatctccattctggaaaaacttagacatggcaatctgaggtacctcttttccgtcaccaaaaattccaaactttgcttttcctgtaagaacttcacgtctaccaagtagagatgtttctctactcaatacagccaatgaataatcggcaaggatatcttttttgaattcttcttgagtcatcttcttttgctctggggtatctaatgtcgcctctttgctcataggtagtatctttaaaaaattgctttgcgaaattaccaaaaaaaccgcttttttttagggtaattgtagaggtatggaaaagaaaacaggaggggaatgccctcctgtttaatgtgcctctgataagataaggttgactaaattgtttaactgtagtttttttaatcagctgaaaggcacatgggaaattaaggattttttctgagttatagaagtccttacttcctttatttttgatattgattaatgaaatccgctaactgtaaataaatcaatgaagaagatgtatttaggtgggttagcgctttctaagtgttcttttgattccattgtggttgcattttgagcggttaaactgtttttggccaccatggcacaaactatgattatggaccaaaatagaattgaaattgtttgagttattcttttctttttcatgtcaattgtatttatggaaattgaggttgaatagaatcctttttcagttgtccgctactcactccatcaataaatttgcagtccaagcaagttaatccttcattgagcatgatccaggtttcaccgatcatatccaagtcgtattcgtttccaacatttttgatgtcgtaaattatttcttcagaaccttcctctaaagcgatttttgaaccgataggcaacataatgtgaacctttacttcttgtgctctaaatttatcttgtagttcgaagttgatgtaaggactaaacttcaatacagagtcattgaggtgataaacaaagtttattttctctgctcgatcttttgcatcctttcgattcgcaccttttgcaattttctccaccatcacttttatttggtcgcctcttgtaggtaaaacatcaatttctaagttttcataaaatacctttccttcctctatccatatatctccctctacatcaggtaggtcaaagtcgttgaattgattgtcttgttctgttaaatcacttaggtaaacggtgtttgatggactagtccattctattgttgacaatgctttttgagtggatttcagctccttcaaggaattaatagtaatatagatacctagaagaataccgactatccaaagaactcccattgatattccaatcaccgagttttgggttttcaatttgaaaatcattttaatcccgctatagattagtccaatcattggtattccaatgaatagtatcaatgcaattagtgcaagagttgcatttgttccagtgccaagtagtgcctggagaatgtcgtgtgaaggtatcgtaaaaacttcgttattacttacgacggtcacaatgtcggaattaaaaagggtggctgttaacgcaattaaaacggctagtccaattatgatgaagatcaatccaatgaatttcatggcaaacttcaatatgaataagatcaccatgccaataaaagtgaacagtttagagagtgctccgctcaaagaattggccgcatctttggcaccctcaccattaaaagagtcttttaagtcgttaaatttatcttcaaccgtttttttgatattgtctacattgactgcttctcccttcatctctagtttttcagcagttgtttttgctttgggaatgacaatccatagaatgatataagggataaaaccaactccccaaacaaaaaaggcaaataagaaaaggattctaatccagatgcgatcgattccgaaatagtggcctattcctgaacatacacctcctattattttatcgtcctcgtctctaaaaatgcgtttagatttttgcttcgtagagcttgagttgcttttatcgcttgtccagtcgctttcttcttctgtaccatcaaaatattgttctggttctcccattaccgaaataacatagtctacatcgcttagtgtaactactgatcgttcgttgttaaatcgttctttaaatagttctgctacacgtgattctatatcagccattacttcatcgcggctgtcggtattgcccaaatatttctttattgtggctaaatagttgttgagtttatcgtatgcatcaacctcgatgttgaatacaattccactgatgttggcggttactgttttgttcatttttttcggtttattttggtcgggttatgcgttcttttttctggttaattctactgctttcatcaggtcctgccatgtgacgtctaagtccttcaaaaagttacttcctttgtctgtaagttgataatattttctcggtggtcccgattttgactcttcccatcgataggacaaaagttcagcattctttaatctggtgagtagcggatataatgttccttctaccacaattagttttccttccttcagttgattaattatctctgaagggtaggcctctcctgatgaaaggatggatagaatacaatattctaaaactcctttccgcatttgagcttgtgtgttttcaattttcataatagctccttcggtctgttattgttgtttttttacgttcatatttccataaatggagagcaaaactgtactgtcatccgtagagacgataaaatgagcttctttcaccactttacctactttagttatgactagataagtttcctcgttggaagtttcaaacttgtccacttcattttctaggtcaatttcttcataaccttcttttagaaaagactttttgatttcactcgctttttttatatcgctaatgactaaaaatcgaccttctaaaaaatcaccggttacccacttttgctttccattcaaatctaaatcgatgtcaaaagcatcaatcattttctttgaaagactcatgctaaagcaatcgtgatcgcttttcaattgcgtataaattttatccgatttcccaccattacctgctgtaacgataagactcataaaggctgcaatgattgtaaggctaaaatatttcatcgttttatttttttaaatgtttagcaaagatatatcttttagaaggtattatgcaacgcatagtaccatatttttttaaaataataatttaagtggtgctccagaatgatgaatggaaaaagaaatctgatgaatggtgacaaataatcgcttctcttttataattttgagactaaacagtataaagccatggagatatttttgcaacctgagatttggattagtttattgacgctgacattcttagaaatcgttttaggaatagacaacattatatttatctctattgttgccgataagttaccccaagcagaacagggaagagctagaaatatcggtttgattctggcaattgtgattcgaatctttttattgatgggaatctcctacattgttcatttgaccaatccattgttcactattttcgacctagatattagtgtaagagacttaatactcattgccggaggggttttcttgctgactaaaagtaccacagagatacaccacaaagtgaatggtgatgaagcggagttgggagtgaaggagggaaagaaaatgaccgtaaaagcggcaattctacaaattatcatcttggatatggttttctcttttgattccatcctaactgctgtagggttatctgatcatttgcctgtgatgattgcggctgtagttttatcgcttggagtaatgctagcgtttgcaagtaaaattgcgaagtttattaacgagcagcccacggttcaaatgttggctttgtcctttttaataatgatcgggaccttacttatactagatggattccacgttcacgtgcccaagggatacatctacttctcgcttgtatttagtttaatggtggagttcttaaaccagagaatgaggaaaaagaggttgggctaattcttccggttacctgcccattgttggctttaggtcagttgatctcaatcggtgaaattgccagttaggctaatccaaaaaccgttgtttttggtggttgattcttgatattctacagttacatcaatttgctctgccaataaatgaatgagggtaactccgatagattcttctttctccttcatcatttcaatgttttgaatgcctattccattgtctttgtagataaaagtgccgtggttattttcagaaatgtatgctatagaaaccaccaagttgttggttcctgtggcgtgttttagcgaattggtaaataattcattaaaaattaaacctaaaggaattgcagtatcgacaggtatgggaggacattctacattcaactctatggatacttttttaatatgactgctaatgatatcttctccaatggcgtgtaggtattctttaaaatctagtcgttcaaagttgttggattgatacaattttttatgcaccaatgaaatggaatgtatcctgttttgtgcatcttgaaaaacttcttcggcatttgaatctaagtttttagcattgagttgtaagctgaataaactgctgactatttgaaggttgttttttactcgatgatgcaattcttttaataataactcatttttagagttggtttcagatattaggaggtaagattgctcaagctctttgttattactctctaacaataagtttttagcttctatcttttttcggttcctgtttcttaaggtaataattacgataagtagtgccaataaaagaacgagcaatgagatggataacagtaattccctgttttgagattctaatttttggtttttcttccgagatcgttctgtttcagctagaatttctagaaatcggctaacttgtatttcatcttgaacagcattcatactgacttcatttcgaaggctatcattaaaaaggtggtattgctctatcgtatgctttagattgtcatcattggacttggttgtataaattctaagcaatccttccagtccatccactacagcggcagttttccccatctctttcgccttctctatccctcggttgtaatactttttggcagaatccaattcgttttttagttcaaacgcttctgcaatactcaagaaaatattgactaatcctgtttgaatatggtgttcgttaagtatgctgacttctttattaaaatagtaaatggcagaatcatataagtgctcgtctcgcagaatagttccgtagtttccaaaagcaaatgcataaagtgtgatgttctcgtccttaaaactcgaaacctgattgtttttatacaattgcttggccttagggtagtttttctgcaagtaggagacatatcctagattattacgagcttgatagattctttcatgattacccaacttttcatatcgcaataggttgtcggtatatagttcgctcgctcgttcaaggctatcttgtttaatcatgaatcctgcgtagtagccgatgaggtgcccttttattaattcgctatcaataaaagaaagtagcttgggaaatacctcatttacatatttgttagcaactagcggtgctcctatgctttttaggcttgaagctaaaagatattttaaatataatttttctgcttcgcttctgtaacattcaaaatccaataaagtctttacgaatttgattgccaccagttggctgtcattgtgttggagtcttcttatggtgaagattaccttttctagctccgtaccctgtgctggaatggagatggtatgattggctttgatgcttttttcggtatgttcaataatttcagtaacactcatgttggaagtgttcttactgtctaaaagggactctatatctaaaaaaggaagtagatcagcgtcgcttttttcttgagcccatccatgtagctgaatgatagaaacaaaaaggaagaagaattttttcaaaggtttatcctaaaagtggtaaagcgaccaaagatagaaaattaactcaatgtatggcattgattaaaaagattttgaaaggggagaggagatgctagcggaatactagcttcaggaaaaataagcgctgtaaatcggaggattttttcttcgaattttattgtttgctaaccttgtgtttatcaaaattatatagtattattgattttcttaataactgaatagtagaaaactacagcttgacataagattggctaggccactgaataaaatgaacgaaatgacacacgatttagcgcaataaaaaaaaggcgagttgccccgccttaaatgttttcacaacggaataatccttattgtgaatcgctttcaaattgtgaagtaaaaataacaaaaaaattatacaaatgacaaaaaagaaaattttaggactggatataggtgtttcttcagttggattagcactagttgttgaaaatgaagatggaaaaaagtcaattgagaagatggcagttaggatagtacctgaagacccagattttcatggaaagttttattcgggcaatactgctagtaaaaatctagctagaacgactaaaagaggaattcgaagaagtaatcaacggtttaaaatacgaagagatagactttataggacccttaaaaaagagaatatgtttcctaaagaaagcctttttcaattagatgcactttctttatatgaattaagagcacgagctgttagtgaaaaggtttcattagaagagttgggtagaatattaattttattaaaccaaagacggggatttctgagtaatagaaaagcaaattcttcagaagaaaaccttaccgaatacaaacagaaaatagaggccctcgaaaatgatttaggtgagaagactattggacaggcgttatatgaagagttagcttcatctattaatattcaaaatgtattacttcgagaaagaacttatttgagaaatagttacttagaagagtttgatagaatatgggataaacagaatgagtactatcctaatgtattaacagggaattctcaaattgatgaaataaaaggtacattatatgatgaaattcgaaataacacaatattttaccaaagacctttaaaaagtcaaaaggcgctagtttctgattgtgaatttgaaaagcaccataagggagttgccaaaagttctccattttttgagatgtttagagcatatcaaagagtaaatgatttaagttggaaaaatgataaaggagaacagttttacccaactaaggagcaaaaggatgagttaataaataatttaataaatggaataaacctaacaaagcaaggaaatctaccattaaaaaccattaagtctattttagggtgtaagagtaatgataaagtttattttaattttgaagaattagaaggtagtagaactgccaatagaataagaaaagctctaataggagccggagttcaaaaaattgataactatctaaagtttgacccaactattagtgatgagaaaggaggactttttgaattatggcacattacctattcgttatcaacagttgaagaaatcgtaagaactttaactcgaagatttccatttacagaagaacaagctttatttatagctgataatgttcactacaaatctgattacggtaagctatcaactagagccataagaaagttactacctcatatgcaaaatggattaaattatagttcagcatgtgatgaggtaggttatgatcatagtggttataaaacaaaaattgagcttaaggagaagttagatgctatttctcctaactcacttagaaacccagttgttgagcaagtattaaaccaagtggtcaatgcagttaatttaattattgaaaagtatggccgaattgatgaggttagggtggaattggctagggagcttagaaatagtgcgaaagctcgaagtagaatttcgagactaaattcttcaaacaagaaggataacgataaagttcgacaacggctttacgaagaatacggactaaagattgtgaatggaagagatgtaaaacgctataatctttggaaggaaacgaattgtagttgcctgtattgtgacaatcctataacgaaaacagattttttgagtggtaatgcagagatagaacatatattacctaaatcaagatcttttagtaacgcaatgaacaattttatccttgctcataaaaagtgtaatgcaagtaaaaaccagatgactgcatacgattttatggaatctaaaggagagcaggcattaaaatcctatactgaaaaggtaaacaaactatttaatgacggcaagggacaaatcagtaaagcaaagttcgaaaagttaatgtgttctggagaagcgattcctactgacttcgttgaaaggatgaaaaaggattctcagtatatagctaaagaaacagtcaagttattgagaactgtttgtgaaaatacctatactactaccgggcaaataacagatttattgagaagtgagtggggattaaaaaatgttttagaagaattagggaagcctttatatagagagcttggtatgatcgaaacaaaagaaataaaggattcaaaaggaaacgttaaaacaattgaaaaaattaaagattggactaaacgtgatgatcatcgacatcatgcggttgatgcattaatttgtgctttaacagatcaaaaaataatttttaaactcaataatctcaataagatatttcagtactccagggaaacgcttagtatggatgaaatagctgaaatggaaagaattaatgaaaataagtatgatttaaaagaattttttgctcaaggagcatacgagttcaaagagccaattgagaatttaagaccaaaagtgaagaagcatttagacgaaatttttatttcatttaaaaagagtaattcaaaagttttaacaaagaatgtaaataaaattaaaaatgcagaacctcaagtaacttgggttcctagagccagtttgcatgaggatactattatgggtaaacgcagacgtatctcaaaaaagaaagttattctaaataaaaagttttacaatttagaagatataattgatcccgatattaaggtatttttaaaacaacatttaaaaaaatatagtgacgatactacaaaggcatttgattctaaaaatctaaagaaaagtccattagtttttaagggtaagcctttgtctgaggttcaaatatttgagaatactaattcaaagcgtgttgcaatttctgataatgttaccaaagctcaattagataaagtgatagatgaagaagtaaagaagattttaaataaaagagtagatgaatatggcggaattaaggcagcatttaagaatatagaagaaaatccgatttacttcaatcaaaaaaagggaatagttatcaaacacttttctgtttatgatgaaagtaagactattaatgtgagagatggagtagcaaaaactggcggaaaccaccacgcgttaatttataaagatgaaaatggaaagtactcagataaggttatttcgtttagtgaagctgttcaaatagggttgttaaatgtttcagagacagggaagccatatccaattattcttaaagaagatgatactgatttaggtaagtttcaattctctatgcagattaacgatttgtttgtctttgatctaaaacattctaataacccgcaggaagagaatgagcttgacttttttgatgaaaaaaatagagacgttattagtaaaagactttttagagttcagaagatgagtaagaagtcaagtggagaatttgacattcactttagacatcacttagagtcaacaataaccagaaatattaaagagataacatggattaatattagatctaataagttacttaatagattacagaagttgaagattagtcatttaggtgaaattgtaaaagtaggggagtgattccgcaagatataaaatggatatacacctgatgaattaaatttgatatagacctagcaggcttccaaaacctgttaggtctccttttgctaagccgaattgctaaaagttggagataaaaatgttaaagtatgattaaacgaacggtatattttggtaacccggcctatttatccatgaataagcaacaactggtggtcaattatcccaaggtggaagaagctaagactgtaccaatagaagatttaggaatcgtttttttagaccatcctcagattacgattacccaaccattaatcagtaaattattagactacaatgtagcgctgattacttgcaatgaacgacatctaccacagggattgatgttgaatttagatgggcaccatacccaacaagctcaattagcagcgcaaattgaagcaagcgctgcactcaaagaccgaatatggaaaacagtgatacagcaaaaaatatacaatcaagcagctgttctaaaactaactggtgcttctattgagaacatgaactactgggcgagtcaagtaaaaaacggagatcccgataattatgagggaagagccgcagctcattattggaaaaccgtatttgtggattatatagaaggttttacaagaggacggtttgaagcagctcccaattctctcttaaattatgggtatgccattttgcgagctgttgtagctcgctcattagtagggtcgggcttgcatccttcactgggtatccatcatcacaataaatacaatgcctattgtttagcggatgatatcatggagccttaccgtccttatgtagaccaattagtgcttaaaattttagaagatgaggaaggcgaagtagaacttacttgggacattaaaagtattttattgactatccctactttagatgttattattaatcaaaaaagaaaaccattgatgttggccgttcagcaaactactgcttcattagcggcatgctatttgaaagagcggaagaaactgaaacttccggtatgggaaatttgagcagtcgttttaatcaatatcgcatcatgtgggtaattgttttttttgaccttccaacacaaaccaaaaccgatacacgcaattatcgaaaatttgtgaagcagctggaagaggatggttttacgcgttttcaatggagtatctttatgcggcactgtccgagcatggaaaacgcacaagtacacattaaacgaacgaagaaaaacttgccacccaaaggccacgtctgtattttgcaccttaccgataagcaattcggaatgatggaagtttatttatcccaacaaaaagaagcattaccagaaacacatcaacaattagaacttttttgagtggaaggtcgaaaaattgagatagttttataattctgaagtcaaaaatagagccttaaatagcatcaaaacaaccccttattgcaggggttgctgtgctaaattacaatttgaaagcgattcacaactgggatgctagagaaaacatcatcggggatgctgtgctaaattacaatttgaaagcgattcacaacctctcgtatattaaacgttgtccaatggtggctgtgctaaattacaatttgaaagcgattcacaactgttttaattgatctgctactttttcagatgctgtgctaaattacaatttgaaagcgattcacaacttattaaaccactaacaaacaaaactttatgctgtgctaaattacaatttgaaagcgattcacaacattgctgatgtagctcaattcattcccaacgctgtgctaaattacaatttgaaagcgattcacaacttgcaagttgtacaagcctttattattccggctgtgctaaattacaatttgaaagcgattcacaacttgcgaccacttcaaccatacagccatgctgctgtgctaaattacaatttgaaagcgattcacaacatatccattggcacagatttgttaatgggcgctgtgctaaattacaatttgaaagcgattcacaaccttgccttatgggttgaagataactaaggagctgtgctaaattacaatttgaaagcgattcacaacattctaccgtagcacatatcggcgcattctgctgtgctaaattacaatttgaaagcgattcacaacgtactccttatcgaataagtccttgaatgtgctgtgctaaattacaatttgaaagcgattcacaacaataactcatctctttgctctagtaattctgctgtgctaaattacaatttgaaagcgattcacaacattgttgggtcaatgttgcccgatagattcgctgtgctaaattacaatttgaaagcgattcacaactgatctgcgattgctttctcagtcttttcggctgtgctaaattacaatttgaaagcgattcacaacattgctattggtgctaataccgttgcattagctgtgctaaattacaatttgaaagcgattcacaactatgtggcaaccgtcaactaattgagtgttgctgtgctaaattacaatttgaaagcgattcacaacaatgtttgagtggaagtacagttgggatacgctgtgctaaattacaatttgaaagcgattcacaacttcgtttactgatatgtttctgttgccttgctgtgctaaattacaatttgaaagcgattcacaacaaagtaggaactgatattcagcacgtaaaagctgtgctaaattacaatttgaaagcgattcacaactaatatttttccagttgctgtttctttgaagctgtgctaaattacaatttgaaagcgattcacaacaatctcgctaaacccacacttccgttggtgctgtgctaaattacaatttgaaagcgattcacaacctaaatggctgttttgccagctctaccaaagctgtgctaaattacaatttgaaagcgattcacaacgacggtagtgttttttttgctgaagataagctgtgctaaattacaatttgaaagcgattcacaacaaagttcttttccctaaatcggaggtggtggctgtgctaaattacaatttgaaagcgattcacaactcaagtcgtctatccaactagattcagaccgctgtgctaaattacaatttgaaagcgattcacaacacccaaactaagtttaaatcaaattctttagctgtgctaaattacaatttgaaagcgattcacaaccggaaacgccaaagtgatatatttttgagtgctgtgttaaattacaatttgaaagcgattcacaactcgttaaaaaaggcggtcgatttacaacaagctgtgctaaattacaatttgaaagcgattcacaacacagcaagtggagacgaaggctacaccaccgctgtgctaaattacaatttgaaagcgattcacaacttgtgtccttttcgcttggctctggtggtggctgtgctaaattacaatttgaaagcgattcacaaccactcattccatttgtagatgattacggcgctgtgctaaattacaatttgaaagcgattcacaacaatcctttaaagctgctctacttgctgaaagctgtgctaaattacaatttgaaagcgattcacaacgctgaatctgcatcaactgacaatatagaagctgtgctaaattacaatttgaaagcgattcacaactaaaatttctgtaaatgtcatatcctttttgctgtgctaaattacaatttgaaagcgattcacaactaaagtccccccataataatttatttttatgctgtgctaaattacaatttgaaagcgattcacaacaatccctattaggtagacatctgcatctagctgtgctaaattacaatttgaaagcgattcacaactgcatctcatcgcacttctctgcattcttcgctgtgctaaattacaatttgaaagcgattcacaacttatttggtcgtgtggctcaagatactccgctgtgctaaattacaatttgaaagcgattcacaacacgagcgtatgggtaagtttgcttaaccccgctgtgctaaattacaatttgaaagcgattcacaacatgttttacgatttaatccccacccccacagctgtgctaaattacaatttgaaagcgattcacaactagatttagcatagatatccatatccctcagctgtgctaaattacaatttgaaagcgattcacaactatgcggaggctgttaaagacggtgttaccgctgtgctaaattacaatttgaaagcgattcacaactaatagtagatgatcaatacatttctactagctgtgctaaattacaatttgaaagcgattcacaacagatttccatttaatagcaatttggaaaaggctgtgctaaattacaatttgaaagcgattcacaactttacttcggttctaatctcgttaaagttcgctgtgctaaattacaatttgaaagcgattcacaacatgccttggtacactatttcggattctgatgctgtgctaaattacaatttgaaagcgattcacaacacgttgttgcctacgattgcaagttggatagctgtgctaaattacaatttgaaagcgattcacaacctcagaaaatggttatcctacgttagaccggctgtgctaaattacaatttgaaagcgattcacaacaggctcgaaagtcattccaccattttcggtgctgtgctaaattacaatttgaaagcgattcacaactgaggtgtattatttacgtcaacccaaggagctgtgctaaattacaatttgaaagcgattcacaacagcaggaagccaagcaggaaagcgcgcaccgctgtgctaaattacaatttgaaagcgattcacaacgcgaaggtgagttttatcgatcagcagtttgctgtgctaaattacaatttgaaagcgattcacaactgtgctcgccttaagtttctccaaaaacgcgctgtgctaaattacaatttgaaagcgattcacaacactacgggagggttgagcgaaaagcaacaagctgtgctaaattacaatttgaaagcgattcacaaccgctccacagaataagtcaatccaaaaagtgctgtgctaaattacaatttgaaagcgattcacaacatatgctgccaaatccattactctaatcacgctgtgctaaattacaatttgaaagcgattcacaactaatctctttctggtacttcagactcttgagctgtgctaaattacaatttgaaagcgattcacaactgcgttcccatcacaatcatttttgcttttgctgtgctaaattacaatttgaaagcgattcacaactgcattaactgttacaactattggtatatgctgtgctaaattacaatttgaaagcgattcacaactgttttgtttactgtagcatcagcgcctagctgtgctaaattacaatttgaaagcgattcacaacaaagctgctgctgatgctaaagtaagcgttgctgcgctaaattacaatttgaaagcgattcacaactcgcctcacgagcttttacaatttccataggctgtgctaaattacaatttgaaagcgattcacaactatagaacccatggtagaaatcaataaaaagctgtgctaaattacaatttgaaagcgattcacaactagcttcacgcatttcgcttattttcgaacgctgtgctaaattacaatttgaaagcgattcacaaccaaatggggggagaataattgagaatagagctgtgctaaattacaatttgaaagcgattcacaacagtaattgctgttgagctttaagttgggctgctgtgctaaattacaatttgaaagcgattcacaactcactccagttttactgtctaattggtaagctgtgctaaattacaatttgaaagcgattcacaacacggcttcgcctaaagcttcgctacgctcagctgtgctaaattacaatttgaaagcgattcacaactatgcacttcaccttttgcgaagaatgaaagctgtgctaaattacaatttgaaagcgattcacaacgaagcaatgttatagaaatgaagagtacggctgtgctaaattacaatttgaaagcgattcacaaccattgtgaggtcttgcatattccacatcatgctgtgctaaattacaatttgaaagcgattcacaacaaatctgtaccagaaggaatcgtttcgtttgctgtgctaaattacaatttgaaagcgattcacaacacagttgggataaacccaacaaaagaagcagctgtgctaaattacaatttgaaagcgattcacaacaggtaaaatgagtaatgctgaagaggagatgctgtgctaaattacaatttgaaagcgattcacaacgtagtgatgaatttgaaaaccttagaagaggctgtgctaaattacaatttgaaagcgattcacaaccattagcccatcgtaaaccgagtatgcatagctgtgctaaattacaatttgaaagcgattcacaacatgatgtttctaatttcagcatagaatatagctgtgctaaattacaatttactctctcttgtttattgtttcgggaatcgtatgttcgctatcgctcggaagaaagcgattcacaacgagtattgggttctaactaattttaaaaaagctgtgctaaattacaatttgaaagcgattcacaactctaaagaggaatctgttgatttagatacggctgtgctaaattacaatttgaaagcgattcacaacaggcctttgtgaacgaggctaaccaaattagctgtgctaaattacaatttgaaagcgattcacaacaatgcttctgcgctcttcatcttcctaatggctgtgctaaattacaatttgaaagcgattcacaacaaagctttggtttgcttttctataactgaagctgtgctaaattacaatttgaaagcgattcacaacaagtcgtgaagatgctactatttctatccagctgtgctaaattacaatttactctctcttgtttattgtttcgggaatcgtatgttcgctatcgctcggaagtcccatgcttttagcatgcatatgcgttcacatttaaattattttcacacgcataaagcgattcatcccgataggttcgggactaaaatatgatttactcttttttgtttattgtttcgggaatcgtatgttcgctatcgctcggaagtcccatgcttttagcatgtatatgcacatttaaattattttctcacgcataaagcgattcatcccgataagttcgggactaaaatatgatttactcttttttgtttattgaaaaatagggtaggaatagtatgtattgctcaagtagtgtttatatagaatagcaattgctataagtttgaatccttccgaggttacttcatttcctccatccattccgcccattcttctttactcaccaatcctgcttttttatagactacctccaattgctcattgagtataatcaatgtaggaaagtagaactctttgttgctttttcccaagtattccgctagttcgtggtagcggttagctgttgctcctgcataagtccggcctaagaaggtcaacgactgcttttcttcagcgtttaatttcagcgcataaaattgattgttgatttgtttggccacaatttcgtctgagaaaacggtctcttcttgcattttgcagattttgcaccaatcagtatgtataaacaggacaatgggtttctttttctcagcgagttgggtggttacttcttcaaaattgatccaatctacttgagcgaaggctgccaatgaaagaaggaaaaactggaaaatgagtaaaagctgtttcatgtttatttcaacgtatattttattccgataaatcctcgaatcccttggttggcggcatacacataagaagggtcaaatgttagcgcattgggattttcgggagttggaacggcatttccattggcatcaaattgtacatttttgtcaaatggatcgaaagatcgagcaatactattcctagcaggagtaaaattgagcaggtttttcactcctccataaaccgaccattggtcattgatgggtttggtcaattgtatattttgaatgctaaaccatggagaatattcactgcgattgtcgaggtcgcccaatagtggtaagcgcatagggctgtatacatttccagtgtaattaatggtgaggttgtaggggaggatggtgtattcgatactccaaactcctgtaaaattctccgttaataattggcgctgtttgccatcgttttcttctatcgttacatccatcaaagtggcgcctcccattatttttactccgctatgccatacgatgtcggcattcaatgatacgccttttgaaatggcttgtccatctaggttggcataaataatttggttgggattgatttcgtaatctggcacaatacgattagagaaaaaggtgtaaaatattgatccatctaggttgacgtaagtctgatttttggtgtaaaatttctgaaccacatttaagttgacattcaccgattgctctggctgtagcttttcagtaaaaaccacttcacgcgcacctgttaatgcggcatgatcttcggtaaagatgttggccactcgaaatccatttcctgcgctcaggcggataatggtcttctcctttttagaattccatttataattgattcttggggagaatatatttccatgaatgttattgtgatcgtatctcagtcctaaaagtagggtgttgaattcattgatggttacttggtcttgaataaatagtcctggcaagtgaatataggatgggctgtttctgctgctgtcagcggcgtaggtggctactgtgttgtcgtcgtagtaagtatagcgataagccacgcctaacaatacatcattggaaggagtccattttttattccaagtcaattggctaaaagcaattcgttgatcggcaatgtatcgatcggttccgtacactgaattttggtgatgtccgttggcactgaattgcaagttgaaattttcatcaacgattggcagttgatagttgccaaaaacctcccatcggttggtatagatactttctccatatatggaatctccacctctaaaagcagggcgccaattcatttctccaccccatctgtcttcataaacgtagcgcatgccgatgttgaatattctgttgtcttttcgatcaaaagagatcttgttgaacaaggaaattcgatcctgcaaagtaatgtcagtaaatccatcattgttgaggtctaatggatcgctgtatttgaagtaattgacgccaagcagggaagatgctttttttcctaaatggaatttggctccaatgtctgcattggtttctaaccaagaagtagtgaatacatctgcagagaaaagtggtgctgtacttggttttttggtaatcacattgatcaatccacctacggcttctgagccatacaatgtggaagcagggccttttacaatttccacctgttcgatgagtgaagctgggattcctgtcaacccataaacagtggataatccgctaacgataggcattccatctattaagaccatggtgtaagggccttctaatccgttgatgtggatgtctccagtattgcatacactacagtttaattgaggacgaactccattgacattttgcaatgattcaaatacggatgggtttttattattggcaaaatatttcgcagtatatacctctacaggcacagggctattttttttggacatttctttcatggtacctgtaatgactacttcctcaagatctaagttgctgtattgtagttcaaaattgacggttaaattttgattttcgcttaatgcaatggattttgattgacggctgaaaccaataaactgtgcatgtatttggtattctccaggagggatattgttgattttaaattgaccgttttcgtcgctagcggctccccaattggtattgg

SEQ ID NO: 2824 - DNA, 23570 bp, synthetic construct
  source 1..23570: mol_type = other DNA
  misc_feature 1..23570: note = Synthetic
cagaaacgtaccgggagttgccggtttgcaatcctatgccacagtcagcggaatcctgagaacagaaagcaattttgcaggcgtcattctgaaaggcgtgggaaagaattttgacaggagcaggtttcagccatttataattgccggatccgttccggattataaagaagatggctataacaatgagatcattctgtccgataaaattgccagcgatctctctctgaaagccaatgacagcattgtggcgattttttccaaggaagatcagaaaccgatctacaggaaatttttgatcaaaggaatttataagaccgacatcaagctggtagatgatctttacatgatcggggatatcaatcacgttcgcaaggtgctgaatatgaatgataaagaaataggcgggctagacatattcctggatgatacagacctgataaacaaagcatttccacaagtagaacagtacatcgggtataaaaactatgcagaaaaagtgacggaaaaatatcctcagattctggattgggtcaatattttcaatcagaatatttcgctcattatagcgattatgttgattgtggtggtcattaatatcattatggttctattgatcctgattatcgagagaaccaattccatcgggctgctgaagacattcggggcttccaatgcgcagatccgctccattttcatcaattataccttgctgattatggttccgggattgctcgcagggaatgtgatcggaatcgggcttttattgattcagaaatatacgggatttataaaactagacccggaaaattattttatcagcaccgttccggtagatcttaatccggtttatatcatttccgtttccgtcggtatcttcatagtttcggggattgcgatgatcttgccaagctacctgatcagtaggatctcaccattaaaagcaattaaatacagttaaaaataattaatgtaatttgggcagctgtttccgccctccgttcccgcttttttcttttttgataaaaaagaaaaagagctccactcaggtcgggctgcgagggattcaccgcttaaccaatttaaaactaacattatgaaatattacaacaatatcgtagaaaccattggcaacactcctttggtaaagctgaacaaagttttaggagaggattttcctgctttggtcctggcaaaagtggaaaccaccaatccgggcaattccgtaaaagacagaatggcactcaaaatgatcgaagatgccgaaaaagacggacggctgaaaccgggaggaaccatcatagaaggaacttccggcaatacaggaatgggactggcgctggttgcgattcagaaaggctacaagtgtattttcgtaaccaattccaaacagtcaaaagagaaagcagatattctccgcgctgtgggtgcggaagttgtcatttgtccaacagacgtaaagccaacggatccacgttcttattattctaccgctaaaagattaacccaggaaaccgaaaatgcgtggtatgtgaatcaatatgataatctgtccaacagacaggcgcactatgaaggaactgctcccgaaatctgggaacaaacagaaggtaaactgacccacttcgtagtaggtgcaggaacgggaggaactattactggctgcggaaaattcttcaaggaaaaaaatccggatatcaaaatcatcggtgtggatacatacggctctatcctgaaggaaatccacgaaactggtgagattcatctggatcacgcttacacttacatcacggaaggtattggcgaagatatccttccggaaaattatgatatgagcgtgattgatcattttgaaaaagtgacggataaagatggtgccatctacgccagaaaattagccaaggaagaagggattttctgcggctattctgccggaagcgcgatatcttctttggttcagatgaaagaccagttcacgaaagatgatgtgattgtggttctatttcacgatcatggttcccgctatgttgggaaaatctacaatgatgactggatgaaggaaatgggttggctggattaataattatgaattgttaattataaattataaaaaaccgctgtcgagagatagcggtttttatttttttagttataaaaaagtttgaacataagtaattgtggctgctcaggaactgtaactaaaatccagtaataattgttttctttgctgacaatttcataaaaatatttttcaccaggtttactgaagttcttcctaccattattattactctctatgaattctaattcaaattgattgttggtcagccatctgaagtataattttgagtaagttccatctgaaaatgtttcagtccaatatttgttagtgattttaacagttgtttttttacctccccattcgaagtaatagaaattatgtctgctctttagaaaggccaaatctctgtttgtaaccttaatttctgggcgggtggtaagttttttccagtcatctttttttggagggtcaattcgatacagataatctacaaattccttacaatttttttgaaatcggtagtacagattatctataatatgttccttttctgcttcagggaattgatttaaataaggaaagataaatttttcgttcaagatcgtaattcttacggaatcacttagactttcattattcttgaagcttaggcacatttcgttggtcaaattatcaatactttcattctgtgcaaaagaaaaaacagaaacaaacaaaaagaatatcaggtttagtcttttcataatattttatccaaaaacttcaaaatcaatcccgtcaaaactcgcaaaaaccatcgtcggataagaatcctgataaaacatattgccttctgaatcaatggcaattgcgcctgcaaagccgtcaatggctttcagctcttcaaaggttctgtcaaacgcattttcaagggttagtccgtcggttactctggttacgatttttgctgcagtcgcattactcacaatatcctcgccaacaccggtacaacttactgcacaaaattggttggcaaaattaccagcaaccgtagcagaatccgaaattcttcccgggatttcaaaaccttttccgcctgtagaggtggcaacagcgagttttccgtgcttgtcaatcgccactgcgccaacggttcctttaccaccgtttttcagtttttcttcatattcctttctgcgttgaggaatttccgttgagaaatcttcgaaaccatttttggttgcgtattgctttgcgccgtttccacccaaaacacgatcgtcttctttaatcaattctttggctacgaaaatcggatttttcacatcctgaatattgatcacaccactcattttctgtgtttctccattcataatcgcagcgctcatacggataatgccgtcactttggatttgagaacccattccggcattataaagttcatcatcctccaaaagcgaaacggcaaaagctactgtatcaaaagccgaattaatttttaagaattcataagattttctggcaatgtctttcagcgagttttgctttgcaatttttgtttcttggctttggctgctttcggaaaaaaaaccgccatggatgattattttcatttttaaattttattttttagaataaccttacagataagcagatattactgagtgagaaatcatcataattattctgaacttacttgtggaatcggattgtactgagaattgacaatcgtcattttcctggatttcaaatcaaaagtatcattcatagaaaggacatctactactagattctggatagaaatcggctgccccagctctatattggtaagattggtgtctttgatttgaagtccgtccacaaggattaccagaccggaaccaatggccgtcatcgtatcttcttctataaaaagaccggtgtcttctcccagaccgatgcctaatgttctcggattattcacaactgcctgaaacagtcttccgatccttcctctctgtacaaaatgcgtgtcaataatgacattttctataaaaccgagaccttgcgtcgtcttgatttcgcctttcagtagggcttcggaactggatccttggtagatcatattttctgaagcggcagcagctcccgccgaggttccggcgtagataaaatcttctgtttgatacttagtcagaatggcatcgtggaaccgtgttccgccgagaatagaagtcagacgaagctggtccccaccggtaaacatgactacatcagcagcgatggctctggcgactatagcatcgctgttagcctgctcgcggttctgaatatcaagaatattacagctttttgcgcccagatattcgaaggcttttttatattccggacccacaatgtctgggatctgagaagcggtagtaattacttcgattacggaatcttccttcatcctggactcgttgatgatttttctgaggatgccccgttcaaaaaagttgaggtttttctcaacattttggtcaaaactggtttcggtaaaactccctttgtttacagcaccaccaataatgactagttttccttttgatttcatagtaaacaaaaataataaatcatatcttaataaaggtaatctttcaaggctaaaaaaatgcaaaatgatttaaacttttaagaattaagaccatatttctgtaaatcaatgatttttaattaccgaattgttaatgaattctaattaataataagatattgattttggattaaaatatttaattataatttatcttgattttcgtgcttttctattatctttgataaaatggaatggtttttattatgctatgtgcagagcaatatgaaaatgaatgcttccaaatcataagtttttgatgcaatgattttcatactttttataataactaccttgcgtttcaaaatgaaaaatatctactgactaaaatatgaaaatagaaaaaatacaggttttgcgtggacccaatatctggagtatcacccggaaaaaactgatccagatgcgtctcaatctggaagaggtagaacacatgcctacaaataaaatcgaaggatttcgggaaaggattgaaaaattattgccaaccctttattcccatcgatgttcagaaggaactgaaggcgggtttttcaaacgggttgaaatgggaacctggatgggacacgttatagagcatattgcactggaaatacagactttggcaggaatggatcttggtttcggaagaaccagagaaactaaaactccaggaacatacaatgttgttttcaattatatcgaagaaaaagcaggtatttacgctgcagaagaagcggtaaagattgcgcaatgccttattgatgctacagattatgacatcaatgcttgcatccagaaacttaaagaaatccgtgaacgtgaacggctgggaccatccacgggaagtattgtggaagaagcggcatccagaaaaattccctggatccggcttggtaagaattctttggttcagttgggctacggcattaatcagcagcgttttcaggcaactattacaggcaacaccagcagtattgcagtggatattgcatgtaacaaagaacttacaaagaaaatgctggaagatgccgcaattcctgtaccttccggagatctggtggtagatgaagagggattgcagagtgtcataaggaaaattggatttccgctggttctgaaacctctggacggcaaccacggcaaaggagcttccattaatgtaaaagattatgaaaccgcaaggataggactggagcatgcacagaaatattccagaaaagtgatcgttgaaaaatatattacaggatttgatttccgtgttctggtcattaatcataaaatggttgctgcagcgagaagagtcccggctcacattgtaggtgatggcgatctcaatattcagcaactcattgataaagaaaatctggatccgagaagaggctatggacacgaaaatgttctgacagaaattgatgtagataaagacaccaacgagcttcttgaaaaactgaattacacactagaaactgttccgcaaaaaggtgaaatagtctatctgaaatctacagccaatctttctactggtggcacttctatagatgttacagacatgatccatccggaaaatatccagatggcggagcgtatttccagaatcatcggtttggatgtttgcggaattgatatcatggcagaaaatctaacccaaccgcttaaggaaagtggcggagcaattctcgaagttaatgctgcgccgggtttcagaatgcatctggcgccaagtgaaggtctcccgagaaacgtggctgcgcctgttgtagatatgctttatccaccgggaaaagaattccggattcctatcatcgcattaacaggaactaatgggaaaacaacgacaacgagattgcttgcgcatattgtgaaaaataatggtaagcgtgtagggttcacaacttcggatggcatttatattcagaatacattattagagaagggcgatacaacaggacctatgtctgcagaattcattctgaaagatccaaccgtagaatttgcggtacttgaaacagcaagaggcgggattctgcgttccggattaggtttcggaacttgcgatatcggtgttttaacgaatatcaaggaagatcatttgggaatcagcgatattcataatctcaaggatcttacaagggtaaaacgcgtggtactggacagtgtgaaaaaagatggctggtgcgtcctgaatgctgatgacgaatattctatgaggatcaaagatgacctgcgttccaaggtggcgctcttcagtctggatgaaaataatcctcatattaagaaatttgcaaaggaaggaaaaataacctgtgtctatgaagaaggttttgtgaccatcaaaaaaggcgaatggaaaatccggatagaacgtgtgaaaaacattcctatcactatggagggaaaagccaggtttatgatctctaacgttctggcagcatctctggctgcttacgtttacggtttcgagattccaaacattgctttggcattaaccacatttatcccaagcgcacagctcacacctggaagactcaatgttttcaatttcaaaaatttcaaggtaatgatagactttgcccataatccagccggttatgaagcaattgaggattatctgaaaaatgtcgaatccaataagaagatcgggatcatatccggtgtgggcgacagacgagataatgacatccgggaatgcggaaagatcgctgccaggatgtttgatcatatcatcatcagaaatgaaaaacacctccgcgggagaacagaggaagagatcaatggactcattatcgaaggtatccaaagtattgataaaaatgtaagctacgaaatcatcccaaaagagatcgatgcactgaaacatgccatgagcctggcagaagaaggaacattcatcacagcactgagtgatgtgattcataatgcgatagagatcgttcaggaatatcaggcaaaggaattactggacgaataagccagaatgctataaaaaaaaccgtacagaaaatgtacggtttttatattactgcgggatattctcttccagaatctcattccctgctttgtcaaagtaggtgcaggtcagcttatccatacggatttcccatttttctataccggtttcggcacacattcttataaaggtcagataatccgtttttccctgctgatgtaccagaagctcagctttgaaaacatcattattcactttatccgccactgttataggatcatattttgcaggtactgttgcagtatggctgttggcaccgtgataatcggtgtgaccatcgctcacgtaggcttcataatgagttacacccatatctcggatttccctgatataggatggaaagtctgcgcccgattttaccttgctgtgcgcggtctggatgtcttgtgctgtaaacatttgtatttttttattgtttgtggaagaatatgcttccattttttattcgctgcaaatttgcggattttaatcaaactatgaaatattttttttcttggacgtgcccctttgcattttgccagagcttttccattgcaaaaaatacaaagggtcgggctatacgctgcaatctttttgttccgcttcgcttcacaaaaaggattttcgctgctatccctcacgcaggcaatttgtataaaaaaacattaaatctcccgaagtaaaatataagactcagaacgatgatttcagtcgctttttgtaattcagcagataagcgcctttgtcagaagttttggagaagtttccgcttagttcccaaagatatcgcgcattggatcgggcttcctcattactatagttttcatactcgatcctgtagatagagctgaacagccgagagcgacctacaccgtggtggcaatggatgagaacgggatagttctccggtttgtccatgatcttcagaaacttttctacagtactatcctgcgggatctgatcggtaggtaagttgtaatactttacaccatggattttatcaatagcatattgttcgctgttgacctgctgtttggtttccgggttcagttcggtctgttgtatgccatcccgaagatcgatgacagttttgatttggttttccttcagtacataaggcagtttgtctggcgagatcacaccggaattataaaccttgttttctgagatggttaccatattataacgcattttcttttggtaaatcacaaaagccaggaccagaatgccaattgttccaatggttacgcaaatcctcttaattgccgacgatctataattgactttcataaattgatttgatacttggtttagttttcttagatcattttttgttccttcttccatttgcggattctagaccgggcatttgcaaacggcgatgaggtgttgaactggatcattcttcccagcgtccactgattataccaaggtacttcatagagatctttgttggacttgctttcaatcagatccagtatttctgaaacagtggaatccagctgttttagcagagtaggaaagtcttcatcgtatttttcataaaaggattgagccagctttcccagttcattccatttgaagccggtctcgggaaaatctacggtttcattattgtcttttttataattccatttcaaaacaagatttccccagcctacaagatatgctaaaagattattaacactcatcattgttcctttggaatgaccttccatattcttaatcagagcctgttcctttgagattgaagataattcctgattaaactttttataattagttttaatcgcattttgtaactcttctttgttgataggaactgccattggaaaatattattatagattgtgatgcttggctgtaattatttttcttcttttttacgcagattttttaccaaaacaaaaatggcaaaaagtaaagtgataccatagagtatagataaagcaggtttttccacagtcatggtgctgaagttgatttgcttgtaaagtgccgaacccacgatgacggctacaatacccattgtaaacagaggagccttgtttttttccatagtaagataaattaaaatcaaatatacaatttaactcgcattagagctctgcacctgtttcattaaagtacaattaatgattttttagaggtattttataatattggctaattgtatttttacaaggcatattgaagcatgaaaaaaggcgagttgccccgccttgaatgttttcacaacggaataatccttattgtgaattgctttcaaaattattgatacaaatatagaataaaaatttattacttggtttacggaaaaccgtattttgaatattttttttatttctatttttatggatattaaaaaaactaatttacgatggcgaaaataatagtaggattagacgtgggagtttcatctgttggtgttgcaatcatccaagaagaaaaaaataaaaaagtaataaaagaacttgcagtaagaattgttccggaagatcctaatttccaaggaaaattctattcaggaaatactgcgagtaaaaatttaccaagaacaacttctcgaggcattagaagaggatatcaaaggacaaaattgagaaaaagtaaattatattcttttttgaaggatcttaatatgtttccggatgaagaattaataaaattagatgaattgagtctttataaattaagaaatgattctttagaaagaaaactttcattacaggaaattggaaggattttaattcatttaaatcaaagaagaggttttttaagtaatagaaaatctaaaacagccgaagagaattcttctgaatacaaacagacaattgctcaattagaaaacaatctcaaaaataaaactataggacagcaattatactctgaacttctggaagctgataatttgcaaaatataactttacgtaaaagaacttatttaagatcatcttatattgaggaatttgatagaatatggaattttcaaaaaactttttatcctgaagttttaactggagattctgaatcaaaaaataagaattccatctatcaaaaacttaaaggtgaaattctattttatcaaagaccattgaaaagtcaaaaaggtcttgtttctgattgtgcttttgaaaaacaccataaagcaataagtaaatcatctcccttttttgaattgtttcgtatctggcaaaaagtaaatgaccttgaagttacttttgaaaacggagataaatataaaccaacattagagcaaaagaaaatacttgtaaataatttgtttaaagggattaaactaaactcaaaattcaaattatcagcaactgaaataaagaaaatactttcatttcaaggtcagaatgtttatttgaattttcctgagttagatggaagcagaacatattctgtaataaaaaaagctctgattagtataggtttaaataatgaagaatgtgagaaatatctacaatttgatccgtataaaaacgatgagaaaggtggtttatttgaattgtggcatataacctattctttaccatcagatgacgagattatcaatacattgcaaaagagatttaatctgacagaggaacagggaaaacttatttcaaatgaagtttcatacaatgctgattacggtagtttgtcaacaagagcaatcaaaaagcttcttccttttatgcaacaaggtttcggatacaatgaagcttgtaaaaaaattggttatggtcaaactaaaatcgaaattatagacaaactacagccaatactaaaaaatagtttaagaaatcctgtcgtagaacaagtattaaatcaggttgtaaatattgttaatcaagtcattgataattatggtaaaatcgacgaaataagagttgagctagcccgtgaacttagaaatagtgctaaacaaagaaaaagaataagtgtctcaaattttagaaataaaaaagaaaatgataaaataagagaggtattgagtagtgattatcaatacaaaattgttaatggaagagatattcagcgttacagactgtggcaggaagctgatggacagtgtctttactgtaatcgggaaattacaatgtctgatttcatttccagtcaggcagatcttgaacatatacttcctaaatcaagatcatttactaataatatgaacaattttattcttgctcataaaaaatgtaattctacaaaaaatcaattgactgcttatgattttatgagtggaaagaatgaagaagtatttgagcagtatttagaaaaagtaaatgaactttataatgatggaaaagggaaaataagtaaagcaaaatttgataatctgatttgcaaaggagatgatattccttctgattttgtagaaagaatgaaaaaagattctcaatatatttctaaagaaactgtaaaacttcttaaaaatgtttgtgaaaatgttttcactacaacaggacaggttacagattttcttagagataagtggaaactaagagaagtaatgcaagaagtaaattatgaaaaatacaaacttttagatttagtagatactaaaattattaaagatggaattaataaaacaaaagaaataacaattatcaaagattggtcaaaaagagatgatcatcgccatcacgctgtagatgctctaatttgtgctttaacagatcagaaaataattttcagacttaataatttaaataaattatatcagtacgaaaaaagtgggatgtcaaaagaagaacttgaatcaaatgccaggtttttaaatgtagaaaattttgatttaaaagcttttgctgatcagattgacgactggtcaaaaactcctatagaaaatctgagagatgaaacaaggaagcatttagatcaaatatttatttctattaaaaaatcatccaaagttttaagcaaaaatattaataaccccaaaaattcttcaaaagagcaaataacctggacaccaaggggaagacttcacgaagaaactgtaatgggaagaattaaaagaatttcggagaaaaaagaaaaattaaatcaaaagtttaataatcttgagaatatagttgatccttctgtcaaagaattaattagtaaaaggattgacaaatatggaagcagcatagatgctttttcttctaaaaatattaataatgatccgctgctacttcataataaggaacttaaggaagtttcagtttatgaaaatgtatgcgtaaaaagggtatcacttaatgaaaatttcacattggctcaagcagaaaagattgttgatgaaaagatcagagaaaaaattattaaaccaaaaattgaagaaaaaggcggaataaaaaaagcattttcaaatttagatgaagatccgatctggttaaataaagaaaaaggtattcagattaaatctgtaaaagtttatgaggaaagtaaagtggaaaaagtgcgagatggttacgtcaaaacaggtggaaatcatcacgccttaatataccttgatgacaaaggaaaatataatgaaagggtagtttctttttgggatgcagtcgaaataggaaaacttaatatttctcatacaggaaaaccatatccaattattaatcgtaatgatgatgctgttttaggtacttttaaattctcaatgcagattaatgatttatttgttttagatttaaagcattcttcaaatcctgccgaggaaaatgaattggatttttatgattctaaaaatagatcaacattaagtaaaaagctcttcaggctgcaaaagatgagtaaaaaatctaatggaacatttgaaattcattttaggcaccatttggaaacaacgattgatagaaatgataaaattttaagaggaataacttgggaggtttttcaatcaaacagctacttgcatcgattagaaaaaattaaaattaatcatttaggacaaattataaaaataggagagtaatgatcacccgctcgatctacattggcaatcctgcttatattaagctcaaagacgagcaaatgaaaatcctgtgtccggaaaccaaaacggagaaaggaagtgttcctgtggaagatttgggactattgatgttggatcattttcagattaccatttctcatcagcttattcaaaaaataatgggaaataatgtggttgtggtgagctgtgattcccaccatttgccgcacggaattatgttgccgctttatggtcataccgaacattcagatcgtgttaaagaccagtttgaagccagcgaaccactcaaaaaacaactctggaaacaaaccatagaatgcaaaattgaaaaccaaaaagaagttttaaaaagactgggaaactattacgaaccaatgattgattatcaaaataacgtgaaaagcggtgacattaccaatatggaaggcattgccgcccaacattattggaaatatctcatcagtctagattttttgagacagcgtttcggagattcgcccaatcagtttttcaatttcggctattcggttcttagaagtattgtagccagagctattgttgagacaggattacttccggttctggggattttccataaaaataaatacaacccatattgtcttgcagatgatttgatggaaccttatcgtccgtttgtagatttattggtaatgcaatggctggaaaataaccccgaaattgaggagctgaccaaagaattcaaagcccacatcctacaggttgcaaccaaagatgtgcggatagacggcaaaacaagacctttgttggtggcggtaaaaacaactgctttttcgctttacaaatgttacacaggagaaaaacggctgatttcttatccggaattaatatgataatgcataatatttgggcgtgccccaatgtttttttcctcaccaaagattcctcttcgaaaaggaagcgcttgcctgaggaaaaaaacaaagggtcggtctgcgcctgcaatcttttttgccatttccataggtttttaaaaaacaaagaagtctatggcaaaaaaggatttccgtctccgccctcacgcgggatttccgtgttccaaaaacaagaaaatccctatgaatcaagaaagatttaatgcttaccggattatgtgggtattagtattgtacgacttgccaaccgagaccaaagccaatatgcgggatgccaataaattccgcaaaagcctcattgatgatgggtttacgctttttcagttttcaatgtatgtccgccactgcccgagccgggaaaatgccgaagtacacatcaaaagagtgaagtttatgcttcccaaagctgggaaagtagccattatgtgcatcaccgacaaacagtttggtgatattgaaatcttcttcgccagaaataaagaagaaccaccaccaaccttccaacagcttgaattattttaaattttaaatcctaaaaataaaaacaatctattgaaaatcaatagattgttttttgaggctgtgactaatcacgaagataataatttttgaaagcaattcacaactacgacgcgtaaagggacgatattaaattggctgtgactaatcacgaagataataatttttgaaagcaattcacaacgctaaagctgaagcccactctttctgataagctgtgactaatcacgaagataataatttttgaaagcaattcacaacgtgttaagggttaataattaattcccaggcgctgtgactaatcacgaagataataatttttgaaagcaattcacaacaccaaatcaagatcaaattgttctttgtttgctgtgactaatcacgaagataataatttttgaaagcaattcacaacatttgtcttatgcggttaatgatgcgaagagctgtgactaatcacgaagataataatttttgaaagcaattcacaacgcatgaggaattagaatcacttcataacaagctgtgactaatcacgaagataataatttttgaaagcaattcacaacttgttgttccatcatcatgaattccatcaggctgtgactaatcacgaagataataatttttgaaagcaattcacaacgcataatctcagcgagttttccggttgcaagctgtgactaatcacgaagataataatttttgaaagcaattcacaacacgcagctcaatttgtccacaaaagacctagctgtgactaatcacgaagataataatttttgaaagcaattcacaactgagaattggaacaagatggatgatcaatcgctgtgactaatcacgaagataataatttttgaaagcaattcacaaccgaaaaggcggttgattctttttgccgtgagctgtgactaatcacgaagataataatttttgaaagcaattcacaacgacaaatctttcattccttgtttcattcctgctgtgactaatcacgaagataataatttttgaaagcaattcacaacaccgtccacagagcattcaatgatattatggctgtgactaatcacgaagataataatttttgaaagcaattcacaacctgacgctttatgggaagaagctgtaaaatgctgtgactaatcacgaagataataatcacgaagataataatttttgaaagcaattcacaacatagcatctttggttttataatgatgattggctgtgactaatcacgaagataataatttttgaaagcaattcacaaccatcaaagggattgcctgcacagctgctgggctgtgactaatcacgaagataataatttttgaaagcaattcacaactatagaagttcaagttcaagaaaatagtccgctgtgactaatcacgaagataataatttttgaaagcaattcacaacgtccttcctctcttcctccttcctcctcttgctgtgactaatcacgaagataataatttttgaaagcaattcacaactggatcgggatagttccgataaacctatcagctgtgactaatcacgaagataataatttttgaaagcaattcacaactgttactggaccaggcggaccaattcctatgctgtgactaatcacgaagataataatttttgaaagcaattcacaacaatgtacagatacattgacgataaagatgggctgtgactaatcacgaagataataatttttgaaagcaattcacaactaaaaaagacgactaatgaaagtacaattagctgtgactaatcacgaagataataatttttgaaagcaattcacaacatctgagaagctttaggaaatttagaaatagctgtgactaatcacgaagataataatttttgaaagcaattcatagaggttttcaataactcgttttacataaaaaaacagcctcttctaaagaaaagactgaattattttttaattaagtagtaaatatcaatccaacggtcttctgccggatataatgttaaataataccactacaatagcaattactaataaaacgtgtaccagataaccggtgctcattcctgggactacacccagcattcctaatagccaaaccacgatacagatcgctgcgactaaccataatagacttctcataatttaatattttttagtgtgatataggtttattatcacatactgtgcctttttataaaaatcagttaaaaaatttttaatttttccaatcacttcagatgcaaaagtatcggaaagtgatcgctgtaaccgctcatgtaacgtgagcctgaataagttcgggaaggatgcttgttatttttagaatatgtgtttctgagctgcggagaattataaatttcagcttctataactcgaaaattaaagtcttctataattcgttttttggaaaaaataatctggtcaaaacaaacgcctttttttccgtgataagtcgagaaatgtttgtcattgaataacttttcaaaaggattaatcaaaacctgatgaccattttcgtcaaagatcaatttttgaacagcctcctgatctggattttcattaaaatcgcccatcagaattactgattcttctctgttagaaaacttttgcagtatttcctttaactgattcaagatataattccgttggcttttcttagcatcctgattccttttagatggaagatgaactaccagaacatgaattttttttccccggaataaaaactctgcctgcaaaatatcacgtgtgtcaaaagcggtttcttcatttttttgtagttgtagtgtttggtatttcagaagagtaaatatattcttgtcaaacagtaaagccacgctaaggttgcgggaatcgcaggaaggctgatgaataatttcataatgacaaagaggagaattttcaccggtcagatcttccagtacagaccttgcgccaatctcagccaagccgataagagaaggcatctgtccaaaatcctgttctataaagcggaagacattggagatttttcttaccttcaaatgatatttataatcatcccagttataaagtccggaatgataatgctctatagaatcctgatcgggtggataaaaattttcgacgttgtagaacatcagcaattctctattcatcttatccctgccattttttgcggcgcatatagatgaaggtcacaatgacaatgagcgccatcaatccaagcgtgaaatagtaacccttctggtgatgaagttctggcatattgtcgaagttcattccgtagatgccggcaataaaagtgattggtaaaaaataaaccgaatacatcgccagcagtttcataacctgattcgccttctgatccgaaagagccagaaacatggagataaggttcacagtctgtgcattcacgtggtcaaaatctgcaatcacatccttctgtttatcaagcagatccattacttccacctcctccaggtccagagtcttgaatttagtgatccattctcctgatattgtcagaattcttgtattgagcccggattttctcttcagcttataaagtcttcggatttggttggtatggtttgtatttttaaggaagatctcgttctctatcgcatccatgatctccagcagattctggctttcatcatcaaaagttttaatcactctcagtgccagtttcagcgccagatgatcccttgatacagtgtcaggatttacttttttaagatcctcacagacctcctggatacttttactcttcgctctgtgcgtagtaataatcagcttcggaagcagaaaaataccaagcttactgctgatgtcactgatgttgttcagtgttcgcctttccagatccgtagattcccgggccaggaaaaacttgacatcgcccacttcctcatatttgggaagatggttaggatctattgtatcttccagcaaaagatagttaatgtgataacgctcgtgcaaaaactgaagatcttcttctgtgggcgcagtcacgtccacccattcccagttggcggttttatatttctgttcaataggcatgtaacaaaactaaataaaatcttaatatcgattcaaatttttatttgggcagctttatccgtcttccactcccgcttttttctttttttgaaaaaaaaagaaaaagagctccgttcaagccgggctgcgtgcaattctgtgtttacatcttcttaagaattatgataggaaaaatcagtcagtcacggaacttatgttatcaataaaatatttacatttgtccaaatatctaaaacacaccaatgtttaaaagtgtaatagcaggcgtgggacattacgttccagaaaatattgtaaccaatgatgacctttcccaactgatgatcaccaatgacgagtggatcacggaaagaactggaatcaaagaaaggagacatcgtaaaaaccgtatcgattccgaggaaactacatcattctacggattcaaagcggccgaaatagcgctgaaaaatgccaaccttacagcaaaagacatcgattatattgtattcgcaactttatccccggattattattttccgggttctggggttctgttacaggaattgctgggttgtaacaccattggcgccttggatgtgagaaaccaatgttcaggctttgtctatgcaatgagcgttgcagatgcatttatcaaatcaggattgtataaaaatgttctggttgtaggtgcagagattcattctttcggattagatttttccgatgcagggcggggcgtttctgtaatcttcggagatggagcaggagcggtagttttgtctgcaagtcaaaacgacaatgcgaaaggaatcctttctgtgaatatgcattccgaaggaaaatatgccgaagaattagcagttaaattccctggaaccaaattaggctggagtgataatcttcttaaaaatccggattcattaacgtcagaagatatctatcctgtgatgaatggaaactttgttttcaaacacgctgttacaagatttccggaaagtattctggaagctcttggaaaagcaggaaagtctattgaagacctggacttattaattcctcaccaggccaatatcaggattgcacagtatgttcagcaattgctgaaattaccggacgaaaaggtctttgtaaatatccaaaaatatggtaataccaccgcagcctctattccgatcgctttgagcgaggctattttggaaggcaggatgaaacgtggtgatctggtttgtatgtcggctttcggaagtggttttacctggggcagtgttttgttcgaatattaattcaaaacgaatcaaagattccgttaaatatccaaacttgtgtaaaaatcaactctgatcgattctgtaattttattactgatatttaaatttaaagttttagaattcattgtattgttagcaaattaatctggtagcataattgcagatggataagatagataatttaaaatcgtatttttgaattaaataaaaatcgatgaaatcgaagattaaagaattccaacataaaataaactaataatgagtaaaaaactctcacatattttatcattagggattttctcaacattattgttttcttgtgctactgtacacgatagactgaacacaggaacagtcgtgagagactgcacgggaacgtatctcagagttgcagagaatgaagattacctgatttgtaatgccgaaattctagaatccaaaaaagatggcgaaaaagtgtcacttgtttatgattacaccaaagaatgtaaagaaagagacggcaaaataatgtgtatgatgtaccacgaaagcaaagggatgatcagagtcaaaagtgttaaataagctgtttcattttatagcgacttatatttgttaaatttgccttgtgaaggactattattattttctcgggattagccaggatgcttctgcagaagatatcaaaaaagcctacaggaagctctcactgaagtatcatcctgataaaaatgataatgatgatttcttttcagaacgattccgggaagttcaggaggcttatgaaacactgactgatatcgacagaagaaaactctatgatcagaatctcagcagccagcggagaaatataaaaagcattcttcctcctaaaatcaaaagtttttctgcgagtaaaatccgcgcgcagaaaggcgaagaaattaccgtttactggaatacttatgatgcagatctggtaaaaataataccttttggtttggaaaaacctaacggcgaacggactatccggattacggaattcgattctcaaggcaaatttcagatcttacttcacgccaccaatacggttcttcataaaacaattgtccagggcatcacgataactgaaatgatggaaaccgaatctagctctaatgataaagagcttcagaataatccatcaaaatcgtcacaaaaagctccaaaaaaagaaaaccaatctaaaagactggtttctgtacttatatttttagcgttggcagttatgatcatctggctgatatttagctgatttttgcacgtcctggacattttttacatcgctttcctttcttgaattttttacagcattttttcttgtcgcaatacatcatttcatcacttcggtaagccggagccaaaggtgcaatcttgaaagctataactgttggaatcatagctgcaaatataagttaatttagaataaatacaaattgaattatcgaaataattattcttattaattgtttttattttaaataaggcttcatcacctctgtccagagtctgtaaccttccggtttcatatggagcatatcttccaagaaaatatcagttctcacattgccgttctggtcattcataacttttgtgatgtcaatgaactttgcctttttttgagtcttaaggtaggattctatggcttcattgagttctttcatctgtggccaaaactcttgacggcttggggaatatttgatagaaacatacgctacgggaacttttggatacttttgccggatctttccgaaaaatattttgaatctttccaaaacttctgctgtagtagggtaatccgttgcaatatcattttctccgcagtaaataatgatttgtcttgaattatatgggtttaataactcatcagaataattattaagatctaataatctggagccgccgaagcctctgttgatgatggtttttcctggaaaatagtcatttacatcttgccagtaagtaaaagaggaacttcctacaaatagaatcggtttctttggaatcccgttcgtttcatctgtttttttgaattcctgaatctctttccaatatggtttttcctgagcaaataacagaatggaatttatcatcagtcccaataaaaaaagacctttcagaagttttttacaatgtttcatttttaaattttttttgaattttcaatataaaaaaaatcagctgccaaagcaactgatttcagttttttaaataattgtttaaaatttaatcaatgataaattttgtattcagttctcctgttttcaagatataaataccttttggaagattattcaattggattgtatttccattttggaaaggattctcaatggtctgaacattttgtcccacagtattataaatgaatgctttcttgaactgtttcagatccttgtctccgctcacgtagatcacgtttccttttacaggattcggagcgatagtcagatttttggagaaagaagcgtcatctaccgccattaccgttccccagattctggttacatactcgggattatctacgtaaggatttctgtttccctgataattataaacggcattattcctgtcaatttctttttgagaaaccggatcctgctgatgccaacgcaaaagcattgacagaaatggctcgccaaataccttgaacgtagatccatcgtacatggcataattgaatgttgtaattctcgactggtacctcgttgcaaaataaagatagattcttgcgatatctcctttgaactcattaatgggttcgaaaacagttccggaatatccgttaagtttactgcttcctaatttagacccattcagtgatgtccatgttgctgaggctacttctccatagggccagttacctcttttctcattcacttgataatccgttgccaggatgtgatgataatcgttgtgcatcggaggaacttctccgccgaaagttgatcttgggattgtgtgttctctgttatagcaagttccttccggtccattgctggatccgcattgattggttactatagtataattataaggatccggacctgcaggattttcagaatagatgtctagaaccgtattgtcattttcataatatttgtcacggtctgcagtgctgaaaacagtccatccgtagcctctgtcctgatgaccctgggtaatgatctgacttaatttagttttaagatctgcaccagtaagaccttctgtaccattgtaataacctgtagggatctgcg

SEQ ID NO: 2825 - DNA, 23567 bp, synthetic construct
  source 1..23567: mol_type = other DNA
  misc_feature 1..23567: note = Synthetic
tgaaaatccccgtcacactcccaggaatacggaatgctgggcgaaggaaaaaacagggccggacggtctatatacagctggtgtgtaccataatgaatcgtgccttttcctataataaagctgattttataataatcgcggcggttataggggctcttgaagctgcagtatctgcgcattgaaatattgaagtgggattttcccatctcaaaatcctcagaatcaaacattttgatctgatctttccggattcgtctgtaataatcctctatggtttccagctggtcactcatgatgttgaaattataaaaatcaaagatacggaaatgtaacgaaatcaaaaagccgtaaaaggaatgcaggaatttattaggttccttaaagcaaaaatattctgtttcatgaatttctttcagacaggcagcagatgatattcattgtcttttatttcccatttctttaaatttccatggtcagcacatgtgacggaagctgaaaaggtcctgtcttggagtcggcagctatagtaaaacctgtttcttttaaaaaatcaatcaaaggatcatgggcgagcatattgacccatatcagttccgtaaaacttactgccgatcggcattttttccagagtgactgccttatttccggagaatcaaactccgggagaataacaaaactgatctctgtggccctttttccgtcagtgattccgggatatgcagtgccgctttttataatgctgtacccaactggtttctggtttgcataggtcatgatcagctggttggaaagattattaagatcattgatcatcttcctcgggtctatttcatgtttgatgtatttttgaatttcctcttcaggaacaaaacctttatgcaggctgtacaacgaagaatcaatgatggatataagatcagaaattccctcttcagaacctactgtaaattttgaaatgatctccatgagcttttttattcaaaattataagattaattcattcgaaaggggtacagttatgttaaatttaatcggtacagccaaaaagagatagcaggatggaggcttcccggctctttttcagtttatttaacgtaaaatatatttagattcaacatttttatcagcctgcatctgagggatattatcagttattttaaacagcaggccgttaatccatttttcattaacaaggtctatatctgttccgctgaggatatgtttctggaaaaaataagaaatgtcctcattcagatatttttgggtaagatccagaaaaagctcatccgtaaacttcaggtttttctcccggcaggttttcagcagttcctgcatcagatcgtccagcgattttttataattacttttcatcaggatctggttgtctagccagaaagcgaagatagccccgcgtctgtagggtaccttttctgtatcacggcttttccagaaatcatctttgatggtataattcatgatgttgcgctttggatttttccagtggcttttaattacttcttcattaaaaagctccatccattcctgccatgagatatctttgatcttcagcctgtttttataggtgtaataatctgtaaatccctcactgaaccagtagttaagctcttcatgtttatttttgatggtagttccgatccagtcatgcatcatttcgtgatgaagaagataaaggtaactgtttctgttattgaagggattattggttccctggatcataaatgcattttttatggctgatcctgtagtgctgtatcctttaaatgtactgtctttccgtgaaacggtaggagtcatgatgaccgtaaaataatcctgatcataatctttccagaaatcacgctgggactgcgctgcttttttcagatttgaaaacagaaaatcatctgaaaacccgttattccattcatcccgtacagcaaaatatacgggtttatcatgaattttaaaatcatagatccggtaatcaccgcctacaaaaagtgaattgtaaaagccttcccataacacggttttgatcttttgatgacgaacctggctggcaaaagtattgtgaatcttaaaatctgaaggaaaaccgatccattcaacagaaaattcaagttctttatcgtctggcatctccgtgaaagacttcggaacaacaaacaggtttttaccaagaacatgaaaaaaatggtttctgattctcggacggttgaaaatatggtggttgggatcttcaaaatcctgtttgattctataggtaaaagagacttttttgctgtttttatgatgaattatgactgcatctttttcaggctgaacctcaaatcggacctccggattgtcttcctgacgcaggatgagacatttaaaaagatctttctcgccccagttttcattactgtaatagaaatcggtaacttccgatgagttttttccggtatagtctacctgtatctttaggccgctctgttctgcatttttgtcataatacactttatagctgattttattttgagtgtacacagacagcggtaaaataagaagcagtaagaataatttccggatcatgggctaactgttttttcaaatgtagttaaaatccctcaaaagattggttgccttttgataatctcatttcagaaatattttagtctgctcttttgccgcttttagtagttgtgtgaaagcaaaagcctcttcaaagaaatctgctggaaatctccggtttttctgtgcattattataccttacaatatggaagaaaagccttatgaacttgtgtttttccaactttcagactatacaaaaagaagaatttcgataaaaacatagaattttgatgaattaacctcaatttttttatcttcagttaggctggaatcaccataaaacctatatttgcagcctaaattttaaaaataatgaaagaactaattgaaaaaatcaacgcagaatttgaagcgttcgcaacagaagctaaccaacaggcagaaaaaggaaacaaggcagcaggtacaagagctcgtaaatcagctttagaacttagcaaactgttcaaagaattcagaaaagtttctgtagaagaagctaaaaaatagttcagttccagccggctcatcgagccggtttttttatgtcttgatttctgaaggattcatctttatttcagatgttaaaatctcccagttttcagtgttttttgctaaaaatacattccaaaagttaaatactattaaattgtattaaactgctctcttttttctgtttctccatctatatttgtggcattgattttaaaaattaatgtactgataacccaatgaaacattcttatttcctattgatcttttttgtcggaatcttttctgctcagaaactgaaagttgtggattctgaaaccggaagtcctgttcctaacgcgaggattcttctagctaatcaaattgtttataccaatgaagacggctgggctccggttgatgcagctgccgttaattttgaaatctcggcctccggttttcagaaagaaaaagtgaataccttcaatgctttgataaaattgaagccggtttataaagatatcggagaaataaagattgtggatgtagatatcagaaagctatttcaggatgtcagcaaaaattaccagaatcgctattataatgagccttccctgtatgatgttgtgtacaaggaaaaaaaatcagataatgataaactgtattttttagttattgcagaagcaaaattatggagtaaaagcaatctctataacttcagggacggaatccgcaggaattatgacgaaatccttcagatgcagctgaataatgtaaagtatctgaaaaatatgaaatctgacagtattttcattgccaataccaatgaattttctcatgaatatatgggaaactattttttcaattttgaattaaaccgtacactggcccacgtaaaaaacagagattcaaaatattcaggaagactgatctttgaagaaggagacgaacagttgatttcctttaaaataaaatccggtgccgggattgatatgaaaggtgagtttaaatataataagaccgataaaacgattacttattttgaaatccattatatgcagacccattttccgatgatgaaaagaaaaacggcagacggaagagagtatgattatcagctgggggatgcctctcttatttttgatttttataaaaaagacggactgtatatacctgctctatgtaaactggaaggagatcaatatgtagcaatttatgaaggtaaaaggcacgaacgtaaattcagcagggaaatcatttataataccttcgcaaaatctgaggagaaggggctttctgcaaaggtagattttggtaaaaatatctgggaaaatgttcccgtaaaagaagaaaagaacggaacgattcttctatccgaggaagaactggcttttatcagcgggaaataagtttattgtatgataacaggaccgtccggccgggcggtctttttattttcccgcagatttcgtttaatgggtattatcttttaagttaaagctttcttttttatagaaatcggcttatatcgggctttttgctttcataatttccctaaattcctttatctttaagcaatcaataaaggttatgaagataaatagattttttgcagtgccggcagttgtgctggcagcccagttttcatgggctcagatcaaggtagattcgaaagaaaggcttaatcccgtagtaaaaagttttgtagatgaagtaaacaacaattcacagctggaaaatctggcttatgagctgctggatggtattggtccacgcctggtaggaactcctgaaatgcttgctgccaatgaatggtccgcagaaaaactccgatcatggggaatagaagccaatctgcagcagtttggaacctggaaagggtggcagagaggtactacccatgtagatatggtgtatcctcgtacaaaatcgctgtctgcaacacagctggcctggagtcctgcgactaaaaaagcagtggaggcagaagtgattattcttccaaaagcagcttctaaagctgaattcgatcaatggctgccttccgtaaaaggaaagatcgtgctgattgcccagtatcagaaaatcgggcgttcagatgagcagattaaagaatttgcaactccggaactttatgaaaaacttaaagctgaaaaagagcaggcttccaaagattttaatgcttatgtaaagaatatcgggtacgataataacacccttccggaagccctggaaaaagcaggagcggcaggagttgtgatttcaaactggaccgggattatgggagcaaacaggattttcggagccaagactacaaaaattccgatgattgatattgatctggaagattatggaatgctgtacagaatggctgaaaaaggagcaaaacctaaaattaaaattgatgctcagtctaaaatacttcctgaggctaaaaatttcaataccatcgggatgattaaagggaaagaaaagccggatgaatatgtaatcctttctgcccatcttgattcatgggatggagcacagggagcaacagacaacggaacgggaactattacgatgcttgaagcgatgaggcttctgaaaaaatattacccgaataacaaaagaacaatcgttatcggactttggggaagcgaagaacaggggctgaacggctccagaggttttgtagcggataatcctcagattataaaaggagtgcaggctgctttcaaccaggataacggaacggggcgtgtgatcaatatcagcggccaggggtttgtaaaagcttacgattatatcggaagatggcttgacggagtgccaaaatctgtaagagggcatatcaaaactgacttcccgggaatgcctggtggcggaggttccgatcatgcttcatttgtagcagcgggagtgccggggatttctttaggctctctgaactggggatatttcggatatacgtggcacaccacaaaagatacttatgataaaattgtttttgatgaggtgaaaaacaatgtggttcttacggctgcattagcttatatggcttctgaagatccggagtttgcaaacagagagaaaagagtaatgccgcaggatgacaaaggagaaacaatgaaatggccggaagcaaaagagccgaggagagattccaaagagtataaataattgggatagtaagccggagcttttgagttttctgatcaatgaaactcattctttgtttttccgttaaaagtatctgaaaattaaatgatagccggaaaagactgtttctattggagagacagtcttttttgtttttttaattgaataatagagtgctgttcaatgcgtagttttgatatttttctgttgaagcattgcttttatttccttgattctattctcttgaacgatataggttttgtagattgtattattgaggtgcatgctggtaccttctgcttcccaagtatgatgagctggtggaatataatctgtaaagacgggaaagaaattgataaggcataaaaaattcctgctcaatgactttaaaaatccgggatgattcccaaagtcatcaatcactttcattttaaataccttttttcctaaggtagtcccccaacaggtttcagatatggctccaaagataattacacagggaacagaatatatgaaacttactatagcaatttctttacctatgataaggaagatgagaaagaagggaagtatatcaatgagcttggcaaaaaaccttttccgttcgctgcctttataagaagggttgtaagaaagatcatattcaaaagaattatagattctgttaccctgttcgtcaaaataacgggtgggtctgtgaatgatctttttttctttggtttctgatattttcatggagctcactgaataatttttcaagttgttaaatataattttttaactctgaaaattttgaaacagaatacccttgatcttgaatgtccagctttccaaagccgtattcacagaagataaaaggaagtccatttgattttgaagagctatagtccgtctgggtatctccgatataaatggtatcattatgcttcatattattcctttccataatcagttttatattttctgattttggttttctggttcggccatgagattcaaaatctgcaaacaggccgttaaaccggtaaaaatccagaaaggcttcaatgtatccgtcctggcagttgctcacaatgaaaaggttgtatgtttctgaaaggctttttaaggtttcttcaacaccttgatacaggattccgccccgggtacgcaaaatgatgttttcctgtcctgcaatttcagcaaggattgttttaacttcctgatccgtaattcctggtgcaatctttctgacaatatcgtccgtaagaaggcccatatactggttcatgtcttcaggtgtaagttttttttcaataaggtggtgccgggttaaaacttcgttccatatatcgatgatagaggctctggaatcccataaggttccgtctaaatcaaaaattaaatttttatacttcacaatacgatgtttatatttttaattactgttcgttgtttatacgacaaaactataaaatcatgctcagctgaaccctttttcttgcttcatccacttccgtgacttttacccttacatgctggtgaagtttcaccacttcattcacatctgagacaaagccgtctttcagctgcgaaatatgaacgaggccgctttctttaattccaagatctacaaaacatccgaatgctgtaatattgttaacgattccaggaagaatcatacctgcttttaaatctttaatactttttacgttcgggtcaaactcgaaaaccttagcggcttttcgcggatccagtcccggtttttcaagctctttcagaatatctttgatgcttaaaattccgatttccccggtaatgtagttttcaggttttaccagagcaattttttctttattcgcaatcagttcattggttttaatccccagatctttggccattttttctacaataccgtatgcttcaggatgtacggcggaattgtccagagggtttttagcattggatattctgacaaatgcagccgcctgctggaaagctttttctccaagcctcggtacttttttcagctgtttccggtcttcaaaagctccgttttcagcacggtaagccacgatattttcagccattttttccccgattcccgaaacatagcttaaaagtgatttactggctgtatttaaattgattcccacagaatttacacatttcatgaccgtggaatcgagttcgttcttcagttgggtttggtctacatcatgctgatactggccaacaccaatagattttgcatcaatttttaccagttctgccagaggatcggaaagtcttctcccgatagaaaccgcgccccgcaccgttacatcgtaggttggaaattcatcccttgcaatcttactggccgaataaacagatgctccggcttccgaaaccacaaaaacctgcagaggcctgtcaaaggcgatttttttaataaagaattctgtttcgcggctcgctgttccgtttccgatagaaatggcttcaatattataggcattcaccatcgagcggatttttttcatggccattccgctttcattctgcggagcgtgagggtagagggtttcattgtgaagcaggtctcctttttcatcaagacaaacgactttacatccgcttctgtaaccggggtctatcgccaggattcttttctctcccaaaggcgaggctaaaagcagctggcttaagttttcagagaagatctgaatggctttctggtctgccttctccttagcttcctgtaaggcttcattggaaatagccggctctaaaagccttttgtaactgtcttttatagccagagtaatctgttcagaactttcgttattggatttaataattgctttttcaatgaaatcgatggcttcttctttgtcaatgcctacatttatttttacaaagccttctgcttcagctcttaacatagccagaagcctgtgagaaggagttttgccaaggctttcttcccattcaaaatactgagagaatttttgtgcttcttcctcatcctttttggcttttaccactttggaggttactacagccttacgctgaaagatccgacgtagatttttacggacgtacatattttcattaatccattccgccataatgtctctggcaccctgaagggcctcttcctcagacggaacatcattattaagatattttgacgccagaaacagaatatcattgtttttctggctcatgatgattttggctaaaggctccagtcccttttctttagccgcatctgctttggtttttttacgttttttgaaaggcagatataaatcctccagctcttgcatatcaaagctttcttcaatcctctgacgaagctcaggcgttaaagcattctgttcctcaattgattttacaatagattcttttctcttaacaatctcttcaaattgcttgttgatctttgcaatctgctcaatctgaatttcatccagattcccggttttgtctttcctgtaacgcgaaatgaaaggaatggtgcagtcttctgccaataattgtaaagtattgttgatgctcttttcagaaatattgagctgctgctgtataaattctacggtcgtcattgttctgttttcggatggctaaaatagggttttaaaacgaaaaaaggcgagttgccccgccttgaatgttttcacaacggaataatccttattgtgaattgcttttcaaaattattattacaaatatagaagaaaaaatctttagtataattatggaaatccgtaattcggatgttttttttatttctatttttatggaattatgaaaactagataattattatgaaatatatacttggactggatattggagtttcatctgtaggaatagctgttatatcagaggaaaatcaaaaaaaaacaatagaaaatttagctgtaagaattgttccggaagatcctgactttcatgggaagttttattcgggaaatactgctagtaaaaaccttgaaagaactgcaaaaagagggaatagaaaaaataatcaacgatttaaggcaaggcgagataaactttaccaatctttgaaagagaataatatgtttccaactagtaatttatttgatctttcagcagttgaactttacggattgagagccaaagctgtttcggaacaagtctctttgcaggaattaggtaggattttaattcttctaaatcaaaggagaggttttttaagtaataggaaatcggtttcggaagaaaattcaacagaatataaagagcggattgcagggcttgaaaaagcattaggaaataaaacaattggacaaaaattatattcggaattacaagaaaataataatgtatttgaagttttacttcgagaacgaacataccagagaagttcatacacagaggaatttgacagaatttgggatgaacaaaaaaagtattatctaattttaacaggtagttcaaatgaagacgataataaaggaacattatatgatttgattagaaatagaattatttattatcaacgtccattgaaaagccagaaaggattgatttcagaatgtctgtttgaaaaacatcataaagcagtagcgaaaagttcaccttatttcgaactatttagaatttggcaaaaaataaatgatttatcttggaaaactcctaatggagaattatttaaaccaactgatgagcagaaacaaaaattgaaaaacgctttatggaatggtgacaatttaaatcctaaacacaaacttactgtatcaaaaattaaagaaattctcggttatacctcaagagaaaaaatttacctgaattttaccgaattagatggtagcagaacttatagtattctaagaaatgctttgatagaagccggaatagaaaagccggaacaatatctcttttttaatatggaaactaatgatgaaaaaggagggttatttgagttatggcatattacttattctcttccaatagaaaaggaagtcattaatgcgctgaaaaatcgttttggttttgataagaaacaagctgagattattgccagaagagtagggtattcttcagattatggaagcttgtccactcgtgctattcgtaaattacttgtacatttagaaaaagggttagggtacaccgatgcttgtgataatattggttatgatcatagtggttacaaaaccaaaattgatcttcaaccaaaattaaaacagcttaaaagaaatgaactgagaaatcctgttgtggaacaaattctgaatcaggttgtgaatgctgttaatttgataattgaaaaatatggtaaaatagatgagataagagtagaattggctcgcgagctaagaaacaatgcaaaaacccggaagaatatttctcttttaaattcaaagaacaaaaaaaataatgatattataagaaaaaaacttcaagaagagtatggttttaaatttgtaaatggcagagatgtgacacgctatattctttgggaagagaactctaaggaatgtttgtattgtaacaaaacgataaatggatctgatatgcttacaggaaacgcagatatcgaacatattctgcctaaatcccgttcgtttaataatgcaatgaacaattatatcatcactcatagaaaatgtaattcggataaagggcaaaaaacagcttatgattttatgagctccaaaggtgaagtaattttacagcaatatatagaaaaagttaatgatctatataaagacggaaaaggaagcatttcaaaaacaaaatttgaaaacctgctttgtaaaggtgaagatattccatctgattttgtggaaagaatgaaaaaagattctcaatacattgctaaagaggctgtaaaaatgttgaaaacagtgtgtccgaatgtttatactacaacaggacaggttactgatttccttagagaggaatggaaactgaaaaacctgttacaggaactaacttttgaaaaatataaagcaattggtcaggtaaaagaaaaaataataaaaaccaataacggacaaactaaaacctttaaagttattgcagattggagtaaaagagacgatcatagacatcatgcaatagatgctttgatttgtgctttaactgaccagaaaataatttttaaactcaataatctcaataagatttatcaatatgaaagaaatgcattaagccaaaaagaaattgaagaaattgaagaattcttagaaggtaagttttcaataaaagaattctctgcgcaacaaggaaatatcatagaatgttccattccaaatattcgtaaagacgcacaaaaacatctcgagaatattttaatttctttcaaaaaggaaaatagtaaagtgttaacaatgaataggaatcaacctaaaaattgtaaagaacaaataacttgggtgccacgtgccagattacatgaggacacaattatgggacgtgtgaagcgcattcctgaaaagaaaatgaagcttaatgataaagtgtcttttgaacaaataaaaatgattgtaaatcctgaaattaaagaaatacttctttatcgtcttgcaaaatttggtgataatccaaaagttgcttttgctacaaaagcattaaaaaaagaacctattttttatagagaaaatgaattgaaggaagtttcaatttatgaatgggttaatacaaaacgtgttgctctcaatgaaaatattactgattctcaaatagaaaaaattattgatcaagcgagcaaacgagctgtaaaagaaagattaaatggtgggaaaattaaagaagtgttcaaaaacttaactgaaaacccaatccagttaaaaaatgggatgattttaaaaaatgtaacagttacagatgagagtaaagtagaaaaaataagaaacggttttgcaattacaggtaaaaatcatcacgctttagtgtataaagatgaaaatggaaaatataatgataaggttgtttctttttgggaagcggttgccattggcttacgaaatgtgacagaatatggtaatccttatccgattatcaatcgaaatcataatgatgagttaggagagttttatttctcaatgcaaattaatgatttattcgtctttgacttgaaacattctgaaaacccacaagaagaaaatgaaattaatttttttgatgttgaaaacagaaaacagatttctgataaattatttagagttcagaaaatgagtaagaaaagtaatggtcaatttgtatcagattttagacaccatttagaaacttctgttatacgaaatgatatgatattgaaaaatataacttggatatcaatttctaagaattctgatttagaaagattaacaaaaattagagtaaatcatcttggagagattataaaagttggagaatagtaaattaacataaaatgatcacccgttctatctatattggcaaccctgcttatcttaaacttaaagatgaacagatgtatattttagaaccttccacaaatgagatgaggggtaaagttccggtagaagatttagggttattgatgttggatcatttccagattactatctcgcatcaattgattcagaaaatgatggggaataatgtggtagtggtgagttgcgatgggcatcatttaccccacggaattatgcttccgctttatgggcacactgaacattccgaccggattaaagatcaattagaagccagtgagccgctcaaaaaacaactttggaaacaaactgtagaatgtaagattgaaaaccagaaagaggttttaaaacggttaggaaactattatgaacctatgctggaataccagaaaaatgtaaagagcggtgatattaccaatatggaaggcattgcagcacagcattactggaaatacctcattagtctggattttttgagacagcgttttggagattcacccaatcagtttttcaattttgggtattctgttctcagaagtattgtcgcaagagcgattgtagagaccggattgcttcctgttctcgggatttttcataaaaataaatacaatccttactgtctggctgatgaccttatggaaccttaccgtccttttatcgatttattggtaatgcaatggcttgcagttaattcagaaaccgaagaattaactaaagagtttaaagctttcatcttacagattgcgaccaaggatgtaaaaatagatgataaaaccaggccgttactggtggctgtgaaaataacagctacatcactgtataaatgttatacaggagaaaaacgcctgatctcttatcctgaactgatatgaatgccgaaaggtttaatgcttatcgaattatgtgggttttagtattatatgatttgccgacagagactaaagccaatatgaaagatgccaaccgctttcgtaaatcattgcttgatgatggttttaccttatttcagttttcgatgtatgtaaggcattgcccaagtcgggaaaatgctgaggttcatattaaaagagtgaagtttatgcttccaaaagccggaaaagttgcaattatgtgcattaccgacaaacagtttggagatattgaaatattctttgccagaaataaagaagaaccccctccaacctttcaacagcttgaattattctaatttttaaatcctaaaaacaaaaacaatctactgaaaatcagtagattgttttttgaggctgtgactaatcacgaagataataatttttgaaagcaattcacaacagggaagaatgtaagattcatgacctcgttgctgtgactaatcacgaagataataatttttgaaagcaattcacaacctcaaaaggctacgcattaccatggatggggctgtgactaatcacgaagataataatttttgaaagcaattcacaacatcatagcattcgaacctccataataagtagctgtgactaatcacgaagataataatttttgaaagcaattcacaacagcgaagaaaaaacaaacataattcaagacgctgtgactaatcacgaagataataatttttgaaagcaattcacaacggaggccttccatccatctacattttctagctgtgactaatcacgaagataataatttttgaaagcaattcacaacttaacaaacaaagaaataacggaacctccggctgtgactaatcacgaagataataatttttgaaagcaattcacaacccattcgcagatagttctgattatcctagtgctgtgactaatcacgaagataataatttttgaaagcaattcacaaccctttcgcagacagttctgactatcctaggctgtgactaatcacgaagataataatttttgaaagcaattcacaactaattgcttctcagaaggctttaaatgatcgctgtgactaatcacgaagataataatttttgaaagcaattcacaacagaaccgaacacgcacactccaaacatttagctgtgactaatcacgaagataataatttttgaaagcaattcacaactaagcatttgcgggtaatcttgagcaatctgctgtgactaatcacgaagataataatttttgaaagcaattcacaacctatcagtcatcagtaattcacctccgtctgctgtgactaatcacgaagataataatttttgaaagcaattcacaactacctgcctcggctccgttaatttgcttctgctgtgactaatcacgaagataataatttttgaaagcaattcacaacatagcattagaacgttctagctgtttatacgctgtgactaatcacgaagataataatttttgaaagcaattcacaactttgtgcgcctactccaagattcccgatatgctgtgactaatcacgaagataataatttttgaaagcaattcacaacattcttttaataaacttttacaagcagatagctgtgactaatcacgaagataataatttttgaaagcaattcacaacaacagacagtaattgcaagaaaaattgttggctgtgactaatcacgaagataataatttttgaaagcaattcacaactactttctccttcggcaaccaggagaactagctgtgactaatcacgaagataataatttttgaaagcaattcacaacacgaacgttttggggactttattacagaaagctgtgactaatcacgaagataataatttttgaaagcaattcacaacccagaggtggaattagactgagttaggacagctgtgactaatcacgaagataataatttttgaaagcaattcacaaccgtcaacaactacaactcgttttgattcacgctgtgactaatcacgaagataataatttttgaaagcaattcacaacccgacatgaattctaccatgatgccattttgctgtgactaatcacgaagataataatttttgaaagcaattcacaacaagtctcgtcctcttcctaggtattataaggctgtgactaatcacgaagataataatttttgaaagcaattcacaacaagctgacgaatttggtatattcatggtacgctgtgactaatcacgaagataataatttttgaaagcaattcacaacttaccaagagcaatatgatgctcttcaagcgctgtgactaatcacgaagataataatttttgaaagcaattcacaactattttctgccttagttaagttcgatactggctgtgactaatcacgaagataataatttttgaaagcaattcacaactgctgatcgtttaaagccttctgggaagcggctgtgactaatcacgaagataataatttttgaaagcaattcacaacaaagagactttgttccttaaaggattatacgctgtgactaatcacgaagataataatttttgaaagcaattcacaacgttactaagaagatcactaaatatggttcagctgtgactaatcacgaagataataatttttgaaagcaattcacaacgtgctacaactacaactcgttttgattcagctgtgactaatcacgaagataataatttttgaaagcaattcacaacagtacagaagtactgataatcaattgttaggctgtgactaatcacgaagataataatttttgaaagcaattcacaacctttccagcgtatagaccaagcctcaatttgctgtgactaatcacgaagataataatttttgaaagcaattcacaactgcctgaaggatgaaaaagtctcttgaaacgctgtgactaatcacgaagataataatttttgaaagcaattcacaactttcttccggtggttacatctattactggtgctgtgactaatcacgaagataataatttttgaaagcaattcacaacgtatctcactgatagcttctcagaaggcttgctgtgactaatcacgaagataataatttttgaaagcaattcacaacaaaatatgctaaagggcgaaaacgcgtatagctgtgactaatcacgaagataataatttttgaaagcaattcacaacacgccgatcttttgcgctaagctatcgctagctgtgactaatcacgaagataataatttttgaaagcaattcacaacttactgccttctcctccgtgtctttggtttgctgtgactaatcacgaagataataatttttgaaagcaattcacaactcttggattcttcactcaaaatgtagagatgctgtgactaatcacgaagataataatttttgaaagcaattcacaaccctgcgccttcttcatattgtctacttctggctgtgactaatcacgaagataataatttttgaaagcaattcacaaccctgccactgtctgttctttctgttgagctgctgtgactaatcacgaagataataatttttgaaagcaattcacaacacgtcagcggcgcattcgcggaagcgaatcgctgtgactaatcacgaagataataatttttgaaagcaattcacaacctgaggctcaaaaaggtactccggttacacgctgtgactaatcacgaagataataatttttgaaagcaattcacaacgttgacaccacttgctcaacggctataaaagctgtgactaatcacgaagataataatttttgaaagcaattcacaacgtgaggatgctccggagattcctcaatgttgctgtgactaatcacgaagataataatttttgaaagcaattcacaactatatctaggagtatcacgaaattcttggagctgtgactaatcacgaagataataatttttgaaagcaattcacaacatgaagaactcgaagtcgatgagagtaccagctgtgactaatcacgaagataataatttttgaaagcaattcacaactcaagcctcatatttccttctttatcgaaagctgtgactaatcacgaagataataatttttgaaagcaattcacaacccaaaataaagcccctgcattaacaggggtgctgtgactaatcacgaagataataatttttgaaagcaattcacaactagggtggcactttaaaagaaaattatgtagctgtgactaatcacgaagataataatttttgaaagcaattcacaacggtagttgcattaatataaaatcttcatatgctgtgactaatcacgaagataataatttttgaaagcaattcacaactgttatctggggcagtgatttcggtaatttgctgtgactaatcacgaagataataatttttgaaagcaattcacaacataccctgataactgtcgttagcatcagctgctgtgactaatcacgaagataataatttttgaaagcaattcacaacatcaagtgacaatattccaactgcctgacagctgtgactaatcacgaagataataatttttgaaagcaattcacaactaaattcaataggaacagaaagtccggcaagctgtgactaatcacgaagataataatttttgaaagcaattcacaactctcttgataccaaacttgccacagcagaagctgtgactaatcacgaagataataatttttgaaagcaattcacaacacactcaaaacatacctattcggattaaaagctgtgactaatcacgaagataataatttttgaaagcaattcacaacgtaacgcaccttgaaaacataacagcctggctgtgactaatcacgaagataataatttttgaaagcaattcacaacttagattcgataaaagcctttcttattgctgctgtgactaatcacgaagataataatttttgaaagcaattcacaactccgtgcagatcaggccgttattaatgattgctgtgactaatcacgaagataataatttttgaaagcaattcacaactccggaccgggcttgcctttcaagatattcgctgtgactaatcacgaagataataatttttgaaagcaattcacaacgtcctgaacatgttccagattcatggccccgctgtgactaatcacgaagataataatttttgaaagcaattcacaactatgttaataaagggatggtattggaagtagctgtgactaatcacgaagataataatttttgaaagcaattcacaacaaagtctcaataacaaaggtactttcctctgctgtgactaatcacgaagataataatttttgaaagcaattcacaacgctcttccttctttggaatagaaagatgttgctgtgactaatcacgaagataataatttttgaaagcaattcacaaccgttttcccttacagcttcatattgagcaggctgtgactaatcacgaagataataatttttgaaagcaattcacaacatttaaaacctgacacctttatctttcaatgctgtgactaatcacgaagataataatttttgaaagcaattcacaacgagaccttggaggtaagcctgttggagcaggctgtgactaatcacgaagataataatttttgaaagcaattcacaactacaagctcagaaagcgaacgagctcagcaattgtccattgtaaaagctgaaaactacgcagtattattcctactgatgcataattttatttattcttttacggatagccgtaaatctttttaaataattttttatatctatgtaaagtgaaataaaagtcctgatcaatcttttatttacaaaaatattttaaccacaaaattccaaaaaaataaaaaaaacaattttattaactgcatttggtgtagctggcctaatgagcgcaaaagaagacaaaaaagagatcaaagaaaatttacaaacgaaagagcaaaaggaaacacaaaaggcaaaaatgcaatgtcaaacagtcggcatcctgataggatgtacagacgaagtattagatgatataatatgctgggggtcgggttctcataacgcaacatatgaggacgcgcgaaaagaagagctgcataacgctcgtttgcttaacgagttttattgtggtgaataacatttaaataattattaatatgcggttacttgttttattatcagtcgtcacgtacggcctaatgtactctcagtctaatatcattaaatctcaatatgaggtaatttatagagtgaagatgttacgtgatacgctagcaaaggaaaatgttatagaagaagatctctctctcctcgttaatggtcaaaagtctttgtttaaaagtactcaaaaggcggtttctgattcggcactgatggcaataggcaaagagcagtttgaaaatccggttaatggtaaagttgtcattgacctaagaaaagttccttctgttagatttccttctgaagtttattttgataatggaaaacagaccgtatataaagaattattgaaaaatcaatttgcatatcctttgggtgatataattgattcgaaactacacaatgaaacaagaaaaataggctcttatacctgcaaaaaggctgaaggaacctataaagggagacattatatcgcatggtatacaaacgaaataccgatttctgatggtccttatgtttttaaaggcttgcctgggttaatattagaaatatttgatactaaaggttatacaatcttttctatgatcagcataaaaaaagctgaaaaacctatcataccgattaaagaagcaataagtacaacttatcaagcattttgcaaagcaaggcagaattatttagacgatcctgctggcacggtctcagctagaactggaattgctttaaaacctgctaatattgaatcaataaaaagcaggatcagaagtaataacaacttcattgattaaaagagtttattaaatttccattaggaaattcatggttatcagtttttatcctcggggaagtccggggattttttgtagataactttttaatgcgtcaagttctgttgtataaaggatttagctttacagtatgaaaatttaacatcattttgatgtaaattggttcgacatgtacaaaattttgcgatatgaaagcaatcggaaatttagagttatttgcattggaaatacagatgctgtagtgttgacgccgttagaagagcgtttacatgctggcggttatagtgcttttccaagtgctgcgcttgactttacggacgaatcgattgattttttaaaactgctggtgaaagatccggtaacgactgctgtgactaatcaccaagataataatttttaaagaatttcttttataaagtcagtaatgactaccgattcgttagagtcagaatgaactgcaggatataagttggctgacagataaagacatgaataatgtcttttcatggctttatttttgctgcaaagaaaatatttttaaacagtaaccataaaaactattaaataataacccatgaaagtacatttaattattctcattttattttcttcgttccttttcggtcagaattcaagctttatctatgatttgaaatacaaaccgaattcagacagcaccaaaactgaaaaagttacctattatctggatgtaagggaaaaggagtccctgtttcgttccaataaattcaggaggtcagattcattgagggtaaagagaggtactcctgaaggatatgatacccaatttaataacagacagctgtacgtcaaaaagaatttcacatctaatgaaaccaagagatatgtgtttgttcccatagtatacaagacatatgctattgatattacagatcagcttgactggaaaatttcagatgagaaacaaatgatcggcagctataactgtcagaaagctgaagtaaactatggcggaagaagctggcaggcatggtttactacagatatagctatttctgacggaccttatatttttaaaggcctccccgggttaatcgtaaaaataaatgatgaaaaatctgattttcagtttaatctggttcaggtaaagaatttcaactggaaagaactgtatcctgcaaaaattgaaaaaatgattgcctggagcgattatgaaaagcttcagagtgacttttacagtgacccgatttctgccataaaaccatctgctattatcaactatgatgaggcaggaaatattgtaaaaactgatttgagagagatgagagaaatgatgaaaaaacacatccgcgcacaaaataaccctatagaacttaatcataaagtggaatataaatagagaatacagcagaaattatccacaaataaagagcattcggaaaggcagagatcattatctttttcgtcgttttacttgctttacgggaaaaacagggatatgaatatatttcttgatgtatgttaaggtgataataggatgaggttttctatttttggaatctcaaaattgatgattttgaacttttaaactttaagtaaagaaaatttttaaacaaactaaatagtatgaaaaaacttagcgtaattgcattagtaggagtaggattgcttgcagcatcatgtaataaagaaaaatcagcagaaactccggcagcggctcaggagcaggcggttgcagaaagcaaaggagaagtattggcagtggacactgttgcttctatcgtaaactggaaggctttccataaaggaggttttgctccgcgttggggtacacttaacgtaaaatcaggagatctaagtgttgaaggaggacaggttaccgcaggaaactttgttattgacatgaactctctgaaagttgatccggcttcagtaactgaaaaagataaaaaacctgaagatctggtagcacacctgaaaaacgaagacttttttaacgttgaaaaaaatcctgtttcagattttaaaattacaagcgtagcagatcttaaagaggcgcctaaagatgccgtagcaggagctaacaaaacagtaagcggaaaccttaccttattaggaaaaacaatgaatgtaa

SEQ ID NO: 2826 - DNA, 23489 bp, synthetic construct
  variation 3166: note = n is a, c, g, or t
  variation 10355: note = n is a, c, g, or t
  variation 11081: note = n is a, c, g, or t
  variation 866: note = n is a, c, g, or t
  variation 5806: note = n is a, c, g, or t
  variation 3577: note = n is a, c, g, or t
  variation 917: note = n is a, c, g, or t
  variation 2229: note = n is a, c, g, or t
  variation 12212: note = n is a, c, g, or t
  variation 13007: note = n is a, c, g, or t
  variation 10190: note = n is a, c, g, or t
  variation 8661: note = n is a, c, g, or t
  variation 5275: note = n is a, c, g, or t
  variation 1770: note = n is a, c, g, or t
  variation 8958: note = n is a, c, g, or t
  variation 3091: note = n is a, c, g, or t
  variation 4515: note = n is a, c, g, or t
  variation 4368: note = n is a, c, g, or t
  variation 14737: note = n is a, c, g, or t
  variation 10691: note = n is a, c, g, or t
  variation 11834: note = n is a, c, g, or t
  variation 2947: note = n is a, c, g, or t
  variation 629: note = n is a, c, g, or t
  variation 11000: note = n is a, c, g, or t
  variation 13313: note = n is a, c, g, or t
  variation 4975: note = n is a, c, g, or t
  variation 2950: note = n is a, c, g, or t
  variation 12167: note = n is a, c, g, or t
  variation 446: note = n is a, c, g, or t
  variation 4485: note = n is a, c, g, or t
  variation 5038: note = n is a, c, g, or t
  source 1..23489: mol_type = other DNA
  variation 3148: note = n is a, c, g, or t
  variation 368: note = n is a, c, g, or t
  variation 9974: note = n is a, c, g, or t
  variation 1975..1976: note = n is a, c, g, or t
  variation 5449: note = n is a, c, g, or t
  variation 8049: note = n is a, c, g, or t
  variation 3019: note = n is a, c, g, or t
  variation 10550: note = n is a, c, g, or t
  variation 10611..10612: note = n is a, c, g, or t
  variation 5005: note = n is a, c, g, or t
  variation 12677: note = n is a, c, g, or t
  variation 11480: note = n is a, c, g, or t
  variation 10949: note = n is a, c, g, or t
  variation 203: note = n is a, c, g, or t
  variation 8695..8696: note = n is a, c, g, or t
  variation 11483: note = n is a, c, g, or t
  variation 4398: note = n is a, c, g, or t
  variation 8940: note = n is a, c, g, or t
  variation 998: note = n is a, c, g, or t
  variation 13914: note = n is a, c, g, or t
  variation 11024: note = n is a, c, g, or t
  variation 4239: note = n is a, c, g, or t
  variation 14506: note = n is a, c, g, or t
  misc_feature 1..23489: note = Synthetic
tagacgttcagctctaaaattcgcaattgcgtggggtccggggaaacggaatcacatcgcggatattgcccataccggtcacgaattgtacaaggcgttcaaagcctaatccaaaaccggcatgtttacaggttccgaaacggcgggtatccaggtaccaaaacatttccttgaccggaatatgcatttcctgcattcttttntccagatactccaaacgttcttcacgttgagatccaccgacaatttcaccaattcccggggccagaatatccatagcggcgacggtttttccgtcatcattttgccgcatataaaaggctttaatgtctttgggataatcggtaacgatgaccggctttttaagntgtttttccaccaggtaacgttcgtgttcactttgcatatcaattccccacttcacgtcgtattggaatttcttcttnttgtaggccggcgactgcaataaaatttcaatggcttcagtataggtgatccgttcaaagtcgttctccagcataaactgaagtttttctttcaatccgaattcagcgcgttcgttttgtggtttttgtttttcttcttcggccaggcgttgatctaagaaatcaatatcctccggatgtttntccatggcataccgaatcacatatttcaacatggcttcggcaagatcggcgttttctttgagttcattaaacgctacctccggtccaatcatccagaattccgccaggtgacgcgtggtattggaattttcagcccggaaggtgggtccgaaggtgtataccttggtaaaggccatggcagccagttctgcttcgagctgaccgctcacagtgaggttggcactgcggccaaaaaantccttatcaaaatcaatttccccgttttcattttttggcaggttattcgantccagggtggtcacgcgaaacatttcaccggccccttcggcatcggaggcagaaataatgggtgtgtgaatgtttaaaaantctcgttcctgaaaaaactgatgcactccaaaaatcagggcattacgtaaacgcgaaacgctgccaaacgtattggtgcgaaaacgcagatgcgcaatatcccgcaaaaattcaaggctatgttttttaggttgtaaggggaatttttcggcgtcactatctccgagaattacaatttcatcggctttcagttcaacggtttgccctttggccggtgaaggaatcaagaggcctttggcttcaatacaggctccggtagtgatgcgtttcagcaccgattcatccatagtattaaaatccacaaccacttgcagattctggttagttgaaccatcattcagcgcaataaactggttatttctgaatgttcgtacccaaccacgaacaagtatttccacatgggtttgttgcccttttaagaggacggcaatagacgttgacataggccgcgaaattaattcaaaatcgtttcggaaatacaaggtcttgcagacttcgggcgtgttacaatttggcagcttgtcccctcaccttgcggcgcagctcaaaattctgtcccaaatacactttgcgaacctgttcatcggctgcaagttcttcggcgcttcctgattttaaaattttaccatcatagagtaaataagcccggtcggtgatagacaaggtttcctgcacattatgatcggtaatcaggataccgatgtttttatatttcagttgttctacaatcacctggatatcttcaacggcaatgggatcgatgcctgcaaanggttcatccaataaaataaacttcgggttcacggccagggcccgggcaatttctgtgcgtcggcgttcaccgccactcagcacatctcccggattttggcgcacgtgagtcaaacgaaattcagccaggagcgattccagtttatcccgttgttcttctttattcagggtggtcatttccagtactgaacgaatattatcttctnnagaaagttttcgaaaaatactggcttcctgtggcaaataccctagaccgagttttgcgcgttgatacatgggcaaggaggtgatgggttgaccatctaaaaatacatccccttcatcgggttgcaccaaaccaaccaccatataaaaggtcgtcgtttttcccgcaccattgggtccgagtagtccaacaatttcaccttgtttaacttcaacacttacctggttaacaaccacacggcgtcggtattttttnaccagttgggtagtactgatgcgggaaagcatggggtaaaagtacactggaatccggtttccggatgattaatctccgttaaatcaattcaaatctgcctgttggcgctccacatgcaggccaatactcatcacttccggcaagggattctggcgcataatttgcctgaaagacattttgtaacgaccggtctgattaaaatgcatggggctccatttcgtgtcaagggcattttgtgttcccatatttcattcatgccccggcccaaccacttcccgctggtttcagccaatggaatttcggtattgcgcacaggaagttcctgtccattgggtaaggtagtgcgcacccgtaaccagatatttgaaaatggataagcttccgtgtgtcgcatcattaaaaacaattgatagtttttagtcgtatccagaatatcaaattcaaaagttacttcttcgtttgttttccaggaatgattcgggaaggcatgatttttcgtaggtagctcctttcacgcaggcgaacagcgttaaaatcaggatagccagtatcgagcgattcaagattttcatactatagggcatttaataattgttctttggcttgctccagttcatctttcatattcaccaccaatcgctgaatatccacatcattggctttggaacccatggtgttaatttcacgtccgatttcctgtaacagaaatcccagtttnttncctttggtggcttgctcctcattcagcatttgatggaagtaggcgcaatgatgcaagagtctgtttttntcttcattgatgtcaagcttttctacatagaatatgatttcctgttccagtcgattggcatctacaaagttnccttgcagttgttcagtaacggcagacaataaacgttcgcggatccggtcgatacgntttttatcaaaaggatcnacctccgcgcagaatgattcgatacgttggatattattccgtatggttgctgacaacattgaaccttctttactgcgatgcgcgttcaattgttggcaggccgaaaccaattctgtagcaatcactttccaatctgcttcctgaatcgactccgtggttgctgaaacgatttcaggcatgcgcatcagtgtgggtaatacatcctgttcggtcagttgcaactcggtggctatttgtttcatggaatcataatagtagcgggcgagttcgagattcaccgccatcggtttggccacaccatgttgtttcagatagatgctcacatcaatagacccacgaatcagatgctgttgaatgatcgtacgcatttcaatttcgtagagtttcaacaagggtggaatctttgcagcngtctcaagttgttttccattcaatgaacggagttcaaggatgcaggtgaaatcgcctactgtgaattcagatcgtccgtaaccggtcatggattgcaacatagcagcaaatttattgggtgaatcagaaagaaatcagaaggaaaaaagtatttattcaagtctggtaaagtataacaaaccatgaaagggttaagaaaatatttttaatgcgaagcgtaataatttctgaaatgctgaaaatttgtttgttctaaaccaaagaaattttcaatatcgtttgaatctgttgacaaacaatttctttcgagaacaaaaataaaacacttgaaatacaggcccatcaaggctttcggagggcataaaaaaaccggcagttaaaaacttccggctctttttgaatttatgggttagtaagcgaaataaccatcacaatgatagacattaatttttagacgaaaaaatatttttcaaaaaagttattcacgaattgtgcattgaaatcaaagaaaaaaatagttcaatgtgaattacaaattcatattcgttcgaaacatcttcacggcgatggcaagaagaatcacgccaaagaattttcgaataactaaaattccggagtgccctagcatcctctccaaccagtttaaacttttaaggcaatanaagatgatgattgtattgaggagaatagcgagtaatatgttgtattgatgatacaatgatttaatcgacatcaccgtagttaatgttcctgaaccggctataattggaaatgcaatcggtacaatcgantcagctttcgcgttgccatcgcctttaaanaattctatccccaaaaccatttcaagacccagtataaataatacaatcgatcaagcaatagcaaaggaggccacatctaatccgagntattcccagaaacgttcacctaaaaaaagnaataatagtatcaatgctgccgacactacggtggcacgtcctgccgaaatatgtccaactttatttttaaatgcaattaataccggaattgaaccgagtatatcaataacagcaaacaacgcaaaggttgcggtgaccgtttcattcagcgaaaaattggaaatagcatatgcagacatgcaacaaagatagaaatcaatagcaatccgtttggcttctgttcatcgttggttggtcagcatcagtaaccactacccgtatggcttcatggtcagtcaaggtaaaaccgtgcatcgatacttcatacaggctttttcttttcaggattcagtcgatacggttccaattccatccgtatttttgtccactaatttttcagccatgcaaacatcctctatccctgaagtcgcacagcggtttatgcgttatatacaaattgatacacaaagcgatccgagtnccagcagtttccccagtaccgaaaaacaanaagatcttgcccggattttagaagcagaattanaggagatgggtttacaggaagtagaattggatgcgcatggttacgtgtatgcaactattccggccacggtagataagcaggttcctgttctttgtttttgtgcgcacatggataccgcaccggattgcagcgggaaagatgtgaaaccgatactgcatccaaattatcagggtcaggatatcatactgccggatgatccttcacaaattatcaccactacacaacatagttatttanaaagaaaaattggcgaagacctgattaccgcatccggacttaccttattgggtgctgatgacaaagccggtgttgccatcatcatggattttgccagacaaattctgcaaaaaccagaaattcctcatggcaagattcgtatcttatttactccggatgaagaagtaggtcggngagttgaaaaagtggatatgaaaaaacttggtgctgattttgggtacaccttggatggcggagaacgtggtgcgctggaatcagaatccttcagcgccgatggagcaacggccatcattcacggtatttcggcgcatcccggttatgccaaagggaaaatggtgagtgccctgaaagtagctgctgcgtgtttagatgcattacccaagaacgaatggagccctgaaaccaccgaagaacgggaaggttatatccatcctgtatctatagaagggggcatcgaaaaagtgaccattaaatttatcatccgggattttgtaacagacaaactgaaagaacatgaagcccgtttagaanaaattcttcaggataccacggctcaatttccgggggcacgttgtgaattttcaacgtatgaacaataccgcaatatgatggatattattcgtaccgttccccatgtcacagaatatgctgccgaagcgatgcagcgggccggtgtaaaacctgaacaatggttaattcgtggaggtaccgatggctcgcgcttatcgtttatgggcctgccttgtccgaatatctttaccggagaaatggccatacattccaaacatgaatttgtgagtgtgcaggatatggaaaaatccattgaaacgttgatgcatctcgttcaaatctgggccgaaaaataactccagtacttacacgaaagaattggagttaaaaaactaccttagctgaaatttatgaaaatgaaaaaatttttcttgccatggccttgctttgcaccctgcttcctgaaagtaaagctcagctcgctcagaaaggtgccagttttatgtcattgggttatggatttcccagcgcaatgcaatttatgggtcgggtatttaaatttggatacacgatagaaggtgaggaagattaccaatccagttttagttataaaggatttggtccgatgcatttacgctacgaatatatgttaggcggccgagtaggactcggtttaagtgccaatgccgaatttggtaattttaaattcgtttcatcctatacagatgttgacgacaaactcatcacatcaaccaccaatttgggcgtgagtagctggaatgcgatggcacgctgtaatatccacttcctgaaacggagcgaaaaagtagatttgtattatggattcagtgtgggttacagtcgcacccgcatcaaattagaagaaacccttgaaggtgctgatatggaccctgaatatcagaaagaagtagatgccatggaagattacctgaatgatgtatttaaattaattcctgtggcctttgaagaagtgtttggcgcccggtttgcactggcgcccggcacaggcttgtattttgaagttggctattcaaaagccctggctcaaattggattttcaccaaactgggcggcgaccggggatacaaccgcagtcgctgggaatggttctaggcacgtatgcatgaaattcgtttcacaacccgcatgagcgggttttttattgaaccttccggattaaaattttatttataccgattcaactctgagaagtaactcaaaagctctatctaacgatgcaatgtctcaaaaagtaatatcatagaccggacgttttcggcctttgctcttggggcgtgaagaaaaatttgaaatcgggcgcagccttcttccggctgttcgaagccgaagccaaagcgaaggcaagtttcggatgaaggccgttcgatgagaatttttatgccaatgtgaattgtgtcttaaaccaattcgtacagtggtatatgccgatcggatagctgtttcccgattcaatgagcgggattacagatatcacttcggtattagcccaaagagcagcagccgtgaattttggctccaccttttgtttcaagacaaaaggttggaaacaggaataattccaatgtccgatgcaggaaaactcactctgatttaagcttttgagaaatacatgcgatcgaaaaaacgaaataaattttattgatttacaacctattctggctaacttaaaagattataaatattctttagcccaaacttcgccaagcgcgtttgtgctatgaatttttattcccgattgtattgattgctgtagcctacgtgcctccagaagatcgatatcatcggggcggactggcatttaccaatgtaaaataataaattagttttggactaatttattattacaattagtattaaactacttttgaccactcattgtttatcgcgtgattgaaaaaagtcctcaacactcaaagaagaaattcgtgtcatcttagccggttggcttcctcagggcaaacctgaatcgctaattactgaatatttggacgaattagcttttctggctgaaacagcaggtgctaccgaagtgaaacgcttttatcaaaagttacaacatccggatagccgtacctttttaggaagtggcaagttgttggaaattcgcgaatacattgtacgcaataaaattgatatggtgatttttgacgacgagttaagcggcgcacaaatttccaatatcgaagatgtgctaaaggtaaaggtgattgaccgcagtgatncgatcctggacatttttgcgacccgggcaaaaacagctcaggccaaagcgcaggtggaattagcgcaatatcaatacctattaccccgattgaaaggtatgtggaaacatctggaacgtcagggaggaggaatcggtagccggggacccggagaaaccgaaattgaaacagaccggaggattgtgaaagataaaattgccttgcttcggaagcggctcgctgaattcgataaacaagcacaaacccagcgtaaagaccggggcgaattgatacgtgtttcattggtgggatataccaatgtgggcaaaagcaccctgatgcaagtgttgagtaaatcggatgtatttgcagaaaataaattatttgccactctggacaccaccacccgtaaggtcgtgcttgaacgaacaccatttttaattagtgatacggttggattcatccgtaagctgccccatcatttggtagaaagttttaaaagcaccctcgatgaagtgcgggaagcggacatcttattacatgttattgatatttcgcatcccaactatgaagatcatattgcagtagtgaaacaaaccctgcacgaactgaaagccgacgacaaacccactntttacattttcaataaaatggatttgtacgaaannaacacctttgatgaatggttggaagatgaagtaaaagctgatcttcttgcccagcttgaaaaacggtggttgcatgaaagtcaggacaaggccctgtttatctcggccactgaaaaatcgaacattgatattttgcggaataacttattagaagaagttcgccgcatgtatggcatccggtatccgtacaaaacagtcttttacgaatagtggatcgttccaatcaatttacagacaaggatcngcggcaaccagccctccnccatctaccggcatgccaccgatggctctcgaacgcaaggcggcattcactacttcaatccttctgttccgggctttaccttccggggtattattgggtgcggtgggtttgccggagccgaatcctaccggtatgagccgcttacagtcgacaccttgtgcaaccaaccagcgaactacggccatagcacgttgttcacttaatttttgtgcgtccatagcgggcgttgattcatcggtatgcccttcaatacgcagcagggagatagcggttttagcttcgaggtaggctttaatatgctgcaaggcagattcactttcagggcttaattcggctgttccggttttaaagtgaattggtgtgggtagtaccaatcgatgatcctgaagttcgaaagtttgagcctgagcgagggttgggaggctaacaaacagaataagcaggcttgaaacgaacagtaggggtagtttatcaaaagccttggctaagtaagaaggatgtatccatttcattgcctaaagataaatccatgcgttacttttcgttgcggtaaaaaaatttgataatttcttttttcctatttttgcatcccattacactccttcttagctcagttggttagagcatctgactgttaatcagagggtcgctggttcaagtccagcagaaggagccaaagcctcggacattccggggctttgtttttaaagggaagaaggtgtcggtaaggatgatggatactgcgagtcacaaaggtagaataaacatagcagcaataaaaatgcctcccacttgagcggagaggcttactaaatgttttcacagcggaataatccttattgtgaaaaggtttcaaaatgtatttcaaagataattccacaaattgaaagacaaaattaattttctgaattattctttattactattttagtaagaccttaaaacatccacttatgaaaaaattcttggcctagatataggtgtatcttctgttggacttgctgtaatttacgagnaatgaaaaaaattcgaaattcaggatatggccgttcgaattattcctgaagacccgaactttcatgcaaaattttatactggaaataaggcaagcaaaaatgcagatagaacaataaatcgaggtatccgaagaggcattcaacgttttaaacagcgacgtgatagactctacgatgcgctaaaagcaaataattgttttcctgaaaatgaacttnttgagctaaatgcattaactctttatggattacgccatagagccgtaacagaacaaatctccctcatggagtttggacgcgttcttattcatttaaatcaacgacgagggttccaaagcaatcgcaaatcaaattcagaagaagaagattcaacagattataaanaaagaattgctgaactcgaagctgatctcggaaatttaaccatagggcaaaaactctaccaggaattggcgcaatcagcccatccattgtcaattgttttaagagaacgaacatacctgcgcgcgagttacatggaagagtttgatagaatttgggatttccagaagaagtattatccggaaattcttaccgggnggccacagcaagacgataacaaaggaacgttatatgaattactgcggaataaaattatttnntttcaaagaccccttaaaagccaaaaggggctagtatctaaatgcacattcgagccactacatcgatgcgccaatgatncttctccctattttgaagcatttagaatttggcagagaattaatgaccttgcgtggaagaacagcagaggagaaaccctgtatcctgatatttcgcaaaagaaattaatttacgaaaaactcttccatgataaagatttaaatgccaaatgtcaattaactgttactaagataaaagaaataatcggatattctaagaacgaaaaaatatacttgaactttcctgaattagatggaagcaaaacctatcgactaatanaaaatgctttatccaaagccaacatcaccaactatgaacgctttctgtttntcaatcctcagataaatgatgaanaaggcggactactagaactttggcatattctttattcaattccaactgaacaagatncgattaaaacattacaaaaacgatttggattctcatcggatcgagccacaattgttgcgaatgaagtccactttaattctgattatggaagcatgtcaaccaaagcaattaaaaaattgcttccgtatatggaaggtggtatgggatacagtgaagcttgcgattctataggttatgaccatagtggatataaaacaaaaatcgaacttcaaaacaaactccaagcagttaaaccaaatagcctccgaaaccctatagtagaacaagttttaaatcaggtagtgaatgtggtaaatcttgcgatggaaaaacacggtcaattcgacgaaatacgagtggaactggcccgggaattacgaaatagtgctaaaaccagaaaggcaattgcaaatcagaatncanaaaataaaaagtacaatgagtcagtaagggagcgattaagtaaagaatacaattttaaacttatcaatggaagagatgttaaacgatattcactttgggaagaaaccaatcaaatttgtctttattgcaatgccccacttacgaaaactgatttcctaaacggtcaggcagaaatagaacatatccttccaaaatctcgttcattcagcaacaacatgaacaactttattctggcacatcgcaaatgcaattctacgaagggtcagcttactgcttttgatttcatggcgcgcgatacggcaaaactgaatgattatattgaattggtcaactcattatataacgacgganaaggaaaattatcaaaagcgaaatttgaaaaccttatgtgccgtggcgatcaaataccatccgatttcgtcgaacgaatgttgaaggatactcaatacatcagcaaagaatctgtaaaattgcttaaaagtgtttgtgaaaaaacatatactacaacaggtcaaattaccgactttttaagagaaaaatggaatttaaaagaagtactcaaggaagtcaatcttccaaagtacgaggcactcggacaagtagaaaccaaggaaattaaggacaataacggctctacaaaaacgataaccagaattatcaattggagcaaacgagatgatcgcnggcaccatgccattgatgcactaatttgtgcattgactaaccaanaaattatcttcaagttaaacaacttgaataagatataccaattagaaaaggacttattaagtaaggaagatattgagaattttgaacgcgttctgagtgaagactttactgaaccggtatcttttgacctgaaagcatttgctgaagcgactgaacattactttgaagaacccatggaaaatatgcgagaagttgtaaaaaaacaactggacagtattttcatttcgattaagaagaattcaaaagtccttacaaagaaaatcaatcacggaaaattttccaatccacaaataacatgggttcccagaggctatttacatgaggaaaccatcatgggaagggtacgaaaaatttctgaaaataaaattaaaatcacacctcagtttaaccgcgttcaggacatagtaaacctccccatcagaacagtgatcctaaaccacatcagtcaacatggtggagatccanaaattgcattctctgccaaaatactcaaatcgaatccaattctttataaaggtaatgaagtgaaggaagtacgtgtatttgaagaatcatgcacgaaacgagttaaactcaatgaatctttaacggccgcacaaattgaaaaaatagctgattcaaaaatcaaggagttggttaaagctcgactgaatcaatttgatggtaaaattaaattggcctttgcagatttagaacacaatccactttggttaaacaaaacccaagggatttgtgtaaaatcaattactgtatttgatgaaagtaaagtagaaaaattgagggaaggtttcgtanaaacaggaggaaaccaccatgcgcttatttataaatcagatgatggtaaatacaatgataaagtggtttcattttgggaagccgttgaaattggactactgaatattcaaaataccggcaagccttaccccatcattcatcagagcgatgatccggtgttaggcaattttcagttctccatgcaaatcaatgacttatttgtcttcgattttaaacattcgttgaatccacaagcagagaacgaattaaatttttatgaccctgcaaaccgcgcattgattagtcaaaaattattcagagtgcaanaaatgagtaagaagtcaagcggagtatttgatgttcattttcggcaccatttggaaacttccgtcttacgggatattccagaagtttcctggattaatctcacttcaaataaatctttccaaagattaacaaaaattagattggatgcaataggaagaatcatacaagtttcatagcaaatcaaacgaaggttgacaattcataatgtgaaaaatctgcccatgtaatcgtcaatttatgattaaaagaactctttatttcggaaatccgtgttctctccattcacgcttagaacaaatacagattcgattcccggagcaaactgatcgtcatacagtaccgatagaggatattggggttgtggtattggatcatcctcaaattatggtttcacattctctaatcgccaagcttttacagaacaatgttgctctgattacttgcaatgagacccatcacccaacaggcttaatgctgaatctggatggcaatactttacaaagtcagaaattccgggcccaattggatgccagcaaaccgctgctgaaacagctatggcaacaaaccataatttctaaaatcgaaaatcaagcaacacttntaaaatcaatcggtgttgaaaccggaaatatgattcgatgggcaagtgaagtgcgtagtggagatacgggtaataaagaagccagagcagccgtgtattattggggtaagttgtttcataaattaccttggtttaaacgagagcgttttggagagccgcccaatcatatcctcaattatggttatgccattttgcgtgctatagttgctcgcagtcttgttgctagtggtttacttcctaccctaggtatttttcaccgaaatcagtacaatgcttattgtttggcggatgacttaatggagccttatcggccctttgtggatcgaatagtatatcggatggtagaagaagatcggcatgaacttgaactgaacaaagaactgaaagcagagctattgcaaattccggttttagatgtgttgattgacggccagaaaagccctttaatggtggcagttcaacgcactactgcaagtttgagccgttgttttgaaggagaaagcagaaaattggtgtatcctagcttgaaataagtcaatggtcatgaaagaccgttttaaccaatatcgtatcatgtgggtacttgtatttnttgacttacctactgaaaccaaacaagaacgaaaaatctatgcaaaattccgtaaggacatcttgcaggatggatttacgatgtttcagttcagtatttacttgcgccattgcccgagccgggaaaacgctgaggtgcatattcgtcgggtaaaacgcatgttgccggaaaaaggacatatcggcattatgtgtattacggacaaacaatttggagatatggaaatctttnttggacgtaaagaagggataaagcaatctggaagtcaacaattagaaatgttctgatttacctaaaatgatcttgacaagattgctattaattaaattcttctccaaatttcaacctatactttaaaattcagaaatgaaaatctcccaggtagcaggattgcaaaagaaaaggaaggttagattttccatcctaccttcctttctaagttcttgattttcagatacttcgataggttcagttgtttaagaactcatacgaagttacattttgaaaccttttcacaacgaggatggataacaccggccaccaatggagttgtttaagaactcatacgaagttacattttgaaaccttttcacaacaactacctttaccgaagtatggccagatagttgtttaagaactcatacgaagttacattttgaaaccttttcacaacaaacaaaggcccactccccgccaccttttgttgtttaagaactcatacgaagttacatttgaaaccttttcacaacaaagcctctgtaatcccagattgtgagccggttgtttaagaactcatacgaagttacattttgaaaccttttcacaacaccgcctcttaattgcattttgcgtttaccgttgtttaagaactcatacgaagttacattttgaaaccttttcacaactgattctgcaaactgtttcaatgatattttgttgtttaagaactcatacgaagttacattttgaaaccttttcacaactgcagtgccttatggatggttcaccgaaaatgttgtttaagaactcatacgaagttacattttgaaaccttttcacaacagattaccgcgtatctgtttgccgtaacagttgtttaagaactcatacgaagttacattttgaaaccttttcacaacgtgttattggtctttgtcattggtgaagctgttgtttaagaactcatacgaagttacatttgaaaccttttcacaactagcataaaaaaataacaaaatggaaagttgtttaagaactcatacgaagttacattttgaaaccttttcacaacccggatagccattgatttagtctttgtttagttgtttaagaactcatacgaagttacattttgaaaccttttcacaacttcaattctgtttataggctgaatgtttcgttgtttaagaactcatacgaagttacatttgaaaccttttcacaacccatgacataaagttaactgctgccaacacgttgtttaagaactcatacgaagttacattttgaaaccttttcacaacattcgtcaccgtatcagtattggcatctgaggttgtttaagaactcatacgaagttacattttgaaaccttttcacaacacaaatggactttgaaggacgcggtatttgttgtttaagaactcatacgaagttacattttgaaaccttttcacaacgcaagaatttgatttgcagttgaaggattatgttgtttaagaactcatacgaagttacattttgaaaccttttcacaacacttaatcctgcgaatcggtattaaattccgttgtttaagaactcatacgaagttacattttgaaaccttttcacaaccggaaactataatatcatcacttgctgtaagttgtttaagaactcatacgaagttacattttgaaaccttttcacaacctatatttaactggcccataggtcagtccgagttgtttaagaactcatacgaagttacattttgaaaccttttcacaactaactcacaatgctctttataacgattgatagttgtttaagaactcatacgaagttacattttgaaaccttttcacaactttgaatatgcttctactctgcttttattagttgtttaagaactcatacgaagttacattttgaaaccttttcacaactgtgtgattttgcacgttaaataactacgcaagttgtttaagaactcatacgaagttacattttgaaaccttttcacaacaatcctattaagcaaaattcagcgttttgtagttgtttaagaactcatacgaagttacattttgaaaccttttcacaacgcatttggatagtgttgtcttaatactgatgttgtttaagaactcatacgaagttacattttgaaaccttttcacaacatgtattcaaggtttgtattatcaaggcctgttgtttaagaactcatacgaagttacattttgaaaccttttcacaacaaagattgttacgggtggcattcaggttggttgtttaagaactcatacgaagttacattttgaaaccttttcacaaccatttaattcatcatttaacgcattttcctgttgtttaagaactcatacgaagttacattttgaaaccttttcacaacgagggtggataacaccggccaccgatggagttgtttaagaactcatacgaagttacattttgaaaccttttcacaacatactcaaaaccacattagtatcttttcgttgtttaagaactcatacgaagttacattttgaaaccttttcacaacgttcttcatattatgcctttctcctatcgtgttgtttaagaactcatacgaagttacattttgaaaccttttcacaacaccgcattgcgcatcgttaaacaaggatcgttgtttaagaactcatacgaagttacattttgaaaccttttcacaacaaaggacacttcgataaattgttcgatgttgttgtttaagaactcatacgaagttacattttgaaaccttttcacaacaataatgtgaagtatctgttccatcgtcaaaagttgtttaagaactcatacgaagttacattttgaaaccttttcacaacaggcccttgcacatattgattgtctgttggttgtttaagaactcatacgaagttacattttgaaaccttttcacaacttgttctgtttttctgttgtttgtgaatcgttgtttaagaactcatacgaagttacattttgaaaccttttcacaacgccacaggggtttatacgttagactttagcgttgtttaagaactcatacgaagttacattttgaaaccttttcacaaccgtaggcggtagactcataaacaccctctgagttgtttaagaactcatacgaagttacattttgaaaccttttcacaactttgggataaaggttcatttatgggattagagttgtttaagaactcatacgaagttacattttgaaaccttttcacaaccaaggagaattttattgtgatgcaaacacagttgtttaagaactcatacgaagttacattttgaaaccttttcacaactcaaagtccgattgtgtttttgcgctgcctgttgtttaagaactcatacgaagttacattttgaaaccttttcacaacgtgcattgggattggaaactattcaaggagttgtttaagaactcatacgaagttacattttgaaaccttttcacaacggtactaaaatacacgcctcaatcagcccgttgtttaagaactcatacgaagttacattttgaaaccttttcacaacattggtatgttggtttccatatttattcagttgtttaagaactcatacgaagttacattttgaaaccttttcacaactgcgaatccgttaccgcttgctcctggccttgttgtttaagaactcatacgaagttacattttgaaaccttttcacaacgacaccgacagcatcggacaacccggcgaagttgtttaagaactcatacgaagttacattttgaaaccttttcacaacagcctttttacgtgaagtttgttcacgtgttgtttaagaactcatacgaagttacattttgaaaccttttcacaaccgaaaataatgcagaagactaaaacctacggttgtttaagaactcatacgaagttacattttgaaaccttttcacaacaaaagtggcaatttagataaaacaatttcagttgtttaagaactcatacgaagttacattttgaaaccttttcacaactttcgttttctgtttgtatatcctgagctagttgtttaagaactcatacgaagttacatttgaaaccttttcacaactaactccattataggcttcatgtactctggggttgtttaagaactcatacgaagttacattttgaaaccttttcacaacattaacttggcctcttcaacccccagaaagttgtttaagaactcatacgaagttacattttgaaaccttttcacaaccgttttcaaatcaaaatcctactaaataaagttgtttaagaactcatacgaagttacattttgaaaccttttcacaaccgtaggaggtagactcataaaccccctctggttgtttaagaactcatacgaagttacattttgaaaccttttcacaacctattgccgctgatgggtatttgcattatcgttgtttaagaactcatacgaagttacattttgaaaccttttcacaacacagataacttaatcaagccggtatttgtcgttgtttaagaactcatacgaagttacattttgaaaccttttcacaacaaaaactatcttcgggaacattagtaagcgttgtttaagaactcatacgaagttacattttgaaaccttttcacaacgcatcagaattgatgcccaatttaattgtgttgtttaagaactcatacgaagttacattttgaaaccttttcacaacgcatacaccttccataattccgggtctttagttgtttaagaactcatacgaagttacattttgaaaccttttcacaacaaagaagtgcagatgttgaacacgaatatgttgtttaagaactcatacgaagttacattttgaaaccttttcacaaccagttccaaatgaatggaaagaagattttgttgtttaagaactcatacgaagttacattttgaaaccttttcacaacggacatcgtgccgaaaccataaacgtacaagttgtttaagaactcatacgaagttacattttgaaaccttttcacaacactacggttctattggatatttcacctatgttgtttaagaactcatacgaagttacattttgaaaccttttcacaacggtatcgatttgattaatgcctttgctgccgttgtttaagaactcatacgaagttacattttgaaaccttttcacaacacgttatctgacaaattaaagtcattgttgttgtttaagaactcatacgaagttacattttgaaaccttttcacaaccgtgacgtcgaatccccgcgatgtacacagttgtttaagaactcatacgaagttacattttgaaaccttttcacaacggtaatacctgggaataacgaattttattgttgtttaagaactcatacgaagttacattttgaaaccttttcacaactttcgcttcatccactcccacaactgcccgttgtttaagaactcatacgaagttacattttgaaaccttttcacaacagccgccgggtgttccacttaacttttcggttgtttaagaactcatacgaagttacattttgaaaccttttcacaacacacctagaactttcaaggataagctgcgttgtttaagaactcatacgaagttacattttgaaaccttttcacaacacgtataggtaatgttttgccgcaatcatcgttgtttaagaactcatacgaagttacattttgaaaccttttcacaactgtaaaactgttcaatggacaatggcagaggttgtttaagaactcatacgaagttacattttgaaaccttttcacaactcttaaacctcttaacatgtttattgcgtgttgtttaagaactcatacgaagttacatttgaaaccttttcacaactttagatcgtccggactatatatgtggtggttgtttaagaactcatacgaagttacattttgaaaccttttcacaacagaaaactatcgtgtatgagttacaaacaagttgtttaagaactcatacgaagttacattttgaaaccttttcacaactagtcgctacggtcaaccaacaaaatcatagttgtttaagaactcatacgaagttacattttgaaaccttttcacaacaaattgttgaagaattttccagacccggacgttgtttaagaactcatacgaagttacattttgaaaccttttcacaacatcccatgactcaagtatatcatctaccgtgttgtttaagaactcatacgaagttacattttgaaaccttttcacaactcatttgggaagttgggttgataagatgcagttgtttaagaactcatacgaagttacattttgaaaccttttcacaactagcgaagctgacagacttttgaacctaaagttgtttaagaactcatacgaagttacattttgaaaccttttcacaactatgcggattatcgggaaacattcaatttcgttgtttaagaactcatacgaagttacattttgaaaccttttcacaacacaaggtgttaatgctcctgccgtgaaaagttgtttaagaactcatacgaagttacattttgaaaccttttcacaacaccgaggcttacgtactaccgttgaccgttgtttaagaactcatacgaagttacatttgaaaccttttcacaaccaacgtggatttggtttttgaccgataagagttgtttaagaactcatacgaagttacatttgaaaccttttcacaacaaacgagatacgatgccgtgaaaatgcgagttgtttaagaactcatacgaagttacattttgaaaccttttcacaacgaacgtgctttaggaatggatcgatcgaaagttgtttaagaactcatacgaagttacattttgaaaccttttcacaacggaacgtgctttaggtgtcgatcgatcgagttgtttaagaactcatacgaagttacattttgaaaccttttcacaacaagtgacgaaatgatgccggtatattcaaggttgtttaagaactcatacgaagttacattttgaaaccttttcacaacctgttcctgaattaatgataattgtggaatgttgtttaagaactcatacgaagttacattttgaaaccttttcacaactttgcctgggctgcttatcaaatgatttacgttgtttaagaactcatacgaagttacattttgaaaccttttcacaacgcactatttattatgaattgggccgctattgttgtttaagaactcatacgaagttacattttgaaaccttttcacaaccgttcatattgataaaaacaaattattaaagttgtttaagaactcatacgaagttacattttgaaaccttttcacaacatctgtatctgaacccatattaacaacctgttgtttaagaactcatacgaagttacattttgaaaccttttcacaacttgtttgattttggataatgcacccatgttgtttaagaactcatacgaagttacattttgaaaccttttcacaacaatacctggcatttgaaccgtgctttacctgttgtttaagaactcatacgaagttacattttgaaaccttttcacaacgcagggcttctattgcaaccacattggaaggttgtttaagaactcatacgaagttacattttgaaaccttttcacaacattattggttaatgttggcatgctatacaagttgtttaagaactcatacgaagttacatttgaaaccttttcacaactgtttcattgtcggcaaattgatattatcgttgtttaagaactcatacgaagttacattttgaaaccttttcacaacaggtcgacgttaataattggttatcatagttgtttaagaactcatacgaagttacattttgaaaccttttcacaacgggcgtttgactccaatttattttgcagaagttgtttaagaactcatacgaagttacattttgaaaccttttcacaacagccatttgatcgaatgttggcacaaaatagttgtttaagaactcatacgaagttacattttgaaaccttttcacaactttgcatgggcagcctatcaaatgatttatgttgtttaagaactcatacgaagttacattttgaaaccttttcacaacatgctttgttttgactttgacctctttgatgttgtttaagaactcatacgaagttacattttgaaaccttttcacaacgaagtattgtaatcaatggagacttaggttgttgtttaagaactcatacgaagttacattttgaaaccttttcacaactttattgtgatgggtgtggtacattagtgttgtttaagaactcatacgaagttacattttgaaaccttttcacaacttgattgcaatactttatgtggcatggcatgttgtttaagaactcatacgaagttacattttgaaaccttttcacaactcccgtttgataaccttgttccgtatctgagttgtttaagaactcatacgaagttacattttgaaaccttttcacaacgccctcgatgctcagttctacgggtactccgttgtttaagaactcatacgaagttacattttgaaaccttttcacaacaggatcgacatgagttaagactaattctttgttgtttaagaactcatacgaagttacattttgaaaccttttcacaacaaagtttcaatccttaaaaaacttgggttgtttaagaactcatacgaagttacattttgaaaccttttcacaacaaatggcggcg

SEQ ID NO: 2827 - DNA, 15440 bp, synthetic construct
  source 1..15440: mol_type = other DNA
  misc_feature 1..15440: note = Synthetic
tttctttgcgagctgaagcataaaaatgttgtcctgttttgcgtttatcaacggctttttgtattaatgcaatatctaacaacaagcctgcaggacacccctctaatacacagcccacaagcgctccatgcgattcgccaaaagaagtaactttaaataaattgccgagtgcattcatgattttgtgattgggcaaaactgcttatacgattattgttttacatttttatctttgctacatgctgactttatattcaaatatcaaacaattagttcaaatagaagacaatcatgaacaaaaaattcatgttaaaggaaatgacatgaaatatttacctctattgaatgatgcttggttgctgatagaagatgattgtatcaaagactttggggcaatgtctgagttccctgaacatttaacgtcagatcaaacaattgattgcgaggggcaatatattttaccgacctggtgcgactcacatacccatttggttttttcgcattcgcgagaacatgagtttgtcgatcgcattcaagggttgagttatgagcaaattgcccaacgggggggaggcatactcaactcagcaaatcggatgagtgaaatcagcgaagacgcattgtttgatctttcgttgcaaagattgcatcaggtgattagcatgggaacaggagctatagaaatcaaaagtggttatgggcttaatacggcaggagaattaaaaatgttgcgtgtgattaaacgattaaaagaacaaaaccttatacccattaaagctagttttttagctgcacatacctaccccattgcgtatagagagaatcacgaagggtatctcaaactcatcatagaagagatgttgccacaagtttgcgatgaaggattggcagattatatggatgtattttgcgagaaaggtttttttaatgttgatgaaaccgatcgtttgttgactgcagcagcacgttacgggttgaaacccaaaatacatgccaatcagttgtataacagtggtggggtacaaatcggcgtaaaacaccaggctatcagtgttgatcatcttgaaaccatggatgatgcggaagtagcctgtttacaacattctgatacgattcccaccttacttccgggggcggcattttttttagccatgcattaccagccagcacgcaagttgattgacgctaatttgccagttgctttggctactgattataacccaggtagttgcccaagtggcaatatgaattttatattatcactcgcttgcacccaaatgcgtatgacacctgaagaagccatcaatgcggccaccttgaatggagcggctgccatggaataccaacatcagctaggtagtattcgaagaggtaaacgggcaaacttcatcatcaccaaaccgatgtcaagcttggcttacctgccctatgcatttggtgaaagtatgattgacaaagtaataatcaatggaaaacgatgctgacctctatgatacaatacccctggtattaaacagttgtttctgctggtatcaaggatgcatataatttttcatacataggaataatattattgatattgaacttttctgcttgagccaatgcgttctttttaaattgggctaatttttcttcgtcttgtaacaatgccaaactaaaagcagccatcgcatccacatcccctacttcggtaagataaccagtaacgccatgaatattgatttcgggtatgccccctgcattgcttgaaataactggcacctgacaacccatggcttccaaagcggctaagccaaaactttcatatgcactgggtaataaaaataaatctgtaatagataggatttcttctaatttttcttgtttacctaaaaaacgaatatcatcacaggtacctaattctctgcataaggcttccatcgactgcctttcagggccatctccaatcatcaacaatttacatggaagttgttttcttactttttcaaaagtataaataacatcttccaccctttttactttcctaaagtttgacacatgggcaagtattttttcgccgttaggggccagcatctttctgaaatgatctttattactttgtgaaaaacgtttaatatccacaaagttgggaatcacatgtatttctttttcaatatcgaaatattgcaatgtttctgcttttaaattatctgatactgctgtgatagcgtctgactcattgatagagaaagtaacaacggcctcatacattttatctttgccaaccaaagtaatatctgtgccatgaagggtggtgatataaggaatatttttccctttttttcttaaaatctgattcgccaaataggccgaagaggcatgaggtatagcatagtggacatgcaatatttcgagaccttcatttaaaattacatctaccatcgtggaactaagagccgactcataaggcggaaaatcaaacaaaggataggtaggtactgtcacttcatgataaaagatattggggtgaaaagcatctaaacgtacgggttgttgatatgtaataaaatgcacaatatgacctttgtcggcaagtgctttgcccaattctgttgctaacacgccacttccaccaaaggtgggataacatacgatacctattttcatcacttaaaaattaaatttactaaaatgcaaatttaaaggattattccttaccaatagtggataatgctgacagcatatagagattagtgatactgttacattgtgaaaagaaagtgcgcaaaaataaaatgggattattgattttcatgggcatgcttagtaattttacctcatgcaacaatatttagcacttctcaaccaccttttagaaaatggggctacaaaagcagaccgaaccggcaccggcaccattagcagctttggctatcaaatgcgttttgatttaaatcaagggtttccgatggtgaccacaaaaaaattgcatctaaaatcgattatctacgaattattatggtttatcaaaggtgataccaatgttcaatatcttcaagaacatggggtaaaaatatgggacgaatgggctgacgaacaaggaaatctgggaccagtatatggcaaacaatggcgaagctgggtcgataaaaatggacaaacccatgatcaactcaaaaccgccatcgaattattaaaacataaccccgatagcagaagaattattatcaacgcatggaatgtgggagaacttgcagaaatggccctcatgccttgtcataccctatttcagttttatgtagccaatggcaaactcagttgccagttgtaccaaaggagcgctgatgtatttttaggcgttcccttcaacattgcttcctacgcacttcttaccatgatgatggcacaagtatgcgacctgcaattgggtgagtttatacatacgtttggcgatgtacatatttacaccaatcatcttgaacaggtaaaattgcaacttagccgaactccgtatgcccttccaaccatgaaaatgaaccctgcaagaaaagcacttgaagaatttatttttgaagatttcaccctcgaaaactatgaatcgcacccccatattaaaggtgcagtagctgtataataaaatcattgccctaaatagatttggcatcttattgattaaaaatgggtctgttcttcaatcactttgggtgaacagcttcagacatacacgataaaagtaaaaaaggaggtatgccaaaatagattatttttgtattcgtgctgagctttcaaatcttcacttcatcattttataccagtattttaaatcaaacaataagtacctaaaccaatatttatcatgaaacttacactcatcgttgccgcttcactcaacaatgttattggtgtcaataatacattgccctggcatttacctgctgatttaaaatattttaaaaatcttactacagggcattctattgtaatgggtcgaaatacatttgaatctattggcaaaccgcttcctaatcgtgaaaatattgtattgacaagggtgaaagattatactattcctggggttattgtcaaaaacaccttagaacaagtattcgaatactgtaaaaataagcaagaagtttttgttattggaggtgataccatctataaacaaacactggccatggctgataccatttatctcacccgggttcacacaacgatcgaacagggagatgcctttttccctgaattatcaacagatatctggacaaaaacagattcttattttcatgagaaagatgaaaaaaatcaatatgattacacttttgaaacttggaaaaaaatacaataaagagggagtgtttattcatgttgcgttgaatatgttcaggccatttcgtacaaaaacatgaagccgtttatgagccatttcatgacatcattactgaagtttttcaaccgctttttgcaacatcaaatcatcatgactcatcatcatatattttgcattgctattaaaatacaaattggcaaatgccgcttttaacgcactcaacaatttgcttttataatttgcatatgcattgagttgaagactgggtatatgtttttttaaaaaatcaaaaaacaattgactcatgatttgattcatctgaaattcgttttcatattgattttcatttttaaatacttgaaattcatttttatgaaagtaataatactgtgctgcgaaaagttcgggtaaattataattgtacaatgaatctaacaaagcatgctgtgtagtatctaacaatacctgaatatcaggtttaacaccctcattgccaaaaacctctttttttgcacttgtataataaacctttttgcctgtttgctggctggtatctatactggtgagtgaaccttgtacataccgactatatatttcatgctggtactgtcttttgccttgactataatctttttggatgcacctgcccgatggcagataatatcgcgccaccgtgatacggatagccgcatgattaggcaatgaaaattgttcttgtacaagtcctttgccataactacgtctgcctattacaagccccctatctaaatcctgtactgcgccagccaatatttcactggcagaggctgaattttcgtttatcaaaatacccacagcccctttttcaaatatacccttatttttcgaaagtactttttcttcatggtctttacttttggtagttagtaaagtatgctctccgggtattagctcatctaaaatagctgtcactgcatccatatagcctccgggattatcacgcacatcgatgattaattttgtaatacccctgtcaattaataactgtaaagcctctttaaactcttcgtacgtattttcagaaaacattcgaatagcgatataaccgatatctttatgctgaggcatcacataagaagcaatgatgctgttataggcgatgttttctctttgcaattgcaagttcacttgtttaccatcaggctttcgtatgcccaacattacggttgatttcttttttccttttatcagtttgatgacttgctcgtcttccaactttttacctgcaataaggctatcatcaatttgtaaaatgatatcccctgcactgatgctcgacttgcttgctgggctgttttgcatcactgacaaaacgcgcacgctatcctggtatataaaaaactcaatacctattccatatatattgccttccagctcttcatttactcggtctgtttcctgaggaggaatatatacagtatgagggtctaatgaagtcagtatgccatcgattccattttcatacaatgtatttttatcaatactatctacatacttttcattcagtaagttgatgaggtaatctaaatgggtttgatcactttttgatgctaacagtccaggttgattaaaataataacttgaagctattttaaatcctaaaaacatacctactataagcaccaaagcaaataataaaggttggtaaaagggtttatagggttggctttccacgttaggtaatcacgaaatagcaaaagactattctacagtaaatgattttttaagttcttttgctgccgtaaaatctgctgaggtaaattcgttggtaccaacatataaggtaacctcataggtgccggtagcgcccgaaacgatataattgtgtcggagtacactatccatcattggaccaggttttaaccaaatgaatttttcataatattcagaacaattcagcaggtataaggtatctcctacttttactttttcttttgagaaagtgaaacaagccttggtagtccctgtttttttacaagatgaaaaagcaaacaaacaaataatagacagtaaaagagaagtgcgtaacatgtgaggatactttattttagggataaaagtaatcgttttttttaaattgtaaaaaagtatttagattattaataattgtcgcatcttcaaactattagaaacaatatcaaaacagaagtcgattccttccactttttttagaaaaacaggcagttgctgaatcttttcctggtattgaaaattgcctttgagtaaccaaataaagtcaatatttttggcatcaggcatcatataatttgtttttcgtcgattgcaaaaaatatagtgttcaatcagtttttcttcatctttatattcaaaaacgggaaaaaaatgttgttggatttgtatttccagctcatgattccgtacaaaagaaaaagcaagacgttgattgatatacgatatcagctggtaatattcggaggcgctcacgatgcctatcaggcgtacatcttcaaaaaactcatcttctaaatctgagttatcgagcacctgatttttgggtttacttattttcatgcggtgaccagtaatggtttttaaaatcctgaatttgatcatctacgatgtgaataccttcggcctccagcaactcctgcatgagggtaggcgttgcaaaatgatgtttacccgtaagcaccccatttcgattgactacccgatgggctggcactgcaggtttggcatgatgactggcattcatagcccaacccaccattcgcgaagtcgcttttacccctatatgatcggcaatagtgccataggtcgatacctttcctttaggtatttggcgcaccatgtcatatactttttcaatccatgtaattgtatcctgattattcgtgggtttcatgctgatttgcctttaattgtttttgtatgaattgttgttttttaatggggtcaagtacatttttatacgcaaatggacaatgcaagcaaccattgccacaacaataacctcttttaagcaaataagcggctgtaaaaacatacaaaccttcctcatttacatagagttcatcatcatcaaagaggggtttcttcatgaacactttttttaggaggcactacaatggactctgcaggtagttgaaaacttacatacttaataatacgatgatcggctaaatgcatcccttcgtaaaacgtttgaatattaaggggaaaatcaggcacccctttgctataaatatcggcttggttttggatgatagtacaatgatggtgagcaatcatttcgagtgtaaattcatataactcacttgaatcagttttaagatgaatcacgccccctggctttaataattgttgatacatggccagaaacttatgatgtgtcaggcgatttttggctttggaagcccttaaaaatggatcgggaaaagtaatccagatttcgctgatactttgtggggcaaaatactgcaggatagtctcgatacgaatgcgaagaaagcaaacattttttatctgctcaagcaaagctttttgggcacctacaaacatccgattgcctttgatatctaccccaataaaatttttagcgggaaaagctttggccatatttacggtatattctcctttaccacaagcgagttctaatacgatgggatgctcattctgaaaaacgcctgtccatttgtctgccatgttttcaggaaactcaaacacatgttgaaaagttttaatagccgcaaagcgtgttaattttttagctttcataccacgaaattacaaattcccttatggatgtttcattttttattttaaaaaatctaaattaaataccatagttcatattaaatttgtgatgtaaaaaaaatattcatgacagcagacattgaaaaaatacttagtcacacagaagatagcatgaagaaagctattagccatttggaagtagaaatattaaaaatcagagcgggcaaagcctcacctcagatgttagatggcatacaaaccgaatattatggtgcacccacccctatttcgcaagtgtcaaacatcagtattgtagatgcccgtaccatcaccatacaaccctgggaaaagaatatgttggctccaattgaaagagcgattatggcggccaatattggcattaccccacaaaatgatggggtgattataaaactctatttaccaccattaacagaagaacgcagaaaagaatttgtaaagaaagtgatggcagaaggtgaacatgccaaagtagcgattcgcaatatcagacgtgataatatggaagctatcaagaaactacaaaaagatggtatgagtgaagatttggccaaagatgcagaaacaagaatacaggccatgactgataaaaaaatcatagaaacagatcaacattgtgccagcaaagaaaaagaactgatgactgtataaaccatgtttgaaacagtcaaagaatatttacatcacaattggttgttggccatttcaacacccatctatacggtacttatcttattggaagtgttgttaagcaattatcaacacaaaaagtattataccttcaaagaaacactcatgaatttttggctcaatattgccaatgcattactgggcttgagtattaaggtaggcgtactggctatgcttgcctggttttatacttttcatatcaatagtattgaagaaccttatctgtactggactttattatttatagggcttgactgttgtttttattttgaacatcgcagtgagcattattcaagaattttgtgggcagtacatgtcacccatcattcatcgcaagagtttaatttaactacaggttttcgttcgtctgtgttaagaccatttgtatcctgctggttttttatacccctggtgctgctcggttttaaacctttagacattttgctcatggatgcgatttgtcagatttatggcatcattgtacacacccgatacatcaaaaaaatgccggtatggtttgaaaccttttttgtgagtccatcgcaccatcgggtgcatcatgcaagcaacatcatctatcttgacaaaaacatgggaatggtccttataatttgggacaagttatttggtacttttcaagcagagctcgatcatgaaaaggtggtatatggcttaaccaaaaaccctccatacccacaccaccccatacgtatcatcacccatgaatgggaacaattgtttcgcgacctttcacaaggtggccttagctttaaacaggcacttcaatacattttcaacccaccaggatggagccataatggtagtagtaaaacggctaaagaaatgagaaaggaattggaggggagtgcgaaacgcaatgaatataagcaatcaaataactatagtcaaacgtaaatacatattcatgtaatagatactcgtattgtataggtaaaagaaaatattctatgacattaaagttaaaaaatgacccataaggaaagacgaggctgaaaagtagtttaaaagaaaaaagcgagttgccccgctttaaatgttttcacaacggaataatccttattgtgaaaaggtttcaaaatgtaaaacaaaattaagctttctattcaaaataaaaaataattgttttggcaaacaaagtaaactggttacgtagtgaaaacttatatttactatcaaataaaccatatgaaaaaaatactaggccttgatttgggtgtatcatctgtcggaatgtcagttatctatgaaaacggctcagataaaaaaattgcagaattagctgttagaataatcccagaagatccaaattttcacggaaaattttattcaggaaacactgcaagcaaaaatctcgaaagaactaaaaatagaggtataagaagaggaaaccaacgatttaaacaaagaagagataatttatatagaacattaaaggaaaataatatttttccaaatgaatcattattcaaattagatgccttatctctttatgaattaagatataaggctgttactcaaaaaataactttagaagaaattggaagagtgttaattcatttaaaccaaagaagaggattttcaagtaacagaaaatcaaataatgaagaagaaaagtcttcagattacaaaaaaagaattactgaattgcaatacgagctaggtgaaatgacaataggtcaaaaactatatttagaattaaaagaatcaaacaatcctatatcgattttaattagagaaagaacatatttaaggtcttcatatattgaagagtttgatagaatatttgaatgccaaaaaacattttatcctttaatacttacaggtggaattaatgaagatgataacaaaggaacattatatgacaccttaaaaaataagatactgttttttcagagacctttgaaaagccaaaagggacttgtatcagaatgcaatttcgaaaaacatcataaatcaattaataaatcttctcctttctttgagacatttagaatttggcaaagaataaatgatttatcatggaaaacaacaaaaggagaaacacgttatcctacattagaacaaaagaaactattgttcaataaactttttaaaggtgaagatttaaatgtaaaaggagaattaaccgtaaccaagattaaagaagtgttaggatattcaaaaaacgataaaatatatttaaattttactgaattagatggcagcaaaacctatcgtttaataaaaaatgctttagtaaaagcaaatttaaataaaatagaaaactatttgttttttaattatcatatcaatgatgaaaaaggcgggctttttgaactttggcatatcctatattctttaccaactgaagtagaaatcattaatacccttaagaaaagatttaaaataacattagaacaagcaacaattattgcaaaagaagtaggatttaacgctgattttggtagtttatctacaagagcaataaaaaaacttttaccctatttagaaaatggacttggatacaaccaagcatgtgacaaagttggctacgaccatagtggttataaaacaaaaattgaacttaagggtaaacttgaaaatattaaacaaaatagcttacgaaacccagttgtagagcaagtattaaatcaagtagtaaacattgttaatttagcaattgaaaagcatggtatgtttgatgaaattcgagttgaattagcccgtgaattaagaaatagcgctaaaacaagaaaaaaaatcacaaaatcaaatgcagacaataaaagagcaaatgataatactagggaaagattaaaaactgaatatgattttaaaattgtaaatggtagagatatacaacgatataacctctggaatgaaacaaatcaaatatgtctttactgcaattcacctatttcaaaaacagatttcctaactggccaagcagatattgaacacatacttcctaaatctcgttcctttagtaataatatgaataatttcattcttgcacataagaagtgcaattcaactaaaggacaaatgactgcatatgattttatgtcaaagagctcagaaaagttgaatgaatatattgagaaagtgaacacaatttacaacgacggcaaaggaaaaatctcaagagctaagttcgaaaacttaatgtgttctggagaagatataccttcagactttgttgaaagaatgaaaaaagactctcaatatatttctaaagaagcggtaaaaatgcttaaaactgtttgtgaaaatacttacactacaacaggccaaataactgactttctaagagaaaaatggggactcaaagaggttctcaaagaaataaattttgaaaaatatgaatctataggacaagttgaggttaaagagataaaagattccattggcaaaacaaaatcaataaagattattaaaaattggacaaaaagagacgatcaccgacatcatgctattgatgcattaatatgtgcacttacaaatcaaaaaatcatattcaaactaaataatttaaataaaatatatcaattagaaaaagaaacacttactaaagaggaaaggcttcagatagaaaaaattttaagtgaaaatgcacctgaagatgtaaagtttgatttaaaaacatttgcagaacattctgataattatttcgatcccccattccataactttaaagaagaaactaaaaaacatcttgataatatttttatttcaatcaagaaaactacaaaagttttaagcccaacttttaacaaagcaaaaaaaattgatattcaaaaaacttggacaccaagaggaagattacacgaagaaacaattatggggcaagttaagcgcattacagataaaaaaacaaagttgaatgaaaaattctatttccttgataatattgttgataaaggagtaaaaggcgtaatagaaaattatttaaaacaatataatggcaaacctgaaattgcatttagttcaaaaaatctcaaacaaaacccattaatatataaaggtaaggaaataaaagatgtgtcgatttatgagacaacatgcaccaaaagggtaaaaataagtgaaaatattactgaggctcaaattgaaaaaattactgataataaaatcaaaaaactactcaaaaaaagaatatcagaccatagtggaaaactaaaacaagcttttgcaaacataaatgacaacccaatttggctcaataaagaaaagggaattcaaataaaaacaattactgtatttgatgagagtaaagttgaaaaagttagagatggttttgtaaaaacaggtggaaatcatcatgcaatcatttacaaaacagaagatggaaaatataatgacaaagttgtttcattttgggaagcagtagaaattggattattaaatatacaatccaagggaaatccttaccctataatagacaaatcagacgattcttttttaggtaaatttcaattctcaatgcaaataaacgacctttttgtatttgatttaaaacactcattaaatcctcaaaatgataatgaaatcaatctattagactcaaacaatagaagtttaatcagtaaaaaactatttagaattcaaaaaatgagcaaaaaatctagtggcgaatttgatgtccactttagacatcatcttgaaacgactattttaagagatataccagagttaacctggataaacttgcgctcaaacaaattacttcatagacttacaaaaattagaattaactcactaggagaaataataaaaataggagaataaataataatttttagtacctataaataatattacgaagagaaatacttttttaaaaccttgaaggttaaaaaaaaaccaaataccatgtttcttatttaacttattgtaataaataaaaagacacactaatcatctgttcaaaatttttatttacttttagagaaccaaatcctttcccccatgataaagcgtacgctctatgttggtaatcctgcttatttgagtactcatcttaatcaagtagtgataaaactcattgatcaagatgaaaaaaaaacaatccccattgaagacactggtattctaatattagaccatccacaaatcacgattagtcaagcactgatagccaaattactcgaaaacaatgtagcattgatcacttgcgatgctacccatcatccaactggcttaatgctcaatttggatggtcatacattgcaaagtcaaaaatttcaagcccaattagatgcgagcaaaccattactgaaacagctttggcaacaaacgatagtaacaaaaattgaaaatcaagcttatcttttaaaatcacaacaaatagaaactggcaatatgcaaagatgggcatcagatgttaaaagtggggatacctccaatcgtgaagcaagggctgctgtctattattggagcaaactatttatacaatttcccgaatttacacgcgatagatatggtcaaccgcccaacaatttactcaattatggttatgcgattcttagagctatcgtagcccgaagccttgttggtagtggcttgctacctacattaggcatacatcatagaaatcaatataatgcctattgccttgctgatgatatcatggaaccttacagaccatttgtagattggttggtattacaaatcattgaacaacatggtttgtggattgatttaacgccaaatattaaaaaggaattacttcaaatacccacactcgatgtaatgctggatggtcaaaaaagcccattaatgattgcagtgcaacgcacaacatcaagccttgcaaaatgctttacaggagaactccgtaaaatactctacccttatttccaatattaaaaaaagataaaaacttcagtgataaactctactattcacaacatccttgattaatacagtatgtatgaacgcttaaaccaatatcgaattatgtgggtactcgttttttttgatttgccgacagaaacaccaaaggaaagaaaaattgcaaccaactttcgtaaagacatccttaaagatggatttaccatgtttcaattcagcatttaccttcgtcattgtgcaagtcgtgaaaatgcagaggttcatataaaaagggtaaaaaaaatattacccgaaaaaggacatatcggtatcatgtgcattaccgataaacaatttggcgatatggaaatattctttggcaaaaaatctaaagaaaaagatccgggatcgcaacaattagaaatgttttagaaagtaaaaaatggttctgaatgcgtttatagaataaaaaagggaattagattttaaaacctaattcccttttcaaatctttgataatcaatgacttagatacaccctgttgtttatcgttcttgtcaaagatacattttgaaaccttttcacaacctcaaaccattgaaaatgctacaatcttagttgtttatcgttcttgtcaaagatacattttgaaaccttttcacaacagcaacagcaatagaacaatataatatcagttgtttatcgttcttgtcaaagatacattttgaaaccttttcacaacaaaatttgcgagtatagccacgtctaaactgttgtttatcgttcttgtcaaagatacattttgaaacctttt

SEQ ID NO: 2828 - DNA, 6015 bp, synthetic construct
  misc_feature 1..6015: note = Synthetic
  source 1..6015: mol_type = other DNA
agatgtgtataagagacagccttaataagcgcagaggatttctaagtaatcgcaaggcagacaatgatgaaaataactctgattataaaaaggtaatagcaaaattagaggaatcaagagaaaacctaactatcggccaaaagctttatcaagaactaaaagattctagaaatctacaagaaacactaataagagaaagaacttatttaagagcaagttacattgaggaatttgaccgaatttgggaaaaacagcggcagttttatccagatgtgcttacgggaaattctcaagaagaattagtgagaggtagtttttatgatgaattaagaaacaaaactatttattatcaaagaccattgaagagtgctaaaggattagtttcagaatgtgagtttgagaaacatcatcgatcaataccaagaacctcacctgtttttgaactatttcgtatatggcaaagactcaatgatttgaattggagacttgaggatgggactttgattaaacccaaacttgaacagaaggaagaattagctgcattgttgattaatggagaaaagttgaatgcgaaaggtttattaaccataactgagattaagaaattttttggattttcacggaatcaaagagtttattttaatttccaagagctagaaggcagtaaaacagccaaaattatcagagatgcacttaagaaagccaaaataaatgatatagactctcttttaagctttgattatagattacctgatgaaaagggtggtttatatgaattatggcatataacttattctttacctgataaaaaaatgttatttctactcttaaaaaaaggtttggtttcaccgaggataaagcaaaaataatagcgtcggaagtgaattataaatcagactacgccaagctatcaagtagggcgattaagaagcttttgcccctcatggaaaaaggattacaatacagtgaggcttgtactaaagtaggatatgatcatagtggatatatgactactgaggcaatcgcggacagattgactcaaataaaaccaaatagccttaaaaacccagttgtagagcaagttttaaaccaagtagttaacatggtaaacctagcagccgaagactacggaaagtttgatgaaataagagtagagctagcgagagaactcagaaatagtgctaaagcaagaaatcgcataacatctagtattaatagaaataaaaaggagaatcaaaaaattagggaaaggcttaaggacgagtatggatttaaaatagtgaatggtagagacattaagcggtataaactttggcaagaagcagataaacaatgtttgtattgttcaaatccaatcacaaaaactgattttcttaacggtaatgctgagatagagcatattttaccaaaatctaggtcattcaataatgcgatgagtaattacattttgtctcataaaaaatgtaattctgataaaggacaaagaactgcatatgactttatgaagaataagtcaaaagattattttcagacatacgttgataaagtgaatgaattgtttaattccaacaagaaaaaaatctctcaagccaagtttgataatctcatgtgttctggcgatgatatcccttctgattttgttgagagaatgaaaaaagattctcaatacatcgcaaaagagactgtcaaaatgttaaagaaagtttgtccaaaaacatataccacaacaggacaggttaccgatttattgagagcagagtggggtttaaagcatgttttagaagagcttggcttacccaaatacagggctttggggcaagtcgaaactaaaacaataaaagtcactgatggaaatagcaagcaaatagaaaaaataaaggactggagtaaacgagatgatcatcgtcaccatgcagtagatgctttaatatgtgctcttacagatcaaaagataatttttaagctgaataatctaaataaaatatttcaatacgaaagagacgccttgacaacagaggaaatcaaggagttggaaagaatcaatgaaacaaagtttgatctaaagcactttgtagaacaagcagcctatgaatttaaagaacccatagataatttgcgctcaaaaacaaaaaatcatttagaaggcattttaacatcatttaaaaagccaaattctaaggttttaactaaaaatgttaatgatataaaaaatggaccaaatcaagcgacttgggtcccacgcaatcgcttgcatgaggacacaataatgggtgagcgaaaacgaccatcaaataaaaaagttaaactcaataagaaatttgatagtgtagaagatgtcattaatgatatacaaaaaacagcaatagaacagcatttaaagaaatatgataacaagccactggtagcttttgatagcaagacccttaaaaaagatcccatattattagcgggtgaagagttagttagtgtcagtgtttttgataccactaactctaaacgggttccactttctgagagttttacaaaagctcaaatagagaaaataatggatgaaaaaatcaaagaactagtcaaaaatcgaataatgaaatacggttcaattaaagcggcctttaaagacttagaagccgagcctctgtggtttaatcaggagagaggtataagaataaaatctgtttcagtttatgatgagagcaaagcaatagatgtccgcaatggaaaggctaaatcaggaggaaatcatcatgctttaatttataaagatgaaaaaggaaagtatcaagatcgtgtaatttctttcaatgatgcggttcagattggtctatttaatatcgaacaaaatggaaagccatatccaattatactaaggcataatgaccctgaattaggagaatttcaattttctatgcaaaacaatgacttgtttgtatttgatttgaaacactcaaataacccaacagaagaaaacgagattgacttttatgatgtaaagaatagaaaactgataagtgaaaagctttatagagtgcaaaagatgagtaagaaatcatctggagaatttgatgttcactttcgacaccattatgaatcaaccatagatagaagtattaaagaagaaacttggataaacattaggtcgaataaattattaaatcgcataaccaaaattcgaataaatcatttaggtgaaatcataaaaattggagagtgattaaaacaagagaatttcggctttttaaaattcacggtttttaaaaacccatatcatcctaatagacaaaatttaagcaagatgagatgtaatttagaagtattttaagcagatgacttttactattttatcaataaaactatcagctttttatggaaaacaaaaaaacctttaaaacctttttaaaccttcaaggttttgaaaaaccttaaaggtttaaaaattgactttgaagtactattaataaagaaaaaacttcaagagaatttgactcaaaaacgaaaaatccagagagcaagtctattaaagagtggtgtattaagcttaaaactaatcgacttgaaaatatagtgagtgtagattgttatatgattgctagattaacattaagtcctaagaactaacattataattgtttgaaaaataaattagaaatatttaaggaagaaagactttttcatgtttacaacagggcaaatggaaatgaaaaactgtttctatcagatgaaaactatcgttatttcttaagaaaatttgatgagtatatcagtccttttgttgatactttttgctattgcttgatgccaaatcattttcattttttgttaaggattaaaagacaagaacaaatagaaaatgtaatcaaatacaaaaaccttaacaaaaaccttgatggtttgatttcgcagcaattcagtaacttctttaactcatacgcaaaagcatttaacaagcaacaaaatagaaaagggagtcttttcatgcacacatttaaaagaaagcaaattaatgatgaaaaatacttgagaaaattaattcactacattcattacaatccaaaaaaagccggtttagtgaataaattagaagattgggattattcatcatatcgagttttgatttccgaattggaaacaaaattgaaaagaaaagacgctcttgaattgtttgaaagcaggtcaaatttcatttattgtcataaacacgcctagtaattagtagaataggtaaaataaactaaaattaagagacttagcgggttttaaaccctttagagtctgtattgtaggtaaattaaagctatgattaaacgaacactctactttggcagcccagcctatctatcagttaagaatgagcagttaatcgtcaattatccagatgataagcaaagtaaaagcttacccattgaagatgcaggtgttttgtttttagaccactatcaaataaccattacgcaaccacttttgtcaaaattgctagataacaatgttgcggttatcagttgcaatgaaaaacatttgccgcaaggaatgtttttaaatcttgacggccattatacccaacaagcacatttaagtgcgcaagttgaagcttctcaagcattaaaagaccggctttggaaacaagtggtgaaacaaaaaattgaaaatcaagccgctttattggaagatcaaaacaatggaagtcaaaacatgcactattgggcatcgcaggtaaaaaatggtgatccagaaaatatggaagcaagagcggcagcctactattggaagaaattgtttgatgagaactttaaaagaggccgattcgaagacgagccgaatcatttgttgaattatgggtatgcaattctccgtgcagtggtggcaagagcattagtaggttctggtttgcatccttcattaggcatacaccaccataataaatacaatgcctactgcttggctgatgatatcatggagccttatcggccatttgtagaccgtttagtcttggagattatagaaactgaagtagattgggaagaattgagctgggacatcaaaagcattttattgcaaatcccaaccctggacgtaggtataaataaacaacgcaggcctttaatgatagctgcccagcaaagcacggcttctttggctgcttgttttttaaaagaaagaaaattgcttaaactgccggaatggctttgttaaacagtcgttttaatcaataccgaatcatttgggtgatcgtattttttgacttaccaacccaaaccaagaccgataccaaaaactaccgaaagtttgtgaaaggattggaacaagacggttttgaccgatttcaatggtctatttttatgaggcattgcccaagtatggaaaacgccaatgtacatattaaaagggtgaaaaagatgttaccacccaaaggccacgtttgcatcatgcatttaaccgataaacaatttggcatgatggaggtgtttttgtcaagaaaaaaagaagatcccccagaaattcatcagcaattagagcttttttagattgatttattggacttaaagtatacaaaaacagccccttatttgaggggctgttgtgctaaagtacaatttgaaagcgattcacaacaggtgctaattgcgtcattgcttcgtcaatgttgtgctaaagtacaatttgaaagcgattcacaacgtaagcatttttattcctctcctttcagttgttgtgctaaagtacaatttgaaagcgattcacaaccataaaagggtctattattgtgtaatcgtcgttgtgctaaagtacaatttgaaagcgattcacaacgtcatacactatgtatgcaacgaacaaaatgttgtgctaaagtacaatttgaaagcgattcacaactatgccaacactttattcgggcaaattgtgaagttgtgctaaagtacaatttgaaagcgattcacaacctttgccgtcttttggtcaacccagaaacagttgtgctaaagtacaatttgaaagcgattcacaacatgcgtgagc

SEQ ID NO: 2829 - DNA, 23186 bp, synthetic construct
  source 1..23186: mol_type = other DNA
  misc_feature 1..23186: note = Synthetic
cgctggccacgaggtgcatatgcctgaggtttggcaagatcgctttggcgccgatcccactaaacgggctgtggcctcggtcttggctgggtttatcgtgctgtatggggcgcgtctggcggggggctgtaccagcggtcatatgatgagcggcatgatgcagacctcggtcagtggatatctgttcgccttgggactgttcgccacggccatccctttggccatcattttgtatcgcaaggtttaggaggccgttatgtcaattgttttggctgttgtgatcggattggtctttggcttcgcgcttaaccgagtgggggccaccaacccgaacctgattatcaatatgctgcgcttgcgagacctgcatttgatgaaaaccattctgtttgccattggcttttcatccctggtgctgttcctgggtatggctgttggggttttggatgcggggcatctgtccattaaggcgagttcgctgggcgttgtgctgggtggggcgctgttgggcattggctttgccattgccggctattgcccgggcacagggctggcggccggggccacggggcggcgagacgcctggtggtttgttggtggcggtttgctgggggcgtttgcttttatgctcagctatcctgccatcaaagccacaggggtgctgacggatgtgttgggtggcaagtccaccttggcgcaaacgggtacggagtatacagccctcgtgacaacagttcctggtcccgtggtggctggcggtttggccattctgttcatggggttggccacaattttgccccagcgcttgcgctgacccccctgacgcaagcggggcttctcgcggcgcgctttccttgcccgggaagcgtgccgttcttttttgctggcactacgttaccctttgcccaccaccgcatgtagacgcacatcggttttggaaaagctgagggtgcgatcgggcgtaaactgtcggcagtgcacagtctcgccttctgtccccacatagcgcaacaccacgcccacgggcgtttcaatttcgtcgtcttggtcgcgattgaggcaataggtcaccaagcagtcatcatcacgcctaggcatctgattttcaatcacataggctaggtcccccggttgaaagacgggatacatgtgatcagagggcaagcgcacggcaaaggttcgggtggtcgggggcgccttggcttggttggggtgctggggtgtggtctcgtcaccctggctgttcaggaagaccaacacggcgtctggcgctgtggcgcctgcgggtgtggtgtgcagcggaatgtggtggaaccccaaggtttgtccccgttcgcccacctcgtggctctgacctctcagcgaggtcgcaggcggaggaacattggcggcctcagccaagcgcaggatcgaggaggtggccgtcaaggtgcgcaccttgggattggtagcgcgcaccaaggtggaaacgttcaattttgccgcatcggcccattgctgattggtccagccccgttcgcgtttcaccttttcaatccaaggtttaagcatgctgatttgcaggtcgcggatgcccatgtctccgttgtgcgaggtttttaggcgacaatccatgggcaataatgcaatctattgtggcatttcagcggacgtaaaccgcagatggcgtgatcggggcaagccaacacaaggtgggcagcatgggcacacgatatccttggcgtatggagcatcgcatcgaaatcaaacgcttgcgggatgccgaccacagtttcgaggccattgcccgtatcctgtcggcgcagttgggcgtgcgcgtgaatgcggtgcaggtgaagttttgctatttgcgatatctcaaagacctagaacgcaagcgccgtgcctccccagatgaaacaccatcggttccaccccctgtcgacacaaccgtacgcaccgaggctgggtttgtgcggtgcttacgggagatgggcggttttcctcgcatgaagcccgcgcccgacgtcaattggcgcaccttgggccggtcgagcattgagcgctgtcatctgaatctgtggcaaagacacctaaagctaacgcgctaatggcgtagggttttcagaacaaagcgttcaaatgtgttcacggccggattatcggcttgatgctttagcaatgatacatgagtatcggacaattgcggtaagctgggattctcaacagctgataggtggtcggggatcatggtgggtggcattacggtcaaccccatgcccgcccgcacggcggccacagtgccggcatgactggggctagaaaaaaccagtcgccatgggcggcccgcggcctccagggcgtggatggccgctgagcgatagacacagggccgtggagacagaaccagcggaatgggtttggggccgcgcagcaccgtcgcatcgcccacccatttcaagagctctgaccacacctcgtggccattggggaagtcaccgggtctgttcattttcactaagaccagatcaaactcttgattcttaaagcgttcgaataaattcaaggtcaaatcacagcggatattcaacaaaatccttgggtgccgccgcgagaactcgaccaagacctgggacaaataggcactggcaaagtcctcaggtacaccgaaactgacctcaccttccaattcaggctctttgaagcggtccatggcctcgtgatggagggcgaaaatttggcgggcataaccaagaaaaacttcgccttcaggggtcagggacaacgtgcgtccacgagtgagaagcggcttgccaagatgatgctccagtttcgccatttgttggctgagggcagattgcgtgcgcccaacgcgtttggcggcttgggtaaagctgcctgtgtcagcgatggccagaaaacagtgaagagcgactgtatctaggttcataagaattccttatggtgcgcattaattgtttttgttgtacttatgttagcatccctaatatcatatctcaagtgtataaggtttagtatggaagggatgccaatgggcgggcttttgacctcttggtttcattttgactctctggcggtgctgatgatcagcgttgttgggtttttgggggtttgtgttctggggtttgcctcccgttatatggccggagatcgcttgcgcaccaaaagcttgctgacacttggcgccatgctgctgtcggtaatggcgatggtcagcgcggacaacatatggatcctgttggcatcctggatgttcgccaatctgtttttggtgcgcgtgatgatccacaactccaaatggcaagccgccaaagcggctggccagctcgccgctgttacactggggttcggggcattatgtttggccgtggccttcttgctgatgtctcagcatactggtctcgtctctattcaggcgcttaatgcttcagacgcttctgggtctcagatgaccatggctttgggggtcttgctgctgggtgctttgacccaatcggccattttcccttttcacacttggctgctcagctctttgaactcgcccacgcccgtctcagcgatcatgcacgccggcttggtcaatgggggtgggattttgttggctcgatttgcgccattgtatcttgaggtctcaagcttgctgtttgtgatctttgccttgggctttttaaccgctgttctcgggaccttgtggaagctgatgcaacatgacgttaaacgtatgttggcgtgctcgaccatggggcaaatgggtttcatgatggtgcaatgtggcttgggcttgtttccagcggccattgcgcatctgatctggcacggggtctttaaggcctatttgtttctggccagcggcggcaccgcccaagaaaaacgatttgatcttgaataccccccacgactgcgcaccgttgttctggccgtcgtctgcggtgtggtgggcagttttgtcttcgctgtggcctcgggcaaggtatggctggcgccagataccaccagcgtcttggttctggtggcgggcattgcggcggcgcaagtggcgctgacggtattgcgcaagcgtccgttcatgatgctgccggtgggtctgggtgtcaccagtgctctggctgcgatgtatggcctgagtgttcaagcggtggcgatgtggttggcaccgatgaatctgatgcaaccacagcccctgcacacccttcatattgtggcgatggcgatcttgctcctggcgtggttggccatggtgctgcggcgtgcgcctgcaactggcggtcgttcacaggtgtggcgacgccatgcctatgtccgagctttgaacgctagtcagccggaccctaagaccgtgacctcctatcgccctcattaccctagatcctaaggtgagccatgaaacctgaattgaacatagagccagacacccccaagcctgagattaatgtgatggtagacgtgacgctaaggaaagccatcgagcaagggtggcaacagattgcgcccttctggcccttggaaaacctgatcgcagtgaatcctttgcaaggatttgagcacaagcccatcgaagacgcatgggccgaggctgaccatgtgttccgcaacccccatttgcccacagagatgcaagctgtgaaccgcgagaccatcaaatggtgccaggcctttttagacgagggccaggctacggtgccgatgcctgaccggcacttgggcttttaccacgcctgggtcggtcttgcgccttttgaccgccggttgaatgtgcgtgctgccggcatgaaatcctggcttgccaatttgcccgagacgcctgaggccgccattcgtaagggtcttgagtatttgcggattcaatccaaggatcgggcacgctttctggggctcttactgaccactatgcccggttgggctggctatgtgaaatatcgaaccgattgggcagcaaagggccgtcatgcctatcccattacacaaaccgattatttggcggtacgcattgttatcacgtgcgccatgtggcccgacgcccacacactattgtctctatttccaagggagatcccggccgatacgcgtcgtgatgcccaacaggccctggacagcatggccatccgcgaggccgaataccgcagccagttgttggggcagttgagccgtcagtctgtgcccacacagccgtcaagtccgaaagcgcaattggtattttgtattgatgtacgctccgagccttttcgccgagccctcgaatctacaggtgcctatcaaaccctggggttcgctggtttctttggtgtgccggtgcgcgtgcacaaccaaagcacgggcgaggtctatgactcttgtcccgttttgctatctccacaatatgatgttcaggaccgcccccgcggttcggacgtcacacttcagaaagatcaagcgggctatcgttggcaaagtcagttcaagagactttatcaatctctaaagtataccttttctgccccctttgctttggtggaggctatgggctgggtcaatggcctgtggatggccgcaaaaacctgggtgcctgcttgggccgggcgtttacggcgacgagtttcaggcgctttgcggcctggagtgctgatagaaacatgtaccgacaatatccatgaggatgaccaggcccaggttgccgagaacgcactgcggatgatgggcttgacacgtgattttgccccattggtggtgctgtgtggccatggcagcaccacccataacaatgcctacgccacggcgttggattgtggggcttgcggtggacgccatgggggcagcaatgcccgtgtcctggcaaatcttcttaaccgttcagatgtccgcgcgcgcttaaaggcgaatgggatagcaatccccaagacgactcgctttcttgcagcagagcacaacaccacaacagatgcggtcgaggtgttctctgctgaagacgacgaggccattgcggccttaaagcgcgatttggaaacagcacgagatatgaacaccgcggtgcgccttcagcatttggatgcgggccatgccccgacggtttcggctaagcgggcgtggttgcgctcccaagattgggcccaggtgcggcctgaatgggggctggcccgcaacgcggcttttgtggtgggcccgcgggcgctcacgcgagatctcgatttgggggggcggtgctttttgcattcatatgagcccagtcaagatccggatggtcagttcctgacaacaattttgacggcccctatggtcgtggctcaatggatcaactgccaatatttgttttcaacattcgacaatgcggcctatgggggcggcagcaagatcaccaaaaacatcacgggaaaaatcggcatcgtgcaaggcaatggcagtgacctaatgacggggttgccgttgcaatccgtatatgccgctgatggtcagccttttcacgagccccagcgcttgctgacggtggtgtatgcgcctcgtgacagggttgacgccatcatcaaggcgcagcccgtgttgcaaaccttgttcgggaacggttgggtcaccctggccaatgtggacccggatacacacacatcttatgtgttgtcgcggtccttgaggtggcagccggcctcgtaatctgcaggggagctgacaagtgacctgacagcgcttagctggccggttgggcaaccaataggtcaaaggtggatttgcgaatcaactctgatgcaaaactgcctacatgccgagaaggggagtgccgtgtgtgggccccaatcgcgacaaggtcataagtgtccgttcccagtttacgatgaagagccggatagatctcgtcggtaacagtggtcaggggaatcgtctctaggttgagtgaaaagcgctgcgcccattctgtggcgtgttgttcagcttcagcctttttgtcttttgccatctcactgctcggcccatctcccgttaggccagggaaagggatatgcacggcgtgcagcatctcaacctcagcattgggaacgatgtgctggcttgttttcaaagcattcgcgcaggcaggtgaaaaggccgttggggcaagaaccgtatgataatcggcattggggagggttttcaccagcagcacagggatatcagaaaatttcaccagtcgctccatcgtggtttcccggatgaaatccagaaatttccgaggccggtgcacacccaaaaccagaaggtctgcctgaatatcatgggcatgttggctaatttccgatagggggtcacccaccttaacctggatcttggcatccccctcaagatcacgaacctgcgttttcagcgtatcttctgattgggccaccagggtattggtcaggtcttccggcagttgactatcgacaacagtgaccacgtgacagtttgcaccgatggtttgtgcaattttcatggcccggcgcagggcacggtccgagcgttcggaaagatcactggcaataaggatcgtttgaatggtgctggtcatgggagccttactagatagtggtgaaggtatagtcagaatgttctggttttaagtagcaaccccatcccctgagttcaagtgatggcctcgcaacttttgcctcatatccaaagcgccatagtcaaagttttttcttcctcaaacagtgaccactcatgccaatactgtgcaccattggggagagaggggccggcttactgcgttcgcctgtctccgcgcgttacacgcgctccggctccaacccacatattgtgtatctgaattggtaaggtgcgaacccctatcgccacaaaaaaagcccccaagcggggcgttttttgtggccagagagggattcgaaacgttaaaataatgctttgatttcaaaaatatattcccgtttcgaatttcgcatatacccccaaatgtaccaccaatttttttgtgtctgggtgggattgaccaaaaacatgcgggctgcacgtttttgtccctcagggggcgtctcggccttcggcctccgacgtccaaaacatatatgttttgtcaaaacctcgataaggcgttttcgaacgcccaataatagccgatttcagctcgcttgcaaattgccttgcgggataagggatttgatacttgtggccaaaatcagaaccgccacacgcccaatccgctattaaacaaaactgccttttcgtttaatagcgatcggtcttattaaacgatcagagaataagctctatcggatcggctcagcaccctcggagagaatggcgagataggcggaataggcaaacacgcgatcacgactgcgcccggtggcttctttcaaaatcccctttgctaccatagtttcaatggcgctgttagcggcgggaaatgatagctttgtgtgctcagcgagcattgaaacccctgaataaggatgcttttgaaaatgctcatgcactcgtaatagggttgaagcgcgacgcccctcagcctgcagaatgatccgatcacactcaaaaagatttaatatacgcttggcagattcagacgcaccggtggccacatcgctcacaccgtctaggaaaaaggccagccagctttcccaatcgccatggctacgcacgcgattgagcagctcataatactggtcgcgatgggtcttgaaatagaggctcaggtacaagatcggctcctgcatcagccccgcattgcaaaggatcagggtaatgagcaaccttcccaagcgcccattaccatcaagaaagggatggatggtttcaaactgaacatgtgctagggccgcgcgcaccaacacgggcagcttgtgacgatcatcatgtaagaaccgttcaaggtcacttagacattcatccattttatctatcggggggggcacgaaaattgcgttgccgggtctagttcccccaatccaattttgcgaacgtcgaaaatcccccggctgtttagtggcccccctgccacctcgcatcaataccgcatgaatttcacgtatcagacgtagggataaaggaaagccgctttccaagcgttccaggccataattcatggccgcgacataatttgaaacctcttcgacatcatcaatcggtgtgcccggagtttcttgactttcaaaaagcagcaaatcgctcagcgatgattgggtaccctcaatttgcgaggataacaacgcttccttgcgcacataaaaatagagaaatagggaaggatcgggcaacaaagtggacacgccatccaaccgcccgataacctgattggcgcggtcaatgcgctcataaaactgacccaggtcaatggcgggcacaggcggcaacggcggtggcaaaaacgctcgtaccgtctcacccataactgttgagggaatatattggccaagacgttgcttagagacgttcatgccccaccttataccctgaacctttaataaggtctatcgctattaaaccaaaacggcttttcgtttaatagcgccaccccttattaaacgatgcccaaatatggatgaatatgggtgtgtttatggcgcgcaaagctgatgctggcagcactgccagaactggccgcgcagatcattgatgaagcgcgccagcgcggccgcataaccataggtgaaatgacccgattaaccggcgcaagccgcaacacactcaaagagcatttcaaacgattgctggaacaaggccggcttgtccgccacggcaccggcaaagcaacctggtataccctgccgtaaaagggaaaaaactaggatgctcagtgtagggggcagggctttgaagcttcgatacggtgttgcgatcgttaaagtcctgggctcaaagctctttaagtcgctcagattaaaaataagggtgggccgcggcccacccgtatcttgtgtgaatcctcacgtgttaacggagagaacgcacagctatcgctgctaagcttcccgattatacaaaattcaaattagagagcaagtaccaattgcaatttctgtcatgttgttattcactcagaaaataatcggggagcaaaacaatgaaaacgcggcttgcattggacataggtgatacatcgataggatgggccctctatgaactttcggattgtgccaaaccatcgtctttaactaaacttctagctgcaggtgtacgcctattttcagatggtcggaatgaaaaagataagaccccacttgccgtaaagcgacgggaggcgcggggtatgcgccggggcagggatcggtatttgcaacggcgcaagtatcttctgcatctactaagcgcgcacggtcttttcccgaatgatagcgaatctcaaaaggcattagagaccatagatccgtacaccattcgtgcgcaggctgtatcagaaaaagtccccatttatcacctggggcgggcgttatttcatctcaatcaaagacgagggttcaagagcaatcgtatatctgatgcaacagatgacaaagaaacaggaaagatcgccttagcctctaagcggttaaaagaaagcctcgcagaaggtggctttgcaacattggggcaattttacgctgataggcaaagtgcgcaaaacccacgggaccgccaacctgtgcgtatccgaatgacaggtgagggttcaaaatccttatatgatttttacccaacacgagaccttatcgaagccgagttcgatgctttgtggatggcacagcaatctcactacccaaaaaccctaacgcaagaggcatacgataagatcaaatcggccttgttattccagcgcaaactgaaaaagccattgaaaggtaagtgccctttcaacacacatgaagagcgcctttaccaggcccaccccctgacacaggcttttcgcatttatcaggagctgaataatattcgcattgagtttgagctcggcgcacctgagcagcggcttgatcttgaaacgcgggatatgttggccgagcaattgttggcaggcgtggatatatccatgagcaaactaaggaaagctctaaacctgcctgcagaagcgaaaatcaaccttgctgaaggtcaaaaagataagctgaagggctgcgagacagcaaaaaaattggccaaggataccccaaaaaggaaaagcccttggggcgcgagctggtttgcgttatcagcggagaagcaagaggaaatcgtagagcaacttttatatgtagatgataaggaggatctaaaaggttggctgcgtaagcatactgaccttggagcagaatctattgacgaagtcatttctattaatctcatccctggtacatcgcgcttagggcttacagccatgagagcaattgttaatgagctaaacgcggatgttgtgccctattcaacggccgcagaacgtgcaggctaccaccattctcagttttcaacagagcagcatgatgaattgccgtactatggcgagattctcaccagcagcgttattccagaccctgctgcgtcagagggtgatcatatagaacgggtgaagggcaaaatcgccaatccaaccgtgcacattggccttaatcaaattcgtacggttgttaatgagctgatcaagcaatacggaaaaccagatcaaattgtgattgaactggcccgtgacctcaaacaatcgaaaaaagagcgtgataaggcgcagaaagaaaacaagaaaaatgaagagcaaaatgctaggttgaacaaagaactcactgagttgggcgagcgacagaatggtgagaacagattgagattacgcttgtgggaagagctgggtgacagcccgctcaatcgttgctgtccctacactggcgagaccatcagcaaggagcaactgttttcagccgaggttgaaatcgagcatatcttgcccttctcacgcacacttgatgatagccgtgcgaacaaaaccgtctccctgcgccgtgccaatcgcctgaagcggaattattcaccggctgaagccgccgagcatattccgaacatgtttaatttggatgagatgctggctcgcgcacagttcatgcctgcaaacaaaagctggcgatttaaacctgacgctatggaccggttcaaggatgaccccaagaacgattttctagctcgccagctcaatgatacgcgccacctgtcacgtgcggccaagacctatttgaccagcatctgcgatgccaatcaggtttgggtggtcacagggcgcatgacatcgcttttgcgccattgctgggggctgaatagtattctcagtgatcataaccgtaaaaaccgtgatgatcaccgccaccatgccattgatgcctgcaccattgccgccattgatcggggtatgctgcagaagatcagtcgcgccgccgcacacaatgaaagaaccacactggataaggtgacatccggtatggatgtcccttacgatggcttccgcgagaatgtgcaagacatcgttacaaaaatcatagtcagtcacaagccagatcatggactggccggtcccttacacgaagaaacggcatatggtccggtgcgggataatgatcgcaatcgagcaagaggtgatctcgatattggcaatgttgtggtgcgaaaaccagttgcgggcctatcccccaaggaaatcaaccagattcgagacattcccacacgcgaagccctgcagcaaattgcttatgaggcaggcagtgacaagaaagaattggccaaactattggctgaatggtcagcaaaaacgggtgtgcggcgtgtgcgcatgttaaaaccagtgggagatgcggtccccattcatgacaggaaaacaggtgagccctataagtatgtcaagccaggtgacaaccatcatatggatatcatcgagcttgaaaatggtaaatggattggctgcgccgctagtgtgttcgaggtcaaccagaaaggctggcagcccaaatggctgaccgaacaccccaccgctaagcacatcatgcggctccacaagggggatgccgttcagcttgatgatgatggtgtgaatatcatcaaggtggtgaagcggctgtcgccaagtaacaacattctctatctcgttcaccataacgaggggggcgctcaccagaagcgccatgatgatgtggatgatcccttcagatgggatctagccagtatcagcaaactcaaagaccgaagggctcgccgtgtaatcgttagtcccacggggaagattgcggcggccccgaaactcaggtcttatggtgtaaagccctagcgccttttggcatgttgcttgctgagaatattccttttgaatgaggaatatcatgcctggacgtatcgttgaaatcacccaagatggccgcagcgtccatttggatcgtggctttctggttgtccgcgaggcggtcaaaggcggtccatcaaatgaggttggccgtattcccataaccgatattgatgcggtcatagccagcacgcacggcattatgtggtcaaatgctgcactggctgcattggcaaaccaaaacactccggttgtcattctggcacacaattatgcgccagcagctgcgatactgccgatcagtgggcaccatgcccaaggccatcggttcgaggcccaggccaatgccacccgccccatgggcaaacgtttatgggctgaattggtaaaagcaaaaattatggcccaagcagctgtcgcagcaacacttggccttgatgcagaacggctcaatcgcttggcaaagtctgtgcgctctggcgatccagataatgccgaagcccaggccgcgcaatattactggcccttggttatgggtcatgggtttaagcgcgagcgtgatctgcccggcgtcaatggcatgttgaattatgggtatgcgatcttacgcgcagccagcgcgcgggccattgtggcggccgggttgcatccttctctcggcatacatcacaaaagtggcggggatgctctgcgcctggctgatgatataatggagcccttccgccccgccattgacttgttggtgattgatctgattcggcaaggctttgacgagatcacgcccgaatgtaaacgtgctctttgctccgttatccagtctgacttcaaaaccaattcaggcatggctccattatcatgggttctggtgcggctcagccagtccttagtccagaattacacgggcgaaagcgtgggacttgatttgccactatctcctttaccgcaaccgcatgccgccaacgatcaaagtgggaatgaaactggggacgtcgcatgagccgctatagcaaactttcaggatacagactgatgtgggtatgggcactttttgatcttccggttgtgacaaaatccgagcgtaaacgagcaacaaaattcagaaaattccttttggatcttgggtttgagatggtacagttctctgtgtacacgcgctttgcggccagtcgcgaattggcagaatcatacgcgaagcaaattggtgatgttgtgccgccgtatgggaaattggatgttctgttttttaccgataagcaatttgcgcaaacacaacgctttcgaggccaaaagcgaatcgagacgcctggaaaaccggaacagctcagcttattttaaggcaatgttggttattttttcattagatcacgaaggaaaaacccctaataatcagatgattattaggggtcgagcttagcagggatagctgtgcggtccaaccgcaacaaaagcgtatagcttttttcccgctattgcagcttagcagggatagctgtgcggtccaaccgcaactgcctccaagtgtgcggaccgcacatccaaagcttagcagggatagctgtgcggtccaaccgcaacttgttgcgcctgcatagcctgcggatcttgagcttagcagggatagctgtgcggtccaaccgcaacaaccttgtcgccgtattttctggcgttacgagcttagcagggatagctgtgcggtccaaccgcaacatcactcaccgccttccgtgttgctttcacagcttagcagggatagctgtgcggtccaaccgcaactgacggatgtttttaggtatttcaggtcgcagcttagcagggatagctgtgcggtccaaccgcaacatataaattagccaaggacgttcccctttgagcttagcagggatagctgtgcggtccaaccgcaacaccaccacgtcgatggccacgcgccgcagcagcttagcagggatagctgtgcggtccaaccgcaacaatttacttcagtggggccaaggacacaggagcttagcagggatagctgtgcggtccaaccgcaaccgtgatggcattgaccactttcacattgctagcttagcagggatagctgtgcggtccaaccgcaacaatcgctttcctgacgctataaagtccaaaagcttagcagggatagctgtgcggtccaaccgcaacaaactgatgattgccgatgttgcgcaccggagcttagcagggatagctgtgcggtccaaccgcaacatatctggcaatccattgtcggagacagtgagcttagcagggatagctgtgcggtccaaccgcaacgcgcatcccagtcgcacatctttagacccgagcttagcagggatagctgtgcggtccaaccgcaacctcatcagttctattatagcccttgcaaagagcttagcagggatagctgtgcggtccaaccgcaacgaagggggtcaaatcatgacggggccatgtagcttagcagggatagctgtgcggtccaaccgcaactgcgatggccgcacggcggcattttgcttcagcttagcagggatagctgtgcggtccaaccgcaacgccatcgatgtcccccaaaagcgcgattgcagcttagcagggatagctgtgcggtccaaccgcaacacggctaggctgtctgtgtcacaatataagagcttagcagggatagctgtgcggtccaaccgcaacaccagtcgcaataaagtaatttgtccacgcagcttagcagggatagctgtgcggtccaaccgcaacatgtggcctaatgtccagttatgacggtgtagcttagcagggatagctgtgcggtccaaccgcaacgtggcggctggccttggcgggccacctggcagcttagcagggatagctgtgcggtccaaccgcaacgtgggctttttaattttacgggtctttttcagcttagcagggatagctgtgcggtccaaccgcaactgccttgagtagaacccaacggagtgttgaagcttagcagggatagctgtgcggtccaaccgcaaccaatcagctgggcgcggtgcgggcgttggtagcttagcagggatagctgtgcggtccaaccgcaaccgactgcgcgaatgaccgccaagaactcttagcttagcagggatagctgtgcggtccaaccgcaactgacgcatcttataggcgtcagtgccaacaagcttagcagggatagctgtgcggtccaaccgcaacaagtgaaacatggcgttgtggcggctgttgagcttagcagggatagctgtgcggtccaaccgcaactcacgtttaccaccacgtcaccggcccccggagcttagcagggatagctgtgcggtccaaccgcaacaaaacgtcctgggttttccaatagacggggagcttagcagggatagctgtgcggtccaaccgcaacaagagatggttgcattcgccaagtcttggaagcttagcagggatagctgtgcggtccaaccgcaacaccagtcgcggccacttcaacggtgcttccagcttagcagggatagctgtgcggtccaaccgcaacaaatcccagtgactgctgttcaatccccgtgagcttagcagggatagctgtgcggtccaaccgcaaccgacggcggttgctggtgcggcggcgtctagagcttagcagggatagctgtgcggtccaaccgcaaccacccgaaagcgtacccgattataccggattatcgccctgccgcttgcggtcgtacagctccagcactcgtaaagcggtctgcacctcgcgatcatcatcattcgccggttctggggctttgcccacaccccgcaccagttcggcttggcgttcgggtgggatgtgcccataacttgtgaacgtggtcatcacctgttcatggcccaggttttggctccaggctttgaacgcttccggggtcttacacacctgataggcataatgcgccagggtatcgcggaagcggtgcgggctgaaatagggcaatcccacagcctcaaaggcctgtttgaacacggtacggatcggcgcggcattggcccagccctcgcgcgctaggccatcgggcttgaaacatttatccgcatcctggcgaacctgggttttaggaaacagcggatcatttgccccaaagccatgttgatcggtcagctcggtgatccaatcgatcacgatctgctcgaaatcctcgcccacgagaaaaaaggccgtgttgatcgctttcgagaatttggttttgatctctcgcgggtcctgaaacaccgcgcgcttgcccatatctatatgcttcagccgcacaccacatatggccgcatcgcgcatgccggtgacaatcgtaaaggccaccaaggcccgatcacgccgctccagaaccgtggccgtgggcatggcattgatcgccagccgaatttcatccaaagtcggatagcatttgggcttggttgtgcgggccgcgcgttcgtctttgtcggttagccgcaaatattcaacggcattgggtttgatccgcccgcgatagctgggttgcatcaccagccatatgaaaaaatcacgcaaggcggccaaaacctgggacaccgcagaaaggctgagcggcttgcccgtgcgttccgctttctgttccaaaaggtgatgtttgaagccgatcgcctgatctttgttgaaggtggcgaaatccttgaaccgggtataggcttcaaaccgcagcagggccgcacatacgccatcaacagtggcctgcgaccgcccccgggcttcggttagaaggatgaaataatcgtgcttgatgcgctcgtttttggggttgtaatcagtcatgatcttgacctcctctgttgtcactgttcaggcggggttcggcacagtcctttatgttgctcttggccagtgtgtgcgtgacaaagcgggcgcgaatctcgaccagatttttccggctggcgatgcggtgcattgggatttcgcagaccgcacacaaggcccccaagttcacagccttagccgtgtgtggcccaatatcgaccatctgccccatgggctggcgcggtgcgcgacagcgcaggcagtaaaactcatcgggtttacacgtggcgcggcgggcggattgcttggccttcaaataggcaatcaagtcagagccccggatcagatacggcttctggtcgtcaatgcgcttgaggccatctttcatccattggctgatggtgttcttatgcgtgccgaacaatctggcgcactctggtatgctgtaagcccgcccagattttatgcggcgcgtgttgtatcgcctgcgttttctgggggcattatgggatgcgcccataatcaggcactcaaattgtcaatcaagtcgcggatgtcttcaacacgccaggccgtgacacgggcggccagcttcaccggtttcgggtatcggccatctttgatgcccgcccaccaggtggatttgctgacggggatcaggcgcaaaacatcaggcaggcgcagatagccggtttggggaagggggggataatccatcgtgatacgtcctcgtgtattgaagtctgaggacattcaaaactatgcttcggagcttgtggccgaattggcgcgctattcggtttagcgaaaccggattcggtttcaatcacggtcggataaggcatcttcgggtaaaaactcggtggcttctctcagccattttcggattgtgtcgtcatcaagggcgatgcctagtccttctaagtcacttttaatctcagaaaccgtgttgcttcgtgaagcgttcgggtcatacgcatatccttttaccgccatgccaatgatcaactttagcgctgtcttgcgctctagcgttttgaaggcatcaggcggtgtatctggctttgcttttgtttttacaccgtgaaaaaaatcagagtggacccccttggtgttcagccactcgataaaagcttcctttttgacgcttgttctattaatatcaataacataattgacttctcgggtgtgctgtacccgccgcgcttcgccctttacgtctaactcacggtttaatatggtctcttcaatggccttgataagcggtatagccccattgggaaggtaagtttcctgttcgggatacctcatgcccctgaaatacattggattttcacccagggtcaaacaaatcgcttctaagagtgtatactcattattgagcttccatagtgttacatcttcgctcatagcccattcccagctatcaccccatccaaataatctgcccaatcctgcatcatctttcgccggtcgtctaggaattgtgcgcggtcataggctgcgtccaccgcattgcgtggcgcatgggccagttggcgatccactacctcgtggcgatagcccagcttttctttgatggtgctcatggccaatgcccgcaccccatggccggtcatgcggccgcgatagcccattttttcaatgaccttcaaaatggtgttgttgctcatatggcccttgggtttgatctggctggggaagacatagagccgtccaccgctcaattctttcagctcgcgcaaaatggccagcgcttggtctgataacggcaccaagtgcggacggcgcatcttcatgcgctcggtggggatcagccaggtgcggtcctcgaggtcaaattcatcccatgtggcctgtatcaattccgaggtgcgcacaaaggtcagcaacagcaacttcatcgccagccgcgtatgggggaaaagtcgcaactcgttgcgctccagaatacgcataaaggtgggcagctcggcgctatcgatggccgcaaagtgtccctttcggaaaggcttcaaggctccgcgcagattgctggccgggttgttttcggccagccccgtgatgcaggcatggcgaaacacctggtcgcacacttgccgcgcccgccgggccatttcatgggcaccccggtcttcaatgctgcgcagggcttccatcacttcgggggtcttgatctcgccaatgggccggtggccaatgacggggaagatgtcttgttccaatcgatataagatggtgcgggcatggccgtctgaccagcgcgccttgtgccgatcgtgccaatcgcgcgcaacacgctcaaaggtgcattcggcggccgctatgcgtttgcgcttttcggctttgcgggcttcaccaggatctatgttatctgccagcagattgcgcgcagcttcacgcttttcgcgggcttgggccaggctgacttctggatagacgcccagggctaaagttttctgttttcccaaaaagcgatagctcatgcgccaataccgtgccccattgggcatgacctgtaaatacaggccgtgagcatccgcaagcttgtaggccttatccgcccccttcgctgttttacatttcaagtctgtcagcgccatgtgttggtatctccgcacgggcctccaaaatgtaccaacacagataccaacaaattggtggtatctgttggtatctcgtcggacgccctcggacaaagcctaagtgcttagttattatttttcaagtgtttttggatgactttggccgtctttggacgggtaagtggcgggccgaagccgacgaaacagagaactacacctacgctatacccctccaaaatgaaacctgaaaatcacatttaactacttgaagcaatgaggatttttatcctgcgattcgtacaaaaacctctgtagatgatcatgcagcgtcaatgtcagatttgagagtcccgaacagtgcctgaagttcgacgagggcttcgggatcgtccatcagcatttttcgcacggagttttcgtactgggttctcccttgaaaaccgagcttgattgcgatctcgcgaagggccggcgtctcacgcacaggatatttcgcgattatcatgctgagatcgccatcgtcgcatgcttgtgttaggcgcgcgacctcttccgcaacaactgttggtacatcaatcgtaatctcaatcggctgcgcttccgcgatatctgagcgcttcggcagtttgctcatcaactgctgccgaacagacgcttctatcacccgctcagagagacgttgaatgtgtgatcgaacagcgttgatcgccgcaaccttagcctgctcaagcaattggttcgtatctgcccctgtcatctcgttttgacgagccgcaaggcgttcaagaaccaaggtgttataataaatggactcaacagcgaagacagataccgcgtaaacaccttttgcttttagttcggcaattgtctcttccggtcgacggtcgttatctacaattccaaacgctctcagccagtgcagttcatgcgcgtccctgatgctggatactgcatgctcaacatcgcggcaggtggacttggggatcaccgacacctgaggaaatagaagactatagagaggcaggtctaagctggcttcggtgccttcgatgaagagcagctttcggcggttgccgagaacgtcctgcttcaactgatcatcaatctcaccgtccgcgtccagcaggtcggcatcccaattcacgacattcgactctcggtacgtgcagccacggatcaggagtgttctagcttcgcgattatctagaggaagcatcacatcgtgcgtggagatgacaaacgcgcaatctacccgttttgagaaaagtagtgttagcagcggtgatatgattgaccgatgcaggtgccgctctggttcatcaatgaataggattgatccaggcttgcacgttaggacgtttgctgcgatcagaagcgcgtttcgctccccatccgagagttcggatatactatatttcgttcccccgtttcgtgatgccatgacctgttcggattcttgaacggatatctccacagggatgttcgagaggcggagaagttcatttatgatcttgatgggggcgtctttcttcgacagcgccaacgcaagatccatatccttgtcgtctacagctcccgctattgaacgcgcccttacattttcagcgtcaattaggtcatatattgcgacgctcgctctctgtgcagaatagtcatccttccagcgcgaatgtgggttcgcatcatcatttaaaatatacgtctctgtattcttcttttcatgcgctgaaagggttagagcatttgattgaaaccaagtctggcgatgcgctgaaattcgtcggccatttttccgatgttgagagtagaattgttggagtaaactggatttacctgtgccattcgctccaagcacatataatgcctgcccaacgtcgacactgaagttaattgcttccccaagcggcaaaggcacagaaaaatcgaacgccatcttgcaacacccccagcttcaaatcgctaccatctaggatagctctcgacaaacttatccatcgattttcatctagtgtccgaggatggtctgcatcttgctttgcaacgtagcagctagagcaccgcgcccttcggcattgttaaggtaacggacatggcgaaggtgccgcagatcgaacggaatgtcgtgctcgctctgcgtgatgagaatcacctcacgcccaagcgtgtgcgcaatgcccgcctcatagaacacgtttgggtttctgccggtgcagtcgcatacgacgacgcgcgaacggtcgatgagggagaccacgtcctgaatgattgccgggttctcccaaatgtcgtccgcccgcctgcaacgaaggccagcattgccagcgccaagttggatggcagcataaacatcattgaagcccgcatcgaacggcatcatcactgatgctaaggcaggctcgatgttttcatgttcggggatttgaaacacggccgggcgctggcggcgggggcgcacgttgcggagtaagaatctatagaggtcaacgtccttcaccgcccagtgatttcgtgaaaactcgaattcgtggggcatgtgcaactctgcacggttcgcgtgaatcatgctgttctgaagcggtggcacctccgcgtc

SEQ ID NO: 2830 - DNA, 14316 bp, synthetic construct
  misc_feature 1..14316: note = Synthetic
  source 1..14316: mol_type = other DNA
gcgcgactcgtggcgctggccggcatcgggatgttcgtgcaccgtgtactcgatgagtaccgtctgcgccaacaggtgttcgatcacttcgatcaggtcatcgagtcgaaggcgttcgaagacgctgtggacgagcgagatggccaaggtgttcatgccaacgccgggttcgtcgtgccatcgtcgatccgtgatgcagttgcgaaccgaaatcgctcggagcccgaagccgcgacctcgaatcgcgaaggcagcgcgtggtggcgagttgatcgccacctcggccgagtggtcgggctcttccccaggtatccggtcagcatgatcacaacaacggtccttggcacaggattgctgattggggttgggggcttcggactggcgctgctggccgtccttgccaacgccggcagcggcggccaagtgccctaaccgtgggggagcagcgatgatgaaaatagacacgcctccatcgaccgagagctccgaacagcgcaagcgccccccgcgcaagcatccggtcgtcctcatttctgtgttgatggctgcgttctccatgctctgggcgatgctgaccacagtgctattcgtctcgatgatgatgtccaatggctatcaccaccggcaatttgatgagcggctccaggctctggaaggcaagccaggcgcggcgatccacacacaccttccggatgggctgagtccatctgtggccgcgagaacgagatgtgaaatagctcgtcgacagtgatcagtagccatcagtagctgttcatgtcgagtcgagtctgatgttcccattgcacggtgtgcattctcgatgtgtaacgggccgtcgcgacatggaacaagtccgataatatttgcagccagacatgcgggtattcgttaccacgacacgttttgatgcctatggactacgtatcaaatcacccgccctggccactcaggtccgcagcgaagcgcaaaaagaaacgcccacaggtgggcgctcgagggatgcgtaattgcattgccctgcgcgggctttcgcccacttaccgtgatgagtgggagacgccgctcgattacactgtcgaaatgatcttcgatcgccgccagcttgtcaagtgagacttccagcaatgatcgcaactactgatggtcagtcacgattcgccatgggtctggatatcggcgtcgcctcgatcggttgggccgtcgtaaacctcgattcagatggtcagcccacatctgttcgcaaggcgggtgtccatctcttcgaggccggaattgatccgggcaagtcagatccggaaacagcgatgctcctgggtcgggagcagagcaaggcgacgccccgccgcaccgcccgggcaacgaggcgtcagatatggcgtcgagctcggcggaagagaaaggtgctccgctcactgatggacgccgggctgctagctcccgctcaggtacagactccggaacaagttgatcgatacatgaaggccctagaccgcgaactcgccgaacgatgggcgggtgacggccaccgagacgcacagaacctgccctaccgcctgagggccgccgcagcggtgaggccccttcagcgtgacgaggtcggtcgggctctctatcaccttgctcaacggagagggtttctcagcaaccggaggtctcccgagcgttcagatgaagacaagtctgcgatgaagctgagcatcggcgagctcgccagcgccgtcgcttcgcatcgtccgcccacccttggggcctatctcgcctcgctcgacccggacgaacaacgcctccgctgccgatggacctctcgtcaaatgtacgtcgaggaactcgattgcatctggaaggcccaagccaagccgctcggtctctccgatgatcacagggctgcgattgagaatgcgatcttctttcagcgaccactcaaggatcaaagccatcttgtcggtcaatgctccctcatagcgggccagaagcgatgccccattgcggagcgagtcgcgcagcggttccgggtgttccagcaggtcaatcacctgcgcgtcgtgctggacgatctcaccgaacgtccgttgaatagcccggagcgggacgccctcgtggtcaaactgttaactgagggagacgtgtcaatcgccaaggcccggcgcgaggcggggctgccgccgggcagcacgctgagtatcgagcgtggcggggaaaagaagctcgtcggccaccggaccgacgccaagctccgagctgtgttcggggccggccgttgggaccccttgagcgatacggacaagaacgccatcgtcaacgcgctccgctcgtttcgcgatcgagacgcgttgcgacggtacggcgtgcgtcggtgggggctcgacggcgaggccgccgacgcgttcgcggatacgacgcttgaggagggtcacgcagcccactgccgcgacgcgctcgagaagctagttgcccgcatggaccgcgacgggctgagctacagcgaggcccgcaaggatgagtttcccgattcgtttgcccaagccgagccgaaggacgttctcccaccactcgatgaatgggaaagtgatctccgtaacccgtcggtcgcccgggcactgaccgagcttcgcaaggtcgtgaatacgatcgtgcgacgctggggcaaacccgagcgcgtgcatcttgaactcgcccgcgacctgaagtcggggcggagcaggcgcgagcagcagtcccgccgtatgcgtgagcgcgagagggaacgggaacgggccgccgcggcgatcgcctcgaagctcggtattgacgccccgaaacgctggatgatcgagaagtggctgctcgcggaggagtgcggctgggtctgcccctataccggccgccatttcggcgcagccgatttgctcggccgcgaatctcagttcgatgtcgagcacatctggccgttgtcgcagagcctcgacaactcctacatgaacaagacgatctgttatcacgacgagaaccgcaaccggaagaaaggtcgctctccagtctccgcgtacaccgccgatgagctcgctccgatgctcgaacgcgttcgggccttcaagtgcgaccccttgacgaaacggaagaagcttcaacgtttcgccgagccagtcgaggaggactttccgaaacgtcacctgcaggagacacgctacatcgggcggatggcctgcgactacgtcggcctgctgtacggggggcgggccgaggatgtcggcgaggctgtcggccgccagcggatcttcactccctccggcgggctgaccgcatggctacggcggggctggaaccttgacgccctgctgggcgccgacgatggcaagaaccgcgaagatcaccgccatcacacaatcgatgcaatcgtcatcgcctgcgccgaccaagccgcgatcacgcgtctcagcgacgccgccaaacgcatggagcgcgtgcagaaggagcgcccgttcgattcggttgatcatccgtgggacgggtttctggcgaacatcgccgcggcgatcgagccgatcatcgtctcccggcgcgtctcgaagaaggttcgcggtggtctgcacaaggacacgatttactccaagccgcaccggtccggcggcgcccacctacaccatcgaaagagaacggagttggcggcgcttaccacggcggaccttgccaaaggccgcatcatcgacaaacgagccgaggcagcgatcagagccaaactcgatgaactcggtgaacccaacccggccaaggcgttcaaggaccccgccaacctgcccaccgttcgcggccagggggggaagcccgtgacgctgcgtcgggtacgcgtggccgagtccgtcaggccgacgacgatcggccgcgggccgagcgtgcgccgagtcaagagcgagagcaactaccacacggtggtctaccagctgagcgatgagggcggagaaggccagtgggcccacgcagtggtgccacttctcgatgccgtggccatcgcaaggcctggcgcggcgggtcgcgatgacaacgccgccgtggtgatctggccaacgctgccgcagggcgcccgcgttctgttcacgctgaccaatggcgagtgtttggagatggaagacccaaagcagccgggtgtgcgagacgtcttccgcgtgctctcgatcagcgacggggaaatcaaggtcatacgcacacatgacggaagagcgtcagccatttcgggcaaggatcgaattcgcatcaagggacgaggcgacaaccttcgcaaactcggtgctcgcaaggttcgcgtcacgctgctcggcgaggtggtgaatgccggggggtgaacgtatcattgatgtctcgatgcgtcccgcgtacctgagcttggacactgagcgactacgtattcgcatcgaggacgagccggactctttcgtcccactcgccgagaccgcggtcgtggtgctgggccacgctcgcgtcacctgctccggagccgcccttgccggcgtgatgcgacacggcggatcagtcgtcgtctgtgacgacgggcattctccagtcggcatgatgctgccgcttggggccaacgcgctgcaaactcaaaggatccggttccaactcgacgcagggttaccgctccgaaagcgtctctggaagggcatcgtgcaggacaagatccgagcacaggctcacacgcttgaattgcacatcggagaagacgccggcctgcgtgctatcgcggcgcgagtccagtccggcgaccggcagaacgccgagagtaccgcggcccaacgctactggccccgtctattcggcgacccgatgttccgtcgccgacgggaagcatcggatcagaaccgactgctgaattacgggtatgccgtggtgcgggccgctgtcggtcgggcgatttgtgccgccggcctgcacgcctcggtcgcactacatcatcgccaccgggagaacgcatgggcgctggccgatgatctgatcgagccgtatcgcacgctggtagatgatgaagtggctgagatcgttggatcgttcgggggcgatgtcgcactcgattcgcgaatcaagcgccgactcatcggcgtgcttcacgagcgaatttggggtggttcgagcgagaaccgtaccgcccttgactggatcggtcggaccgcgacctcgctcgtcgccgcattcgcgggcgaggccgaccgcgtgttctacccggagggtctgcaccgtgcacctccgcggcattgatctctcggagtaccgaactttgtggctgatggcaatgttcgatcttccggtgaccacgcgcgatgcacggcgccagtacgccaagtttcgcaaggaactgatcgctcgcggcttcacaatgctccagtacagcatctacgcccggtgttgtcgaagcgccgactctgcggagcagacgcgacgcgaggtgcgatcggtgctgccaccaagcggccaggtgcggctggtaagcatcacggaccgacagtttgcgaagatggaggtgttctttggcgaaaagcggcagccgacagaagatctccccgcacaaatcatgctcttttgacgggcgcgaatggttggaagcccctgtcgcaacgtcggttacgaaaggggtagtgtaatcgagcgacgtctccggtcagaccacggcgacgggggccgtagcccccgccgcgcttgagtgtaatcgagcgacgtctccggtcagaccacggccccttggtgttgcgcagccccgagaactcgagtgtaatcgagcgacgtctccggtcagaccacggcttcgtccgggcgctccacgatcggttcgtagtgtaatcgagcgacgtctccggtcagaccacggcaacggtgactcggcgacgttcgagctgggcagtgtaatcgagcgacgtctccggtcagaccacggcaggtatgagcagtgcaacacacaagccggaagtgtaatcgagcgacgtctccggtcagaccacggccctggcgggcgggcctcccggagacgttcaagtgtaatcgagcgacgtctccggtcagaccacggccggattcgccggtcatggtcgaaactccttagtgtaatcgagcgacgtctccggtcagaccacggcgatgatcgccatcggtgcccccggtgccggagtgtaatcgagcgacgtctccggtcagaccacggcgaactttacgcggacctgggacgcgacccaagtgtaatcgagcgacgtctccggtcagaccacggcgacgtgggctcggaggatgaccgggccggcagtgtaatcgagcgacgtctccggtcagaccacggcgaattctggatcgaccagataaccgatctagtgtaatcgagcgacgtctccggtcagaccacggcgcgttctcacgttcgagggcggcgcgaacgagtgtaatcgagcgacgtctccggtcagaccacggcccagtcggggttggtgccggcctgcgcgagagtgtaatcgagcgacgtctccggtcagaccacggcccacgacgtcggctcctagtagatctggtaagtgtaatcgagcgacgtctccggtcagaccacggcatcaccttctccggcgtcgtcaccgtcacaagtgtaatcgagcgacgtctccggtcagaccacggcagaacgaatccccggggaacatgtggccgtagtgtaatcgagcgacgtctccggtcagaccacggcctccatccaccacgtgttcagataccccaagtgtaatcgagcgacgtctccggtcagaccacggcgaaccttgtgcgtcttccgggcgcggcggaagtgtaatcgagcgacgtctccggtcagaccacggctcgcgcaccgcgaacgtcacgaccgacagcagtgtaatcgagcgacgtctccggtcagaccacggccggtgcgtccttcgccgctgacgacgtagagtgtaatcgagcgacgtctccggtcagaccacggccgacgttcgccgactgcgccgcgtgcgccgagtgtaatcgagcgacgtctccggtcagaccacggcgatgacggcgatgacggcgacgacgatgacagtgtaatcgagcgacgtctccggtcagaccacggctcagggggaactggtacgagtccgttccggagtgtaatcgagcgacgtctccggtcagaccacggcggggagggcagggcgacgtaagccggcttcagtgtaatcgagcgacgtctccggtcagaccacggcgcggcgtaggcggcctcgagcgtggggaacagtgtaatcgagcgacgtctccggtcagaccacggcatccgaatcgcctatttcggatcggggaagagtgtaatcgagcgacgtctccggtcagaccacggcgtctcaggcgatcacgcgggccgcgcagtcgagtgtaatcgagcgacgtctccggtcagaccacggcacccgaagccccgagcgcaacgtgcccgttagtgtaatcgagcgacgtttccggtcagaccacggcgccgccgttccggtacgcgacatcaccgtggatcccgatggggcgtggtatgcggcgagcggggtcgatggcggagttcgcatctggagctcggatctggattacttggcggcgaaagtgccggccatcgccggccgagagttgagcgattctgagctgcgaccctgaccagcgcgtcagaattaccactgcgcgacctggtcacatcgcataaaggtgggcgcgtcggaccacaggagcgaggcttggacctactccgaacgctgatcgccggatgagagacggtcacattggcgaacttagcgaagccgactcttcggagacgatcgccagtggtcatgcagcttacctcaaatcgaccaaactatcgtgatcctgcgcggcgtgccgtgggcgtcatcctccacaagccatcgaacacggtgaacccctgcaccggatttcaggctcggctgtcgacgggcgagattttatcgttctcctcggccgcccgaccggccgcgatcagctggtcgatcgcctgcccgatccgctcggacattcgggcggttgtgcgtctggccccgagttcccgcgccacctcacgcacgagatcctcccgcggcagcccgtactgctcacgaagcacagtggccgcgagattggcgacctccacgatgggcacatgctcgatatccctccgggccgcctcggagtcgcctggtgttcggaacgatcggaactccgccggatcctgatctgatttccacagcacctcaccttgcgtccggatcgatccggcacgcgtggccgcgatccggacctctttgaaccgttcgcggaaccgctcggtcacacgttgcaccccgcaagcgccggccagcctcctcatcgcgagctcttcggtgacgggcgtttcaacctcaacgatctgagtgagtgctttgaccagggctgctttggaagctgagtcgtagacatccagcgccttaagcctgccgtctagatcctcggccgcgacatagatctcggagcgtaccggtcttgacggaggtttcgcggccgccgaaggcgcacccgcgtacaagacaggttccgtttccactgcatcgtcggcgtattcggtcgcactcgcttcgtcatcgctcggcgggggttcttcggattccaccgcggcgatgaccggacgttcctccggtagcacgagatcctcgggtgcctgtaacgagtgttcgatcgcacagaccagtttttcaaggcagcctccggggttgactcgccagtcggtcgaccagacccgctcgatccgccacccaaggccttctagcacggactggcggagccggtcccggtcgcgcgcggttttggcactgtggtaggtggccccgtcgcactcgataccgagcaggtatttccccggtttctcgggatggcgaacggcgagatcgatcctgtagccggcgcacccgacctgcgtgtcgacctcccagcctcggtcggccaatgccttccagaccgcctgttcgaagccggagtcgaactcggagctgccgctgagcgagacagcctcggcgatcgcgcggggcccccgatcggcgtagtcgagaaatgtcttgaagtgtttcacgccgaccgcccgcgtccgcctgagatcgatctggtcgctagtgagcgacgagaacacgatcagccgtcgacgggcccgggtcaccgcgacgttcagtcgtcgctcgccgccgtccttgttcagcggaccgaaattcatcgagggcttgccggtctgatcagggccgtagccgacagagaaaatgatggcgtcccgctcgtcgccctgaacgttttccaggttcttgacaaagaccggctcgccaacttcgttcgtgaagtgggattcgatctccgtgtgctcccgccgccgctcgtcgagcagatcctcgatcagccgctgctgggcctggttgaaggtcacgatgccgatcgaatcggtagtggatggatcgcggagcatccgcaccacttcctcgacgacgcgcgtcgcctcgacgcgattcgtgcgcgactcgccccggtcgtacaccccgtccgcgatatgccggaacgtcacgccgagctcggcggaacgctcgtcgggcgaggggaaggtgtgcagctcgttctggtagtagtggtggttcgagaaagcgatcagggtctcgtgccggctacggtagtgccacgtgaggcgcaggctgggaatgcccgaggcgttgcattccttgaggatcgactccatgtcgtcgacggcgccgtcctccggctcggcatcgtcgtcaccgtccagcgagctgaagaatgcggtgggcgggagctgcttggagtcgccgacgacgacgacctcggtaccccgggcgatggcaccgatcgcgtcccagaccgggatctgtgacgcctcgtcgaacaccacgagatcgaacggcttcagcgcggtgtcgaggtactgggcaaccgagagcgggctcatcaggaagcacggcttcagcctgggcagcaggttgggcatcgactcgatcagccggcgggtcggcaggtggcgacgctgcttctcgagttcgcggcggaggatcccgagttcggactgcggggccgccgaagacggcgtcgaaggtgtcaaggctgcgagtttcgctgccacaacatcgcgggcgagctcgatggactcggtgtcgagacggcggaaccgggcgatcgcatcaccttgggcgtcggcattaaaggtccgaacggcttcgacaccgtcggctaccgcggtgaaccacgcctgcccgaagctccgccagaacgcatcgttgacctcgtcgagagcgcagccgccccgctcgtagagatcaacgagttccgcgagaccggccgccgccgccgcgtcgcgtgcctgcctccatgtgcaccatgtgttgagatcgccgaggtgggtggcccaccgctcgaacacaccagcgagcgccgccagccatccgcctgcgctgtcaccgagcgctcccctcgaatcggtcctgagcgttgatttcagttcggcccacgccttggcccacgcgttccacgcgttgatgatgtctcgcgtctgcggccggacgcggtctgcttcgcccgccccggaggccatccccgccagtgcgtccgcgagcccgcccgcggcggcgtcccgcccgatcacgcctagcaacttcgagaatcgctctgtccaggcaaccatcgcctcgatctggtcccagtccgcgtcaccgtcgttccagtggccgccgaccgcccgcgccgcgtcaccgccgagcttggcttgaagtcccttgagagcccggacggactcgagatcccgggccacctcgtcgagcgggggcaggtctcccgtcgcgtagatgcgcagcgcctttttcacgccggctgcggtgaagagacgcagcagtgccggctgtttgaggtggcgctggatcgcgtctagacggacaagggggtcgacatctaggaactcctcgcggtaccgcgacagcagcccgaatcggagcccgtcgcgttcgcgccctagcgagacgacgccgagcagttgctcgcgcagccctttcgcgtcacgcccgtcgatcagccggcggtccgcgacggggcatttctgtagctcggcagccgcctggacaagcgcgtgcagggtctgttgtccgagcgacgccggatcggtgtctacgcccgtctcgacgagaaaagcacgcgaggcctcggagagcccctgcagcctgccggtggcggccttgatggcgtcgcgtgcctcggtcgggagcgagaagctccactcggcgcgaccgatccctcgcagcgggtactccgcgggcggatcgatgggacgtgcccgctgatggagctcagcgaccgcacgcttccaggtgtcgagctgttcggcggacgtctcggcgggcgactcggtcgggggagggaccgaaggcccgtcaccgatgacgctcagccgacccagcacgcggtagaggctctcgccggtcttccgcggcgtgtgcatctcacagacgtactcgttcagccggtctcgggtagcctgcaggtcccggcacagcgcgtcccactgccggggcgagcgggctccctcggcgtcgagcgattcttcgagctgggcgagcacctgctttttggacgccttggccgagtgcagttcgagacagaaggggccgagcccgtcgtcctctagccgcttgcggaccaccgagagagccgccatcttctcggcaacgaagaggacgcgccgtccgcgagcgagcgtgtccgcgatgatgttcgcgatcgtctggctcttgccagttcccggcgggccctcaagaacgaatgtccgaccatcagccgctgcgcggatggccgcgagctgcgaggagtccgcgtcacgcgtgcaaagcagatcgtcgggcgcgctcttctggtcgagttcctcgggccgcgggaacggagatgggtcaaatggctcctccgagccgctaaccagccgatcgaccagccggctctctttgagccgatcgagattgtcctgtaggtccttccacatcaggaacttgttgaacgagaacagccctaggcaagcggtctcctcgacctcccaccgcggcatgtcccggatcgcggaccggaagctccggaggatcagcggcacatcgatcccgctctcgtcctcggggaggtcgtcgagcccatcggtctcgatcccgaacccaacgcggagattctcgagcagtgtgacgttcggccggagcggctcgtcgctcaggctcagcgtgtaggtgtatccaccccccgaggcgttgcggatgagtgtgatcgggagcagaatcagcggtgcgaggcgctcggtctcggaggtctcgctctcgtaccacttgaggaagccgagcgcgaggtacaggacgttggccccggtctcctcgatgctcgacttggcgatgcggaagaggttcaggagccgtttctgcgtctcggcttgtgtcgcgtccgagcgcaggtgaccggctttcaactcctcgcggaggaacgcctcgtccgtccgatcccgcgggagaacccggaaccgcgccccgctggcgagcgtgtcctccacgcccggcagatccgggatcgcgagccccagcgaccgcccgctggggcggaagttgaggaggcggttgcggagcgagagatcgagcaggcgtctctgccatcgcgcgatccgatccgagggagcttccgagggctcttccctgcggtctcctcgctgcctcgcctccgcccggtccgcgagcgatacagcgtcgatcgtcgtcgatgacgcggcgaccgtcgcgggctcccgcaacgccccgagatcgacgcccgactcgccgtcgtcccggagcggcagcggccggacgccccgcttgcgtgaggatctgatgtcgatcgcgtggaagatcgatccggggtttcgcaggcggtccttcgctgcggcgaccgccgatgcgaacgacgcgtccggctgggtgatgcgtgtcgactcgacggggatgacctcgcccagctcgatcaggttgcggatccgggccggctcgtcgatcacggcttcgggcaggtgggcctcgtgcgtccagacggcggggatcgcgtgcccttcgggcagcaccacgagcgtgtgcaggccgcactgctcccacagaccggctaagagaagcgagagatcgaggcaggtccccatcccctctcgagcgatccggtcgacgagccggacacgctggccggccgtctcgaagctcgccgggggactaatgtagccgatccgccgggacacgagcgcgttgaagcacgcctcggccagatgggaggcccggtgccggctgccggactggtacccgtccagcgcatcggacccgctcagctcccccatatgctgccgggccccggcgaggatttcggcaatcctcgggtgattgggtgtcacaaacgccgcggtaagctcggcgtagtggccgaccccgggccactggtcgaaggcgagcagctcaacggcaaaggaccgctgcacctgcccggccgggctcgagacccggcagacgatcgagctccgctccgcttcggtccgcgatgccagattccgagcggaaagcaggaatgaatcgggggacaacgaggtggtcgactccgggtcgaggctcgctatccgcccctgccacggttctgcgtcaccgttctccaaggtaagctcgaccagaagatcgtcgacttgcccggcctctcgcagcgtcagccggaccgagtccacgagagggacgccgttctgctgcatggcgaagttgacccggtcgctgtactccagggcgatatcgcacgccaaggtatgtggttctcgttcaggaaccgcgatttcctggtcctcgtgcatcgcgggattctaccagagagaattggtcgctactcacgcagccgactgggacagcagaagaattcgttcagaatcgccgagatattacttataggtataaaagtttataactgcggagagcacaccaatgtctagctctcaccctgcggccccgttcagtaccaaaaccaacagactgccgcagcaaacagcaaaataccctcgtctaccaagtgagcccgatcttagcaccacgaaatccatccgatctcgtgtccggcgacccgcgaggatacccgtttggggttcccggcaccggtcttcagccttgctcgtagccatcaggccgctcgctgtactcagccgcactgccacttccgagtttaccaggcccagcccgcgtcgccgatatcaatgtgagcttcatcgaatcgaaagttcaccatggcgagtgcttgggccgactg

SEQ ID NO: 2831 - DNA, 23192 bp, synthetic construct
  source 1..23192: mol_type = other DNA
  misc_feature 1..23192: note = Synthetic
acacggaggcaccatcactgtccgctccaaagccggtgaaggttccacattcaccctttatcttccctgcggtgaaacagaaattcaaaaagccgaaattctcacagtaaaagacacttccgcaagctattcagccaaatcagattcagccaaatcagattcaaccggatcagatccttccgcatcggatcatgacaatgcaaccaaacggtccaccagccgcattcttctggttgacgatgaaacacatattctcaaaatcaccccccggcttctgaaccgcctcggtctgagatgcgatgtcgccagtaatggcgatgaagccctgcagcttgtcaaaaattctctcatgtccgacgataaatactctctcctgattctggatctgactcttcccggcgaggaacggggtgatgctattctaagtaagctcagaaaggtggatccccatctcagggctcttgtatcaagcggatactcagatgatgaagtgatcatcaattttgccagcttcggtttcgatggtgctgtcaagaaaccctacgatctcaactctctgaagagcgctgttcgcaatgttcttgaccaggacctttcagttcctgatgcagattttccagttgcaagttctgaatcaatgaagggtctggaagaatgaatccgcaaaccgcccagcagatgaatccttttcagaataatgaaataattgttctgatacttgccatagccctttgtgttctgtggttcatgaatcgtgaaagtttcagtaaaatcccgaaatccggacatctgtccgttgccatgatccttcttggagcaagctggttcttcactgttctcgaaggctttgtccttcctgaactgctcaatctcattgaacatatctgcctcactgcagcctctgccgtaataatggcctggattttcatggtttttggtactcagagtgactcggaaacagaaagtcacaatccgtaccatatcaccggaagtcatcatgaataatcccatagcggctcttgattccctctcgctggccttccttgtagccgccattgcctgggccatgaccaataagagatcagaactgggttcaggggcccgtgtcgcaattatcgccacattgatcacaatgatattgcgtgatttcagcaatgtacttcaatggaccggagtaactcagtttttcgatcagtaccttgaagatttcatcgaaatactgattccccttttccttggtttcttcctctacacctttttacaggacaaaatggtcacatctctcaaatcctcagcccaggaaaggcaactgattcttgacagcctttcagaatcactcatgttcattaaccgggatctgaatatcgaatggacaaacaaggctgccgaagctctgttcgagcgcagtccaaatgaaatgataggccataaatgccattccattcttcacaattccgacatcccctgcgatgaatgccctgttatcagagcaatctcttccggcagaatcgaagaaaacgaggtttccgcattttccgccaaaacccttcacatgactgcccatcccgtaatcggccccaccggaagaataataggagccctggaatccgttgttgacatctccccgagaaaaaaaatggaacagcaactcgccggcgcttcaaaaatggaggcaatcggaaaacttgccggaggggttgcccacgacttcaacaatattctcaccgccataatcggatttgcggaatgtggcattgaagaggcgcaggaatctcccaccgaaaagcagaatccgcagcttgaggcgctgtttaagaacatcattgaatcaggacagcgggcagcggatctgacccagcagctactggcctttggccgaagacagatacttcacccaagaatcattgatctgaatgagatcatcaccggaactctcaatatgctcagcagaatgataggcgaagatattgatcttagattaaatctggccgacggcgcaattcttctttctgcggatcgggcccagatcgagcaggtaatcatgaatcttgcggtcaatgcccgtgacgccatgcccaatggcggaaaaattgaaatcataacccaggtcaccgaaacggttcgaaactttgccgatgatcccgtacacgcccctcccggcctttatgccagcattatcatccaggattcaggaaaagggatggaaccggatgttcttaacaagctctttgatcccttcttcacaacaaaaaacaatggcacaggcctggggctttcagttacatacggcattgtaaagcagcatggcggctggatttcagcctacagcgaaaagaacataggttctgttttcaaggtctaccttcccatggcccatcatgaggagccgacccaggatcccataatgaaaattccaggttctgttcagcttgacggcaggggcatcggaattctgatagttgaagacgaggcacgaattcttgactttgtatccaccagcctgaccagaagaaatttcagggttttcacggcagaaaccttcagcgatggtctcaaaacctttgaaaccgttcaggatgagtgtcagatcgttctcagtgatgtggtgcttcctgatggttcaggagttgatcttgtggaaaaaatctgggcagtaaaacccagtctttcggtgattctcagctctggctacaccgaagagagagcaggtctggacagaatccgttcaagcggctttctctatctgcccaagccctaccccctcaccaaactgctctccaccatatcagaagccatgcagaccaatatattgaatcaggatacccctgatgtatctcaaaaaccagccattcctctttctgaaaaaaagggtattgaccagccagtgaaaaaaggtaatcattgaatgtccgtatatcggaaaaatgattccactgatatcagaaagataccatcatgggttccagaaattgcgtcatcacaggagtttcaagcggcattggcaaaaccatggcagaaatacttgccggaagcggttatcatgtcttcggaattgccagacccagtgggagatttgaagaggccatcggcttctggggctcctcccagctgtcaatcactcccatacccgccgacatagcagaccctgaacatgttgcgggggcattcagacagatcagtgcaatgacggaatccattgatctgctcatcaacaatgccggccactatttcactgaagactgcgatctgccctccatggaaacaatgcgggcaaatattgaagtcaactttctcggacatttcaacatgataagcacatttctccctcttctggaaaaaagcagccttgcccggaccgccactgatgatgaagcttcttcaatggaaacttctgcctcaggctggcccacaataatcaatgtaacctccggcgccggaggctttgcccagtgcaactcacaagggcccctggcctaccgcacctcaaaggccgccatgaacatggtgacaagaagccttcatcatctgctggccccaaagggaatagccatccacgccgttgatccgggctgggtgaagacaagactgaacccggcaggtacggacacccccgaaaattcagcaatgttcattctgcggcttctgacaatttcacccaatgaaggcggcagattctggtattacggacaacccgccgcctggtgatgtaatcttcacggaggataaatgtacgaagcattcaaggcctggtcacctgttcagcaagcccttgccggaaccatgttcacctggttcatcaccgccctcggtgctgctgtggtttttgctttcagatcccttaaccgcaagattctcgacgccatgctgggctttgccgcaggcgtgatgattgccgcgagtttctggtcccttcttgccccctcaatcgaaatgtcaagagagatgggttcaactccctgggcagctcccgccatcggctttcttgctggtgcactgtttctctttgccgttgacagactgctgccccatcttcatcccggaatggcaattgacaaggcagagggaatcaagacctcctggcagagaagcgttcttcttgttctggccatcacactgcacaatatccctgaagggctggccgtgggtgttgccttcggagcagtggctgccggcattccatcagccagtctggcgtcggcaattgctctggcagtcggcatagggctgcagaattttcccgagggtgcggccgtttcaatccccctccgccgtgaaggtttcagccgtttcaagagtttctggtatggtcagatgtccggtgtggttgagcccattgcaggtgtgatcggcgcatacgccgtccttgtggccagacccattcttccctatgcactggccttcgcggcaggggcaatgatctttgtggttgtggaagaggctatccccgaatctcagaccggcggccattcagacattgccaccatgggaaccattatcggcttcactgtgatgatggttctggatgtggctctgggataaaggaacccgatgcataacaaaatcagatcagtcattctggcttcagtgcttctggcttcagtgcttcttccactcatcctctcttcttcagaggaattggctcaatctgacccagaacaggaaaaagctctggttcgtgacaattcatcctttgccattgatctctatcagaacctgaaaaacaacaaaggcaatattttcttttccccctgcagcatctccactgcactggccatgacctatggaggcgcccggggaaacactgaaaaggaaatggccaaaaccctgaaattctcacttgaccctgaaaaccttcataatgcttttgcccaaattgaatccagactcgtcaaacttgaaaaaaaaggtcatatcagtctgaaaattgccaattccctgtggcctcagaaggattatgaatttcttcctgaataccagaccctgataaggaaaaattatggagtaaccatcaatccggttgactttgtaaaggcagctgaagatgccagaattactatcaatacctgggtggaaatgaaaacccagaacaaaatcagacaacttattcccagaggcgtgctggatgaattgacccgccttgttctggtcaacgccatatacttcaggggaaactgggcaagtcagttcaaaccctcacaaaccattgacaattactttcatgaatcaccggaaaaatcagttcccattaaattgatgttccagaaaaataaattcagatatggagaaactcgaaatctgcagattcttgaactgccctatcagggcaatgaactttcaatgcttctggcacttccgaaaaaacaagttgaactgaaagacattgaaaagaccctcaccattgaaacgcttcagcaatggcgcgagagccttgccaaaagaagggttcgtgtttacctgccaaaattcaaaatcacagctcttttcagacttgaccagacgcttatttcaatgggcatggctgatgccttcaacgattccagagccgatttttcgggaatggatggcagacctcatgggctctgcattggggccgtactccacaaggcctttgttgaagtcaatgaagagggaactgaagcagcggctgcaaccgccgtagtaatgaatacaaaaggtggtggaagctttccccctgtattcaaggctgatcatccctttatctttctcattcaggaaaatatgacaggaaacattctgttcatgggaagattttcagaccccgctgtcacggaaaaataagaacccggacctgcttgaaagaaaccatcaggcctgatatctgctgcgaagcccatagccatttaacggaccaatcataacatggtgccatgatgctccgtcgccgcccagatacagggcttctgccctgtcatgacaattcccgcaacaccttgaatggggcgaaatggcaagcactgagccagaacgcacaggctttttccgaatcgactgcccagaagtatgggacgaaacctgcccggcccgatatgaacgaatcactgaaaacccgggacaggaaccgcaaccataccactcaagggactctctgaccagaaatccgtctgtgtcatagaaaatgcgtctgttcaatggggtactatcccgggaagccctttccctgatcagatctcccctcttccatatcccaagctgtgattcacagattctccgggtgtgttccatattggctgttgaatccttcagagagcgcaaatgcagatcaggttcaataactgcgctgaagtccagaccggccatggcaagaattatccccatattcacatagggaagagctccctgaacagagtaaccgccttccagtacagcaatgtgcgccccaagcaaatctgccattcgggcatagccgccggcagtgacattcatggaagtgatgggatctgaatagtgattatcctgaccagcagaatttatgatgatatcaggtttgaaatcctcgagaatgggcattacaagattttcaatggcataaagcagagagtcatcccctgaaccgggcagcaggggaacattaaccgtaaagccaagacctgccccaaatcccatttccgttgcagaacctgttccgggaaaaatggtgctcccgtcctgatgaatggaaataaagagagtatcaggatcgcagcagtaaatatcctgagttccatcaccgtgatgacagtcggtatccacaatggccaccctcagaccgggcttcagggaccgcatatattcgatcatgacagcttcattgttcacaagacagaaaccccggctgccgtgaaccactttcatggcgtgatgtcccggcggtcttaccattgcaaaaccccgttcgacctcaccggcgagaacccttctcgcaacttccattgccccgcccgctgaaattcgatgaggcagatccatgagtgtggaagcatctggaacacagaaatgggccctctcgatatcactgtcagtggccatcaccggattgctcatgctgatgcccggaatcaggttcagaccctcctccagaatctgatccattgtatacagaagacgctcttctctctcgggatgatcaggagaaattgcccagtcaaaagcaggaaagaaaacaatgcccaatgtatggccggcatcaggcaaaaaggatgtggaagaaacctgacctgacccattcatgacaaagattcccctgtcacagtattcaaagccacagtattcaaagccacagtatctcctgaaacagtatcttcaggtaaagctctcccataaacagtttttatcacaatatccgctgtatcgtgaacaacccttgccctgagcctgatattgcggcccctgcccagttcataatcgatcatgctgaaacagctctcctctgaaaaactgacccgtccatggcccgccccgagaagttccgcaagctcttcccgtccatcctccagcctgtaacctctgccaattcttcttgaaataccaaactggggaatggacattgttccggcaagagtattggcaatcagagttgcttcttcgctggccacagcacaggccgcgccaactgcattggccacggggtggaaagggcagagatggcagggcactccaaaaaccttctgcagccagggaagcattgcccttgccggagcccccatcaccagaatggcctcaggtgcgaaactacgcctcagcatcagctccctgagagtgtatatgggttttgaattgatcttttcaagttcatgagaaaccgctgagtgaattttcaaagctgcccgacccatccagatgacactttcatgagcgtccaatgagtcttcattagcaagcatggcatcagtaagggtgagttcacctccaccacggcaaagaggtcttctgtcttcggcagggggtagaaattcccccgccccgccaagccgccagtcgccgccaattgcaatcgatggagtcagcagagactgaaccagagtgggatatctgccaatctccattccaaagggctggaaaatgggatcatcacccgcaataaaggcagcatcagtggttgttccgccaatatccagcacaagcagatcgccgccgccatgaagcccggcccgcttcaacagtgccagagcgccattcacgctggcgccaggcccggaacccacagtgagaaccgcattggcacccgcctgatcaagagccattacagaaccatcggctcgaagcagagcgattttctccggaagaattccaagttccgaaaccgcagcacccacttcatttgcaaatgaagccatttcacaaccaagagaggcattcagaaaaacagtgcccactctggctggaaaaccgggattccctgaaagggtgtaaccgcatgaaactgttgaaaaacccttttgggatgcaatatctgcaatccgcttctcggtttcaggatttcgggttgaaaatttacaggcaattcccagggcttcaatatcaggttcaagagataaaatccgttcaatgccctcacaaatctcatcatcatcaaggggacccacatgcagccccctgtgatctgtataacccgacaattccagccaggggccgggagttctgaaaaatgaggccggcagaccgggacctgactgaaccgccatggctgcgggtctgaaggattccgtcacaacactgttggtggcaagggtggtgctgatattcaccgaatggatctcattcaccccaacaccggcggcagagacaagctcattgatggcgcggcagatatcttcagtaagcctgcttctgcgcatctcagaaaaattgccgatgtcaggagtttctgaagcaacagcaatcttgacagtggagatcaattcattgtctctgagaattgctccatccagatttgtgccgcccagatccagaccgattctgtatttgaaattagctgattgcatatgttttcctgaaaatcagaccgaaagccattcgacaagaattaaatactttaccacgaagacctctaaagatgaacaggaagggaagaaagtaagctaatcagtaaattttcggaaagtattttacatttggtaaattttcaaaatcactatcctgtgtccagatagtacagtcatatgcatttgcagttgctataataatgctatcagccatgggaattttattttctaaacttattttggctgagttcaaagataatttgaaattcaaatcaataacgatccctttttgcatagctgatattgcttgcaaagccttattttcatcactttctcgcaaaacaaccttgaatacttcataaattgttattgtgggaacgatcaattgtgtggggtcttccaacggttcaagaaaattttctgcattatgtcctccagcgaaaaattccagccaacccgaagaatcaacaatattcaatgtcggtcctcatttcgatcaaaatttgtgtttatacccttcaggaatcccctcaattcagaaatatgtttttcgggtatcaattcaattcgcccatcaaattcaatgatctgaagtttttgaccaggtctcaaatgcaaggattctcttatcatttttggaattacaacttgatatttaggtgataccgtcactgcattcatacagtctccttatcgatatgatatatgtaatattctacttctatcgatcgagatattcaagagattgggagttcagataaaggtatttaaaaaagaaaaaagcgccccatcagggaggcgccggtcgcgccgcagcgcgttgcctgcgaaccattgttcttactgtaattagaaagaacaacgactcagatacaataaaaatatgttaatgcataaatgcaattccagtcaatgccattttcatgaaaacaatttgtttaaacttctgaattacctggaatgacaatacagacaagtttataatattaactatataaatacaggggggatgaaatactttgaaaacatctgcaaactgcaattctttaacttatgatgaaatcattctcggtttggatcttggaacaaattcggtcggttgggctcttgttggactcaataaattcaagccatcttgcattgtggacatgggttccagaatttttgaatccgtagtcaataaatcagactatgaaaaaggacagggtgaaaccaaagccgctgaaagacgcggcaaacgaatggctcgtagactcacaaccagaagacgcagacgaaaaatcagagttttcagaagattacaggaaaataagcttctccctgaaggcgaatcaacaactgttctacaatctcttgatcaagaactgagagctaaatattttgcaggcgaaaaaaaaatccctgctttggaacatacactgccctactatcttagagctcttgccctggatcagcaacttccattgcacgaaattggcagagcaatttatcatcttgcccaaagaagaggcttcaaaagcaatcgaaaaactgcaaaatcagataaagacgacggaaccatcaaaagttccatcgctgagcttcgtcaaaaaataacagatcaaggtgccagaactctcggtgaattcttcagcaaaatggatcctaccatagaaagaatcaggcaaaaatacacgcatcgagatatgtatgaaacagaatttgatgctattatttcgtcccagaaacaatattacccccatattttcaatgaaactttcacaaaacagatcaaaggggatattttttttcaaagacctctgaaaagcgcaaaaggttcagttgctttctgctctctggaacccaagtccagacgggcgccaattgcatctctggaagcgcagaaattcagaatattgcatatggtcaacagcaccgcaataataagcccccattccggacaatccattagtctcaaacctgaacagagagctgtaattattgccgaactcgaaaaaggctcattaacatttgcaaatgcaaaaaaacttctaggaatgcccagaaccgccaaattcaactgggaaacaggtggagagaaaaaattcaaagggcatacggtaaacgaaaccatgtcctcaatattcggtgacggctggtttcacatttcaaaagacaagcaaaatgaagctattgcagatcttttgagttatcaggatgatcaggctcttttcaaacgcgctaaaaattactggaaacttaatgatgaatcagcaggaaaaatgtcagtttctgttcttgaggaaggttacagtgctcattccagaaaagccttgcaaaaactacttcccctgatggaggaaggtcaggattacagcactgccagaaaaactgtctaccctgaatcctttatagctggaacaggattggacattcttccgcaagccagaactatcctcacctcgctcagaaacccagtggttgaacggacccttaacgaagtgcgcaaaatcgtgaacggaataataaaaaaatatggcaaaccttatgccataaccatcgagctctcaagagatcttaaaactaaccggaaacaaaagcaggaatcaattaaaagaatgagagagcttgaaaagcagagaaaagctgcagaacaaataattaaagaatccgggatttcaaaaccttcaagaaatgacattgaaaaatacttactcgccgaagagtgcggttggtcatgtccatatactggcatgccaatttctatgaaaacgcttctcatcgaaccttcttttgatgtagaacatattattccattcagtcgctgcatggacaattcattcaataacaaaactctctgccaccatcatgaaaatagaaatatcaaaaagaacaaaacaccatttgaagcatatcatggcactcagaaatgggaagatattcttcaacgaattgcaaagttcaaatatcgtgggcgatataaccaaaaacttgatagattcaaaatggcgaatattgaaaaccttgacgatttctgttcgcgacagctcaatgatacaagatatagctcaaaattggcctgcaaatatctcagcgtgctttatggtgggaaaagcgattcagaacacacaatgagaatattcaccggaaatggtagaatcaccagttttctcagaggaatatggaatctgaatacagttcttcaaggaaatggtgaagacaaaagaaacgatcacaggcatcatgccattgatgcccttgccacagccctgctcacacctaaaacaattaaagctctcagcgaatcagcagcgagaacggaaggcaacccttcagtccaatggcgcagacttttttctgccatggaagaaccatggtcaggttttcttgatgaagctcgtacaaagatcaatgtcataatcacttcacacagggcaaatcataaagtgaacggccctcttcacgaagagacaatttacagtcgacctatcaaaagcaacacagggccagcattgattacaattcgcaaagaattatctgcactttcaaaagacgatattaatagaataattgacttgcgcaccaaagaaattgtgatcaataaacttgcagaaatgaatgaagacaatccaggtaaagccttcaaggaagtttgtaatcaccccgtatttgctacaacacctcaaggaaaaacaataccaattcacaaagtcagaatttcagtgaataaaaatcctcaacaacttagttcgggttcaaaagaacgctatattctcactggttccaaccatcatatggaagtatttgctgtaatggatagcaacaaaaatattctcaaatgggatgccagggcagtatcaatgctggaagctcgcaggcgtcttgttaacaaggaatctgttgtacaaagaaatcatggcccgaacacaaagtttctattcacattaactaatagtgacataattgagctggattctgaaaattcagcccatggaaaagaattttacaaaatcaggggaataactgagcgtgctgatggtgcgaaagtttttgatttctgccgtattaatgatgcaagattgaaaaaagcgatgcaggaaagcgacaccgaaatcggagcgaaaggaggaaaccgatcaattcaatttgcaacaccacatagtctctcgaaaagacattgccgcaaggttactatcacaccattgggggaggtgcgaagatcaaatgagtgaaatagtcattgatatttctgacacaagcgctgacattcgagttgataccggaagacttctcttcaacatggggggagaagagaaaaaagtggctctcagagatattggttcactaatcatcagtaatcctgctgtcagaattacacaagcagttatgacagggttacttgccagtggcgccacactgatttgctgtgataatcggcatatgccaactggaatgcttattccaacagaaggaaattatattcagggggaaagaatcggcttacaggtcgattgctccaaaccaagaaaaaaacggctctggcaacaaactgtcaaggccaaaatcagagcacagggccgtcttctcaaaaatgagaccggtagttcatggggtttgatccatcttgcttcaaaagtagcatccggagattcaaataatatcgaaggccatgcagcaagaatctattggaagcgaatattccccgagctgaatttcatcagagatcgatacgcccgtaaccagaacagacttctgaattatggttatgcagtgctgcgagcaacaatgaccagagccatttgcggtactggtctacacccttcactggggttgcaccatcacaacaaatacgatgcattcagattggctaatgatctcatggaaccatatcgaaccgtaatagataaaattgtatgcaactggatgcaaaacacccctgaaaatacagaggtatctaaagaatggaaatcatttttctttgatcaaatggccaacccccttaccattgaaaatgaaaaacgctgtcttatggactgctgcaccagaacaagtttttcccttgttcaatgtctttccgggaaagccaccaaactgcttttcccaaaaataatctgatggacttttcaggatacagatcaatgtggtatatagttctcttcgatctaccggttggcagcaaaaccgaaagaaaagagtataccaattttcgaaaagctttaatcagagagggtttttctcaactccaattttctgtttatgccagattctgtgaatcaatgaaaaacgctaaaagctttggcgcaagattaaaaccacttattccaaagggtggacaagtgagatttttacctgtcacagatattcagtttggcaaaatggaaatatactgggggcgaaaaaagagtgctgtggaaaaaaaaccagcacaacttatgatgttttgatttgcttataaaagcgaaaaagcccttatatcaggctttttcgctttttgtattgtacctgagtcgttgttctgatccaactacagcttaatcatatgtttactccttctgtatctattgtacctgagtcgttgttctgatccaactacagctttttagcaaatacacatctcattgactctattgtacctgagtcgttgttctgatccaactacagctccagcttgcacctggtccatccgatacataattgtacctgagtcgttgttctgatccaactacagcgctatctaatgttcgatggatgcgaggataattgtacctgagtcgttgttctgatccaactacagctgtttcgtccttataacagttgtgtgtttcattgtacctgagtcgttgttctgatccaactacagccaatcgtttgacccacagatcagcatttgaattgtacctgagtcgttgttctgatccaactacagcagtggattcacatctgaggattgattcataattgtacctgagtcgttgttctgatccaactacagcgaatgaaacaggtcataataaccgccatagattgtacctgagtcgttgttctgatccaactacagctgacccattggaattaaatccttcacctggattgtacctgagtcgttgttctgatccaactacagcgtagcaggggactccttcttaggggcgttaattgtacctgagtcgttgttctgatccaactacagctcgttagcctttcttatctctatcttgcatattgtacctgagtcgttgttctgatccaactacagctcgtcattgtcggttactacaatatgactgaattgtacctgagtcgttgttctgatccaactacagctattttgaaggaattaaattgtttttttaaattgtacctgagtcgttgttctgatccaactacagcaattcttctatgtcagaaatatctacatcattgtacctgagtcgttgttctgatccaactacagctttcctgtatcggtttgcaaagtatttaaattgtacctgagtcgttgttctgatccaactacagcatgataattatggattgtcccgcaaggaaaattgtacctgagtcgttgttctgatccaactacagcaaaaggagagatataaaactatgatgcatcattgtacctgagtcgttgttctgatccaactacagctcagcagcgcaaacaactgttccttgttcaattgtacctgagtcgttgttctgatccaactacagcctgatttgggttcatgctgtgatgcaggaaattgtacctgagtcgttgttctgatccaactacagctccacggatcaccgtgacggattcgcctttattgtacctgagtcgttgttctgatccaactacagccgtctttttcttcaggttgatagataacctattgtacctgagtcgttgttctgatccaactacagcttgacagacgataacaatatgatataattgattgtacctgagtcgttgttctgatccaagatccaactacagctatcctcctatttttatttataatggcagattgtacctgagtcgttgttctgatccaactacagcctccgggggtcagcgggaatatataaaaatattgtacctgagtcgttgttctgatccaactacagctaattactaacatatctaaccttactttcaattgtacctgagtcgttgttctgatccaactacagcctgtcagcaactgtaaaaggagaaaactgtattgtacctgagtcgttgttctgatccaactacagcttaccgttctgcaatgatctgaagtcttccaattgtacctgagtcgttgttctgatccaactacagcaaactttccatggccacggtgatagcctcgattgtacctgagtcgttgttctgatccaactacagcagaacgggcactcgtcatcaacatcagcagattgtacctgagtcgttgttctgatccaactacagcaccgtctgacctgtagtgaatactgatttcattgtacctgagtcgttgttctgatccaactacagccaattcgggcagttcatcaattgatgcctgattgtacctgagtcgttgttctgatccaactacagccgtttttatccctttattcgacttttaaaaattgtacctgagtcgttgttctgatccaactacagcgtacattatgaacttcggccaatgctttttattgtacctgagtcgttgttctgatccaactacagctgaaaactgaaacgatcgaaagaatgttggattgtacctgagtcgttgttctgatccaactacagccaggttgcaaatcaggatcagcttcaccctattgtacctgagtcgttgttctgatccaactacagcttatcgggcggtggcctcatggcctccgtgattgtacctgagtcgttgttctgatccaactacagcaatttgcttgttttctatgaacgccatccgagattcaattgaacgatctccattgatgaccattcactctggcggcagtatccatgagcagcagagactgagaaagttccagcagatctattctgcagggcaatgcatgggccttccatggattccaattggcattgccagaaagggttggcttttgaaacctgggcattgaaaaattcatgactaacatattcggatgcatgcctggcgtgaaaacactgcccatggttgggcagtcgcgacgcattacgactcgaactgccagggacggcagtgagaggacagaaggtgaatctttgaatcgacttctactgaatgcttctactggactttgtccaaaatccagattctgtatccttcatttttcattgttcattttcacctctcactcctatgatcaattcatgcagggactcccctgtccagactgccatgtgcagtggacagccagaatctcccggcacaatcatataactattgggaggcagatttctgtacagactgcaccttccatcccgataaatggacaccattgccgcccggggttcaatacagagaataactgttccgtctgccattccataacctgatggcatcactgaatcgaagccacattcagaggcaggatttgtacctgtgaatgagcattttccgattccctccagaagccggaaccctgatgaaaaatcgggtggctgaaacaggggcggctcttcctcacccacatccagaaaacgggcaaaacgattttcaagaaagttcctgtaaagcaccttaagggctgaaactccatgacccgaatgggacgctccggctatttccagaacttctccggcccgtcttcgcgaaaggcctcttcttaccgccagctgcacactctgaccaagctcattccagctgcgcccaagaagagtatcatccactgtggtcagaaactggaatatttcatctctggagagaaggggcagactggtcaaaccgaacagtgaatctgtgacaatcgaatacagggcaggttccctggcaaccattccaagaagcagttttgctgcactgggtgaatcaagacagtgcagcactttgagaagatgctgaagtccggaaccgaattttctgaatccatcacaatcgctcagataatcgagaatttcaccgattgtcagctcaggtgccgaaacatcgccaggcagcagatagtgaaccctttctgcgggtaagaccagaatcccggtttcagcgggcagggcaatttcacagctccgggaacgccgggaaatattgtagagcgattcaagggatttgccgtcggacagcttcaggtgcccttcaggcaatctgatccattcagctccattatcacagcccttgtcacagccattgtcgcggtccctgccgccgccctttctgcaaaaccatggccccatttcccgatgcagaaagagaggctgatcaacaaaaaaggattttccggcagaatcacctgtcatcaccgtattttcagaatcggcaatgatgaaaaaaccaagaaatccgccaatgactccacttgatgatgattttcgcagtctgtacatgtgtgctgtcattctgcctgactgaggctactgcccatcttcacagagacatctggccctgtaatgctgaactctctggccgggtccgatagtgcggctttcacctgctgcccactccctgtcactgatttcaggaaagcttgcatccccctgatggattccgctgactcttgtgataatcatggatgaacattgatccagagcctgagcatatatctgtccaccgccgcagatccatgctctttcatgtccaagggagacaacaagagatgccgcatcctgaagggttctgcaaagccaggggccatttcccctgttccaggttagtctgccccttgtaccgataccatcaggccctgcaatgtccgcttcagatgaacagcggctgagaactattgtaatcctgtcatcaagaagggccggaagagagtcaaaagtgcgacggcccattatgactgcaccaccttttgtgatttcacgaaagtgggccatatcctctgaaagattccatggaatcccgccactgcaaccaataacccctgattcatcaacagctgcaatggcaataagctctggaaaaggctttattctatccatgggtttgaatcggatctcaggcttccatgcaggtttgctgcccagaaaatcatccagcagtgatgagaaagccgggtaatcagaagcgcgcccggcacgaaccgccactgaatcacccccctgaaacgagggcagcatcataatggcaatggcctttgttctacccagagatgaaccgccctttccctttgccgcccgatattgctcatgaaagcggtcaataaagagtctggctctggcccatggttctgatggaattgccggtggcgacggaaacccggtgaaattctgggccagaaagggattcatcagcagaccccttcccaccatccagccgcgtacggttggaaaaattctgttgagaatccgaaggtcctcgcatgtgcgtatatcaccattatatataagaggtgtcctgagcttcccggcaagatggcggaatgctgcaagatcagcacttcccgaatactgctgaattcccgttctgggatgcagggttatctcgctgatgggaagctcattgaaggcgtcgatcaattccagtatttccgaagaacagaacattccaagccgcactttgagggacagggcgcaacggcatgattctgcaatggtcttcagcattcgggaaagattctcgggatcaggaagaagagccgccccctttcccttttttgtaactgttgaagagggacagcccagattgatgttgatctcatcaaaaccaagtttccagagtattccgtccagatccagaatgggttgcgcttctctgcccagaacctggggaaccagacgaaactgatctgaaaaggggccgggaatcagatccttcagatggggcctggaaattctgacagtgggagcaactgagatgaacggagaaaaggcctcactcactcctccgaaaagagagaagaaaacatctctgaaaaccttgtccgtaaccccttccatgggggccagaatgattcttttcacagccaaagcggtatacctcttccacctgttcatactgtccggatacaaattatcacataaaaattcacaatccggtaaaaaaagggtaaaaaaaaattgacacttgccgaggatcaccggaaaatgaatatgatcatgtaaataattcaatagtaatgtttatagtaaaatttattggaaacgtttaacagaaattgttcacagagaggtttgacatgaaaaaccaattcgccttcacctcaagagccatgattctgcttattgcggcttttattcttgcctctgcccttcccaccatggcagccagaaaactgggcgccgttgttggcgatggttttgtgacattctccatctattcggaaaatgccaccagaattgaactctgtctatttgagagaccaaccaatcccagacctgtgaagacagttctgatgaagcgcggtgcagacaatatctggtccgccaaagttgaggatgctgaagagggcgcatattacgcctatcgcgcctggggtccaaactggccctatgtcgatggtttcgaaccgggcaccgaaacaggcttcatctctgatgttgacaaggaaggcaaccgtttcaaccccaacaagcttctggttgatccttacgcaaaaaccataagccatgaccccattggtgatggcaacagataccgctccggcgcaaagggccgcgaagttgacaccgctgcctttgcaccaaaatccattgttgtttccaatgatttcgactggcagggcgacaaacctctcaactacgacatgagcgactgcgtgatctatgaaacccatgtccgcggcctcaccatgaacaagcccctgaaaatttccgctgccgaggcaggttcctacaaggggctcatcaagctgattccctacttcaaaacactcggcatcacctccgttgagcttcttccggttcatgaaacagtgaatgatcagaattcagacactgacagaagcgatgacaattactggggttacatgaccctcaattatttctctcctgaccgccgctactccagcgacaagtcagccaccggcccggttgatgaattcaagacaatggtcagggaattccacaaaaacggcatcgaaatcataatggatgttgtcttcaaccacaccggcgaaggcggcatctggggcacaagttcaggtcccgacaagacaaaggccaatattctcagcttcaggggcatcgacaacagcgtctattacgaactcacccgcgacaagcagttttactatgacaataccggttgcggcggcaacatgagagtcacccacccctatgtgcagagattcatccttgacagccttgaatactgggtgaaagagatgcatgttgacggattccgcttcgacctggcatcagttcttggaaactcagtggacaatcacggctacaacttcgactataaccatcctctgctcaaggcaatcacaacccgtcttcccaaaaccaagatgatagccgagccctgggcaatcggcggcaactcatatcaggtgggcggtttcccctctgactggaaggagtggaacggcaaattcagagatgtggtgcgcaaagccgttctcatggaatccaacacaatgggcgacctggccaagcgtctctgcggcagttcagaactttattcacataatggacgccccgcctccttcggcgtgaatttcgtcactgcccacgatggcctcaccctctatgatgtggccgcctacaacaagaagaataaccatcaggcatggccctatggcccatctgacggcggcgaggatcacaacaattgccgcgactggggttccgaagaactcagacttcagcaggtccgaaatatgggcgccattctgcttctctcccgcggcacacccatgcttctgggcggcgacgagttcgcacgcaccaagcggggcaacaacaatacctacaatcttgacagcgtttccaactggttcgactggaatctcatgaagaagaacaaggccatggttggcttctggtcaaagatgatccgtttcagacgctcacatccagccctctgctctgagcgttatccccttggcaaggattctgccgattccgacgacagactgcctgaccttcagtggcatggcgcaaaattcctcaaccctgactggagctcatcagcccatgccatcgcctacagactcgacggcagcaaggaagagaccggcggccgcaagaacgccgctgacctctttgtcatgatcaatctctggcgtgacggcatcaccttccagcttccgccaaaccaccccggcaaaaagtggcaccgtcttgcagacacagcagcctgggcagtgaacaacggcgagatgaaggataacttcgctgatacagccaatatgcaggccatctccgatggttcctgggaaaatcccgatgaccgctccttcaagggcaatgagtcatacagttatggcacccatgcccacagcatcgtcatcctcatggaaaaataatttgaaaatcatgcatcttctggcccagcggccaggtttgacaggcagcggtcattaccttcgcggaacggtgatggccgctttcctttccggccatgaaaacgctgtcattgcaggggttcctgctgatgatccctgcctggaccttcccttcgggggaattcccggctgtgcccttttcagagccgtaaccttcagcgcaaccgcaaccaccgcaaccaccgtaaccggcgcaaccgcaaccaccgtaaccactggtgctgcgcgtgaaaccattccccagctaaattttcccgtcactggaatgagcgatgtgatgccctatgtctccaccatctggcgaaacatgagtccgtcaatgcttcacgcctgggaagaggcattcaaaaagacaattgcagagtgcatcaatgaatttcgaccccatctgatcatatctcaccatctgtggcttctcactgcaattgcggctgaaatagccctggagcgcagcattcccattgtgggagtctgtcacggaacctgccttcgtcagatgactcttgtgcctgatctggccagtcggattcttccggctcttggcagactcaatgccatggcgctgctgaattctcatcaggagtttca

SEQ ID NO: 2832 - DNA, 23135 bp, synthetic construct
  variation 15609..15888: note = note, n is a, c, g, or t
  variation 15080..15193: note = note, n is a, c, g, or t
  source 1..23135: mol_type = other DNA
  misc_feature 1..23135: note = Synthetic
ataagttcaagaacagtctttcttgcatctataacctgttttgtgttcgttttgatcttcattttgtctgcaacaggtgtgcaacaagatcttttcaaagttggagtattttcaacttctacaacgcagataccacagtttccggttggtgttagatctttgtaatagcaaagggttgggatatcaacattgaccttttttgcagcatcaaggatagttgttccttctggaaccttaacctcgataccatcaatgtaaactgttaattctttaatcattgttatctccttatttatttaacattttttttacttcatcttcaagatattttgaaaaactgttaataggtatataaggtgattgtccaagtggacagaaagatgtcaacttcattatgtatgataactctttcatcctttcccaatcttcaatagttgctcttcccttcaaaatattttttgaattcatagccaactgctttgttccaattctgcaaggagaacattttccacaggattcatgtttgaagaattgaagaatggaatccaaagtttcaacggcgtttctatcctctgaaagaacaagtattgcacctgaacctaaaactgccgcatactctccgagtgaatcaaaatccatcttaacatcgaatccctcttcggagatgaatgctccagcggcaccacctattaaagcagctttaaacttttttccttctttcagaccaccaccatatttaaaaataatatccttcaatgttgttcccattggaacctctataagtcctggataaagtatatcacccataagagtgtaaactttcgtccccggacatttttccgttccaaaacttctataccacttacttccatttctgcatatctctggaacattagttaatgtttcgacattgttaacaacagatggattctgtctgaaaccttttactcccgggaatggtggtttgtttctcggatttcctctctttccttccatagattcgatcagggctgtttcctctccacaaacataggcacctgcaccttttctaacctctatatcgaaagagaaattcgactcaagaatatttttcccaagaaggttatactctttgcatttctttattgcattctcaaccatttttatcgaaaggtcatactcacctcttatatagatgaacccttttgtagcaccaacggcataacctgcgatagtcattccttctatcaatctgtatggaacaccttccattatcaacctatctttgaatgttccaggttcaccttcgtcagcgttacagattatatatttttcacctttcaaaggtgctgtgaaagaccatttaagtccagttggaaatccagcgccacctcttcctctcaaacctgaatctttcacttccttaactacatcctcgggtttcatttcaaaaagaactttaccaagtgcttcgaatccacctattccaatgtactcttcaatattttcaggatctatttcccctgacccttttaaaacgatcctctcctcttttggtctttcaagtgtaacagtttcacctttgatcacttcacctgtgaaaaggaggtcttttactatccttcctttcaaaaggtgttctttcactattctttcaacatcctcacttttcacatttacatagtaaacaccttctggataaacaacaagaacaactccctttccagagattccaagattaccagtttgagcaaccattatttcatctgaaagtccagcattctctatctccttttttaacttctcaaaaatacctttagcacctgcaaggagagtttctggatcaatcgaaaccaaaatatgacttctaaatattttagccatttttcttctccctgtatcttgttattatttcatcaattttttcaggtgtcaggttaccgaacatctgatcatcaatcatcatagcaggggcaactgcacaaacacctaaacaggaggaactttcgagtgtgaacatattatctgaagtagtctctccctctttaactccaagagtttttctaagataattaaaaattgtattacctcccatcaattgacatggtggcgaaacgcaaaccctgattatgtgttgtccacgttttttaactgaaaacatcgtgtaaaaagtcgcaactcccacaacctcagatctacttatttttagatatcttgaaactgcaacaagatcctcctcggaaaggtatttctcattttttgaatcctgaatgtcgtgaagtatgtaaaggaggttttctcttgttggttcatacttttttagtatctcttccctgttcataaatcctccaaatttattttttctttttaaagcaaacaccagctctacattttttctcatttatatgttcaagatactcatctttaaaatactttaaagttgaaagaacaggatttggagctgtctgcccaagtccacatagggcggttttagatatctgttctccgagatgtatcaaaagatcgagttcttcaacctttgctcttcctttagaaattctattcagtatttcaagcatcttttttgttcctattctgcatgaagggcattttccacatgactcatcctgtgtgaactcaagaaaatattttgcaagatcaaccatacatgtatcttcactcataacaatgagtccacctgaacctattatcgttccaagttttttcacactctcataatcaagaggagtatctatatactcttcagggatacaacctccagaaggtccacctatttgggcagccttgaactttttgtcatttggaagtccaccaccaatttcatagaccatctcttttaaggttgttcccatagggacttcaacaagaccagtgttgttaattgcacctgcgagagcaaagactttcgttcctttactcttttcggttcctatagatgagaaccatttgcttccctttaatattatctgacaaacattagcgtaagtttcaacattgtttataagagttggtttcccaaaaagccctctatctgccgggaatggtggttttggagatggtgttcccctttgtccttcaaccgagtgcatcaaagcggtttcctctccacaaacaaaagctccagcacctacccttatttcaagatcaaaatcaaaattctgtccaaaaatatttttgccaagtagattctcttcgtatgctttttttatagcacttctcaacctttttattgcgagtggatactctgctctaacataaatatatccctgtttggctccaactgcataacctgcgatagtcatcgcttctataaccgaaaatggatctccctcaaggacagatctatccataaatgcacctggatctccctcatcagcgttacagataacatacttttcaccaccctttgagtttctaacaagttcccatttcaaacctgttgggaaacctgctcctcctcttcctctcaaacctgaatcctttatctcttttatcacatcctccggtttcatctctgtcaaaacttttgcaagtgcactatacccatcttttcctatgtactcttccaaagattcagggtttatgattccacagtttcttaaaactatttttaactgtttctggaaaaatggtatctgggatgcctgttgaacaatcttttcagaatccttttctttataaagcaatctcccgactactctgcctttcaataaatgctcttcaactatatctttcgcatcctctggtttcaactttttgtagaaaactccatcaggataaactataacaacaggtccaagttcacagattccaacacaacctgtttcaactatattgaccatgttttcgatgttatgctttttcaattcctcaacaagtttatctctgaaagaataacccccacttgaaatacaggatgctccagcacatagaagaaggttatatattttagccatccttcctccattattttgaagatactaacaaatcttttactatgtttccattaacaaaatgttccgccacaatccttcttgctttttcaggtgtaaggttaccgtaagtaatcatctcttttccttcctcgtaaatgtcaactataggctctctatcacagagtcctctacaacctgattgtgtaattattatatccgtaatgtttctctttgatatttcgtcaagaagagctgataaaacttcccttgcaccggcagctataccacatgttcccattccaacaacagcctttattcttccttttccttctcttaaatttgtttctttttccatcttttcccttatcttttttagatcttcaagtttcataatgcctcctgattttttattgaattaagattttctttaatgaactgtttaacataacctgtaacctgagcatcactcaggtttaaacctttaaatacttccttcaattccctgctatctatcttcaaagtctttccattcttttcgtaggtgaaaagaatatcaactccctcataaactgtcatcaaaatccaaagagtttcttcaaggttacccaaaggtaaagcatcgatatggtttttgtttattgagaaaaagatttttgtcccttcacccttttttgactctatcttgaactttccatcgctctgttctacattctgttttagaagtggaagcccaagcccgaactttttctttctctcatcttttgttgtaaagaaagggtcaagaaccatctttaacagttcaccgtccattccaacaccatcatcgattatctcgaatctcatctggtccttatcctcgtaaagttttatctgtacaagtttcgctttcgctcttatgctgttttccgcaatatccaatatatgaagtgagatatctctcatttaacttcttcactcgctttttccctatactcgtttattatctggataaccttatcttcagtcaatttaccgtaaacctcttcatcgaccatcataactggtgctaaaccacatgctccaaggcatcttgctccctggattttaaaaagaccatcctcagttgtctgttcaagttcaacatttaattccctcttcaaggtgttcaaaattttatcagctcctttaacatagcacgctgttccaagacaaaccttgacgttgtatttacttggtggttggagtgtaaaaaagtggtaaaaggtaataactccataaataacacttctatatacacccaattctttggaaattaaacttatcgcttcctgaggaatatatccaaaaagttcttgagttttatgtaaaacttctataaggtccttttgtccttttggatgtttttttatctcctccttaagttgctcaagcaactcctcttttttaagtttcatcttttatcctcctttatgacattcgatcatgttctctccaagaacttttttaaaaacttcaaaacctttattctctatactaccatcaaattcaaaagatatataccttcttcctacctcatcgatgtaatgagcatcggaacaacaaattattttatacttttctttgtataaatcaacattttttacaacttcaactccatctattttcaaatctggtggaataaaaccaagttgtgatactattgaaaaatttggcctatctatatgtgaagcaaaagcgagtccaccaaaatcgtgtataagattcacaacctcatcaacagacaactcggaagatacccctaaaaagtactcatactcatacaaaacatcatcgtacatatccacaacaacctctttccccatcttttcagggtcattttttatctttggtagagatttttcaaattctttgtaaaaattctcacaggtttcaagattttcaaaatatccaaggatatgcgtttcctctctcgtctgtatctctattcctggaataacctcaacatctaaaaggtctgcggcatccataacaccttttatgttatggatagcattatggtctgttacggcaataatatcgagtctcataaactgtgccattttcgaaatttgaactggagacatataccaatcagcacatggcgataaacaggtgtgtatgtgtagatccgccttgtgtctcatttaactcccatattgtacaataatccagcaacctcaaaagatttcttttcggttttaaaaataatgacgccctctttctttgctgcctcaacagtatcttcatcaggtgagaatccatcacagattatgatagcacatatttcagccatttttgcgacagcaactatatttttatgagtttgaactgtaagccagactgattttggttgaatctttcccatcacaacggaaaggagatcacagacatacccattttcaaactctaagtcaccatcattaacaaccgtaagattcaacttttcttttatctctgaaattctcataacctctccttttcttttttatactcctctttgagaataactatacaatcatctatactcttaactccctgaactatatcctcagcaaaagctttacatgttggacaaccacatgcgccgcaatcgattcctggtaactttttctctatctcgttcaacttttcaagtttatcgagtgcaacgtttatatcaggatcaagtgttataggtcttggagttatactttgtgagagaaccaactccctatcttttacatcgttcacaagtactttcgattcttccgattcctcttcaatcatacttgctaatctatctatcctttcttttgcaacaaaaggattctctttgttgaatattccaccaacacaacctccagggcacgcctgagcttcaatgtaatcgaacatctccatttttccatcttcaactttctcaagaacttttataacattatgtatctcatcaactgaaagttttctaatttttccctttatagaatcgttctctcctccttcccttccccatcttaaaccccttttcccagactttacaagatcccctcttttttttatagaatctaaatggtttatcaaattttcgtagatatcacttatagaaattactccatcaacaggtgaaacttcctctccaacaggttctttgacagatgtaacctttgcagggcatggtgttataaaaaagaccccaattttgttttcggaaagtccagtttttttcatagcctctctccttgctatctttgctgtaatgtccataggtgttatcaaagggattatgttgccaacaagtgatggaaattttacctggaccaacctcacaaccgaaggacatgcagaagagattaaaggtcttatatccttatgttcctcaatatatttttgagtgtaatttgaaattatctctgcaccaactgctacctcgaaaacatcatcaaaacctatttctataagtccacctaaaatacctgccaactcgagtctttctggaaattgacctgttattgatggtgcaggtattgcaattttgtaactgtattttttcaaagattccaagggatctgaaacagcatattttgcatggtttggacatattcttatgcattctccacaatctatacacctctcttcaattataaacgccttctctttccttatccttatggcttcagttggacaccttctcatacaatgggtgcaacctttgcactcttcctcttttaaccttacagaatgaaagtatttaatttcacttcccagattttctcctaattataaaatgaacttttgttccatctggaactttactttcgatctcaaagaaatctgagttcttttttatatttggaagtcccataccagcaccaaaacccaattctcgaattttgtccggtgcggttgaataaccttcctgcattgcaagttcaacatttttaattcctggaccaccatcgataacccaaacatcaaccatttcaggtgttataactgcctccatctttccatctgaagcatgaacaacaacattcatctctgcctcataactcgctatagctaaccttcttatatcctcaggagggtatccaagttgttttaaactattttttagactacttgaagcagaacccgctctatcaaaatcgttatgttttatatcaaaacttaactttatttcactcatattaacatactcaaacctttttcataaagcattccacaagtctcaaacattcctttatctgttacatatattgaaatgccactcttttttgcaagttcaaccatctcttttgtcggttttttaccccttacaaaaactatcgctgatgcttcaaccatctctgctgttctaattgtctggatattcaaaaggttcgtgacgattatcccatctttttgtgcaataatcaaaacttcactcataagatcagaggcacatatagatgaaacacatctttcaggttcaaccacatagcattccttacatgggattaaattttttacagtttcaacagtaaatttgttcataatttaattattatataaaaataaaagaattagtcaaccgaaagagggtttatttttttaatcattttcttcaaactcgagttgttttatctctttcatagaacttccaatataaccttttaaagaaccataaattcctattgtactactaagtattttttcaagttgtttttctctttccttccaaattttctggatcttatttttttcttcattgtatcctttttgaagttctaaaaaacctgccacaatagattcaaattgatttttaaattcgacacttgttagatattcatatacgatttcagatttttcctttttcccagtttgtatctttttttggtaatagacctgaattaacataaaccttaaaacaaaagcaactcccttcaactcttttaaactgcaaatccaaacaccatcttgattaaaaaaacttttttgtccttctggaaaaacttctgtaactaaaacaagtatatccgctttcttttcaagattgtcctctttaaatttttttatccattcttttttaaagttttttgttcttttactttcataatagattcttccaatttcaaaaccattttctataacagtttgtaaaatgtcggcacctctttccccctttttaattggttcaattttatcttcaaaaaaagtttctttcaaaagattttctatctccaattcctgaacttcaccttgtaattgaacagaaccttgctctgcttttctctgtgcttcctccaactgtttttttagatcttcaataattttttctttttctttcaataccaaataatttttttcctgctcatttttttctatttttcttttttcctcattaatttgttctgtatattttttttcaagttcaagagttattttatcttttaattcatctttttctcttttcaacctttcaatttcagcctttgttctatttaactccttaattttatttgttttttctaaaagttcatcattcaaaattttgatctgttcttgaaaagaatcttctatctgttttttcagtttcttttccatttcttttttttcttcggaaattttttcattaacctctttttcaatccttttttgaatattttccttttctctttcaattatctctctttctttttttaaattctcttttttttcgttatactctttttctaaactattttttagttttttttcaatttggaaataaaggacttcttcaacatcaatctcggttttacaatttggacaaacaatgattgtttttttcatttttcacctccttaatattaaaatgtggaaatagaaatttaagtgttcaaaaaccaaatacgctccctaatacaataatttacaaaaattacaattctataaaaccaaattaaaaagggcagatactggatctgcccgctggtccccttagggactaacagttcggctttcgccttactgggacttgactacaaaatcgttttaagtagaattagatttaattataaataaaaaaaaatttttgtcaagggggagaaatgaagtatactctcggattagatcttggttataactcaataggttgggcaattttagaaaatgatgaaaatggttcaccaataaaactttttaatgctggtgttcatatttttgaaccatccatagaagatattgaaatagatggaaaaggaaaaacaaaaaatgttaaaagaagagaagcaagattgagaagaagacaactttttagaaaaaccaaaagacttgaaaagttattaaatttttttattcaagaaggtttctttcagaatcaaaaagttttaataaatgatccatttgaaagggctgaatttttataccaacttgataaaaagtcaaggaatccatatatattgagaagggaagcacttgataacagattgagtttagaagaaatagcaagaattttttaccatatagcacaacatagaggatttaaaagtacaaaaagagaattagccgaaatgaataaagatgaaaaaaagaaaaaggaagatggcataattcaatctgaaataaacacattaaaagaggaaataaaaaaaaatagttgcagaactcttggagaatattttgcaaaactgtttgaaaatggtgaaaagataagaggaagacatactgatagaaaaatgtatgaagaagaatttcaaaaaatattcaataaacagaaagagttttatccaaatatttttactgatgaattcaagaaaaaactgtacaaactaatatttcaccagagagaacttaaaagtcaaaaagataaagttggcttttgttctcttgaaagagggaaaaaaagagcacctcttgcattgcttgtttctcaaagatataggtatatgtgtaaagttaacaacctcaatgttatagacactgaaactggggaaaatagagaattaactgttgatgaaaaaaagaaattgtatgaaaaacttgaaaacagtgaaaaactctcttttaaagaaataaaaaaaattttaaatctttcagaaaaaagatacatctttaatttagaaaaaagtgagaagtacataatagggaataaaactaatgttaaaatgaaaaacattataaaggattgggataacttcgatgaggataagaaaaatttctttataaacgaagcgagaactgttgtaaaaatagaaactcttgaaagaagaggtaaaaaattaggattatctgatgaagagtcgaaggaattttcaaaagttgtttttgaagatggttatctgaatttttcaaaaaaggctgttgaaaaacttttaccttatctaaaagaaggtaaaaaggaatatgaggctatcaaattagcttatcccgaaaactcagtgcaaaatgataatttaaaagaacttgactttttacctccaataaaatcaaaagaattaaaaaaatattttgaagtaagaaaccccattgtagaaaaagccttaactgaaacaagatatttggtaaactttttaataaaaaaatatggtaaaccagaaacaataaaaattgaacttgcaagagaattgaaattatcaaacaaacagaaggaaagaaaacataaagaaaatcaagaaaatagaaaaaaaagagaggaggttattgaaaagttaaaaaatgatttaaaaatttctgaaccaactgaaactcaaattcaaaaataccttcttgctgaagaatgtgattgtaaatgcccttataccgggagatctataagcatggactctcttttcggagaacatcctttgtttgatatagagcatattattccttttgataggtcacttgataactcatttttaaacaaaactttatgttattctgaagagaatagaaaagttaaacacaataaaactccttacgaagcttattatggaactgaaaaatgggaagcaataatagaaagggtaaagaaatttaaatcaaatgttagaaatgaaaagttgagaagatttcagatgacaaaagaagatgtagaaaattacattcaaaatttttcaactcaaaatttaaatgatacaaaatatgcatcaaaattagcaaaaaaatatttaggattactttatggatctattaatgaggatggaatagataaaaatagaaaaagaaggatttttgcaagttctggaaaagttacatctactttaagatatgcacttggattaaatacgattttaaatgacgaaaatataaaaacaagagaggatcacagacatcatgcaatagatgctattacaatagcattaacagatagttcaatgataaaaaagatttcagatgcttctaaaagagaaaaaaatattaattccttgttcaaagacttccaagccccctgggaaaattttagaaaagaggttgaagaaataattgcaaaaatgaatatttctataagaataaacaaaaaagtttcaggtcaaatacatgatgaaactttttataaaaaacctttcaaagaagaagaaaaaagttatacccaccaaagaataaatttggaagaactaactataaaagatgaagacaaaaaaaagcaaagttcaaaattaatagacaacatagttgatagcaaaattagaaatattataataaattctttaaatggtgaaaagcctaaaataagattcaaagatccaaaagaccacccttatattattcaaaaaaatggcaaaaaaattcaaatccataaagtaaccataaaaactaaacttgaaacttataatgaaattggacccgaaaaagcaaaaagatatgttaaatcttcagacagtcatcatattgagatttttgaagatttaaaaacaaaaaaatgggatggttatgttgtttcgttacttgaagcgtatgaaagaaaaaagaaaaaacttccaattgtaaataaaaatttaggggaaggaaaaaaatttttattctctcttgcaaaaggtgaaataattgaacttgatactgaaaatggtaaaagggaactttttgttgtaagaattatttcagcaagtaacaatcaaattaaattcacaagaataaatgattcaagaaaaattactgatattccagcaacaggattaacagcttgtccttcatcactcaaaaaaagaaattgtaaaaaggttgttataaatattttaggggaaaaacattattcaaatgattaaaatttaaataaacaaaatgactttaaaagaatacaaaggtttagaaaaaataatagaaatctcagaaggtccagtaaaattaaattcagagtatgaacaactcattattacaaaaaatgatgaaaaaataggaaaaattcccataaatgagatctctgtccttttaataacaactcctattgcttctatctcaacaaatataatttccctaattacaaagaacaaaggaatgattgttgtttgtgatcagttttatcttccagttggagtatttttaccttatgagttgaattatattcagcaagagagattcaacaaacagataaatgcttctttgccattaaaaaaacaattgtggaaacagttaatatctgcaaagataaaatctcaaggcgctgtgttgaaaaaaataagagaatttgattttggtctaaataatatagcagaaaaagttctttcaggtgatgcttccaaccttgaatcttatgcttcaagaatttactttaaaaaactttttggtgataaatttaaaagagagaaaaatttgcccggtataaattctattttaaattatggttatacaattttaagagcgatgacttcaagagcaatctgttcttcaggcttaaatccgacacttggaatttttcatcacaataaatataattctttttgtcttgctgatgatcttatggaaccatataggccaattgttgatgaattaatctacaattttatgataaaatctggtattcaactttttttaacaaaggatttaaaaagaaatataataaaggaacttttaaataaaaaattcgaaatagataaagataaaatttttcttaacgaagcactatttagattatcttcatctcttgttgaagtttattgtggaaaagaaaagaaattaaagatatcaactccttatgaaaaggaaagagataaaaactccaaataacagataccattcgatgtggcttttagcattattcgacctaccaacagaaacaaaagaagatagaagaaattacagagaattcaggaactcactacttaaagagggttttgaacaattgcaatattctgtttatgcaagatatgttggtgatgagaaaagagccgaaacatttaagaaaaagataaggaatgtagttccaccaaaaggagaagttagaataatttcactaactgatatccaatttggtaaaatggaaatatattaccaaaattctaaaagaaaacctgaagaaaaactcgaccaattactacttttttaactatattataaaagtaaaccctctctattatttaatttaagagagggtgtattctacttgaaacgattttgtagtcaagccccagctatattgatatgtttaaaaataaaatattaattctacttgaaacgattttgtagtcaagccccagctgttagaatctaacggtggatatacaagaaattctacttgaaacgattttgtagtcaagccccagcagaaagaaatccaggaaaaaactaataataattctacttgaaacgattttgtagtcaagccccagctaacaaatccatcattcctattcaactctcattctacttgaaacgattttgtagtcaagccccagcacatatacttgggatggctccattttgacaaattctacttgaaacgattttgtagtcaagccccagcaaactttatctagttaaagttaactctggaattctacttgaaacgattttgtagtcaagccccagctaaatgcatcagatagtataaaaaccaagaaattctacttgaaacgattttgtagtcaagccccagctatcagtagatgaggaatgtataagacaaaattctacttgaaacgattttgtagtcaagccccagcaaatcctccttgattttattttagcaggggattctacttgaaacgattttgnnnnnnnnnnnnnnnnnnnnnnnnnnnnnnnnnnnnnnnnnnnnnnnnnnnnnnnnnnnnnnnnnnnnnnnnnnnnnnnnnnnnnnnnnnnnnnnnnnnnnnnnnnnnnnnnnnattctacttgaaacgattttgtagtcaagccccagcagagaagtattatactatcagtagtattgcattctacttgaaacgattttgtagtcaagccccagcgaccttattgtcaattgtcgaaggtcaaaaattctacttgaaacgattttgtagtcaagccccagcaatatcttttatataaaagattaaatgaaaattctacttgaaacgattttgtagtcaagccccagcggtatcagcaacaacatattcaacgaggcgattctacttgaaacgattttgtagtcaagccccagcatatcataagtttcaccttttttaatgataattctacttgaaacgattttgtagtcaagccccagctctgtcatagttaagataacaagtaaaataattctacttgaaacgatttnnnnnnnnnnnnnnnnnnnnnnnnnnnnnnnnnnnnnnnnnnnnnnnnnnnnnnnnnnnnnnnnnnnnnnnnnnnnnnnnnnnnnnnnnnnnnnnnnnnnnnnnnnnnnnnnnnnnnnnnnnnnnnnnnnnnnnnnnnnnnnnnnnnnnnnnnnnnnnnnnnnnnnnnnnnnnnnnnnnnnnnnnnnnnnnnnnnnnnnnnnnnnnnnnnnnnnnnnnnnnnnnnnnnnnnnnnnnnnnnnnnnnnnnnnnnnnnnnnnnnnnnnnnnnnnnnnnnnnnnttttgtagtcaagccccagcaaaaattattatatttgtaatagaataaatctctcaacttaccatgatgaattgccaagaccgccattgcctgataaatcttcaaactggaaaaaatggattttgaatagaggtaaggtattgtgaaaaaaacaccaatgagttgagatctattacattttttggggaaatttaccttttaccatttaacacgttcaataaaatataaaattttagaaaaaccaaaaatattttcggcttcgttacatatatattgaatttaaaagatctgtaaatactatttgaaattacgccttttaaagagatgtctggcgtcccatatgactaaaagtttcatcagttcaagaattccaataagatttcccttttgaaagagatttttttgttttagaaaaatatggagagataaacgggtgaggggttgggctttaccacttgttttgtttataatttaaactataatgaaagaatgaagataacagaaaaagaaaagatattctattctgtttcaacttttttaccccgcaaaataattgactttaggctcttgaatgaaaagggaaaacatcccgagatttttcctgcggtacttctttttgcggacatctctggttttactgcaatgagtgaaaaatttgccagattaggaaaacaggggtctgaagaggttaacaaaataatcaattccttttttgaccctttaatcaaaattgtgtataaatggcagggtgatatttatcgatttggtggggatgcatttctgtcattttttccagaaaagataaccacttttaacgccagtgaaagagcaatcaatgccgcggttgaaatttcaaaatttgttaaagcccacagaacaaccaaaactaaattgggttcttctaagattaaaattcatattgggttaacaaaaggaaccatatattttcaggacctaaagaataattttttcctcggtggtagaatagtaaataatctgatggagatgattgacattgctgggccaggtgaaatcgtggtcagcccggaagttaagaaagatttgagcgatgttattttcaaaccaaaaaatggggtttggaaatatgtgggatttggaaaaaagttagcagaaccgaaattagagacattaaaattatcgactaaaataatcaacaataaatcgggcgagttggtgaattacattccggattggctcttcaaaaggattgagttaaaaccctattttgaccataaagacggcgaacataggaagattgccattgtctttctgcattgggctggtattccctatgatacaaatcctaaaagagcatctgagatacttgatagtttctataaggttatgaaacaattaacagaaaaatacgacggctggataaatacccttgattcttacaaagatagtgaaagggttcttgcagtatttggtttccctcatgcctatgaagatgacgaaaaaagggcagtgatgtttacctatgaaatactaaacaatcccaaattgaagttgctcaaattaagggctggaataaattttggctcagtctttgctgctccggttggtagtgaattgcgaagagaatatactatacttggtgatgcagtaaatctttccgcaaggctggccgcaaaggctgaggatagaacaatcgtcgtaagtgaaccaatatttaataagacatacggtatctttgaatacgaattcttaggggaaaaggaatataaaggtaaaaagaaaaaaataacgacctataaactaaccaaaaagaaaaaaatggaaaagaaggcattgggacgatggctctccgaaagcgaaaaaattgtgggaagggataaagagattgttagattacaggagttggttaagttatgtgcaaacggtaaggggcaagtaattggaatcatgggtgaaccagggattggaaaatcaaggttggtccaggagtttatcaaaatctccaaagaaaatggttatcaaatttgtgtgggcaattgtttatcctatggtagtgcattttcataccacccctggactcaaattctcactgatttttttagtattctacccggggattcacttaaagtgcgggcatcaaaaataaaagaaaaatgcacaattgttgataaaaaacttttagagtggttgcccgtaattggcgaggtaatgggagtttcgtttccagaaaataaccttacaaaatatttagatgccaagataagaaaacagagagtctttgatataatttttgactttatcaaatttattactcagacaaaacctgtaaacatagtaattgaagacctgcactgggctgatactgcctcaatggaacttgtaaattatattggccgaaacattgaagataagtcaattcttctcacccttgtatatagacctttaaaaagaaaagaagaatttttggaaaaagattggacaactgagctcaaattaaaagaactctcaaaagaagatagtctggaactggttaaaaatctgctcaacattaaggatattccagatgacttaaagagagtgataattacaaaatcacagggtaacccattttatattgaagaactgataaaatctctgattgaacagagttatatagtagaagagaaaaaaacctggagattcaaaggagatattaatagattagaacttccggatagtgttgaagcggtaatactatccagaatagaccgccttgatcttaaggaacgggatgtacttcaggtggtttcggttttgggtcgggagtttgatgagtttttgataaatggaatatatcctcaaccccagtatttaaagagggcactcggcaatcttgagcggtttgaccttataaaacaggagaaaagtgaggggcaacaacgttatttcttcaagcatatcctcacccaggaagttgcttatggcacactttcttttgcaagaagacaggaactccatcgtcaaaccggtagttttatagaaacccagttaaaggagcgaaaagaagaattccttggacttttatcctatcatttttatcaaggtgaagattatgaaaaatctctgctctattcggttgaagctggagaaaaggcgaagaaggtctatgctaatgaagaagcaatagaattcttcacaagagcaattgattcctacaaaaaattggaaaggaaactataactaagagatatcttattatatgataaaaaaagaaaaagcagaaaaattatattttgatgcattgaaaggccgcgcggaagtttataattttattgggagaaataaagaggcacttgctgacacaaattatctttttactctaacgaagataaaaaatataaaaaggcaggaagcagatgttttaatgttaatggcaaatatatacggaagcctgggtcaatttaaagaaatgcagaaaataattgagcatgcaagaaccatttatagaatgattaaatataaacccggtgaagcgtcagctttgattaccttgggtttcctttacgaacaatttagaaattatcaaaaagcaattgcctattgtaagttttccctaaatatcctgaaaaaaaccgataataaaatagaaatggcaaatgcatacaataatctgggaagtatttataattctttacgaaacttcaaagaagcgcttttgttctataaaaaagcactaaaactaagaagaaaaacgcacgataagaggggagaatcagaaagtcttaataatattgcctttgttatggaagacctctataattataaaaaggctcttcattattacaaatgctcattgaaaattagaaaagagataggttacaaaaatggcgaggcaataacgcttttgaacttgggacatttatacaaaatcctgggagattataaaaaggcagctaaatatcaacaagaaagtgcccgactattcaaagaaataggtaatatcagaagtttggcaacaatactcaataatcttggccaactatatcatctttcaggatcctctgaaaaagctattggatatcttgaaaaatcgctcacgataagaagaaaattgaaagatatttcgggaacggtatacaattttaagaatctcggttactgttatattgaccttatgaaattgagccgggcaaagaaatatctaaagcaagccctgaatagagcgaatattctcaggatgagatctgttatcccggagatacttcttggtcttgtcgaaattgacttgtatcagaactatctcgagtgtgccttggagaagatcaataaaacccttgaaattgctaaccagatttcttctaaaaaagataagggcagtgctttatgcgctctgggcagattatattcaataaaaaatgaaagggaaaaagcccagagatattttctaaatgcaatagatattcttaagaaaattaatgaaccctttattcttgctaaagtatattactattacgctgaaaatttgataagaaattgtaatagggcggagggtattatatatttaaaaaaagcaagaaaaattttcaaaaaagccgggaccgaagtctggttaagcagagtcaatgagttaatgactaaattacccaaggcccaatgactaaccaaagaaaacttcttctaatcaaagtatttcaggaaagggcatgaatgtataatcttattggtaaaaatatggttgcaatagaagatgtaaaaattggattaaggatagcaagaaattctgaagatacaaaggctgatgcactaattctgcaggcaaggatttctcatcagattattaagggacataaagggtggtaaagggtcaacacagtttgtaggagtaacttcaagtgctgagagactgtgtcagatagtggacaggagatttaaggaagcaattgcaaactttgaattgttgaaacaaccttttaaactgacaaaggtgtgttattattatgtttaagttaaaaaaatgtagcgtccgactccagtcagacaacaaaacaaaaaccattcatctaaagatggaggataaagaatatcttcaaaaggcaaggaagatttttgaaaagattgaggcaaaattatagctaaagaaaaccagaaacttgctcggtcaatgagcaaaatcaaaagaaaagaactgctaataagtgccctgcgcttgtatccactaacagtagatatttgagaattaccgaagggaatattgtcttttctatcattcccagggtggttttgatatggcattagtatattaccaatgctacttaccaatatcctaaaaagtgggaaacacttgggaagtccaaatttcccaggcaaatttggacatatttattttgacagggttgattgtgacaatacagccatgaagaatgaacttttaatttttttctgctgaacagatcaaaaattggtggctgttaaaaatttatcttcaggaagacttctcctatcctgttatgtattaaaacgattttgtagtcaagccccagctatgcatctattctttcccaactctcaactccaccatcaacagtataaaaaagcggatttgtcataattttattctttctctttttacacaatttttcaaaattttccttatccctttttttcaactttttacaaagatgtttgaattcgtactctatctgaccttttgtaacctttatctttctttcaattattcttttactttttatcttatttatatcgaaagagtatcccctttttttcgcttccaaatatacaaaatacaaaaaagattctatcgctttcaatggatctttgtaatttttgaacctttcaagttgtggatggttcttataaccttttgtctttccttcaagaacctttttcgcaagaagcccttccctccacaaagcaacaagcccaactttatctaaataacacggatgaatagaccacaacctcatatggggacggtgcttgacagtgtgacagtagtgaatttataaataaaaagtttcatttgtaaatttaaccatcatctgtttaattttctaaattcaaaatatgagtaaactgtaacaatcaaactcgaaatagcaactggtataattacaaaaagatatgatagatttttaaaaaatatacctataaatgcaaaaaatccagaaattttaaaaagtgctcctccaagtttgtgcgttttattccaaactatatcgttacttaaagtccaaggtgttcttataccaataaaccaattcctttttgttttctccaatataaatccagtatagaaaaacaaaattcctatagaaataggtattaaaaaattaggatttaatttgaaccctaaattccataaaattatctgaagatgaataacaaccataaaaataataaaaagcaatataaaaatatcatagtattttttaaactctaaaatatttttctttaaaggatcaattttaggtataagcaaaaataatacaaaaaggcccaaaagcgtaaatggcataaaaaataatccgaaaatttttgaagaatatccgttaacatctcccttttcgttccaatgtgtagccatagaagatggcatttcattgtaaaagaataaacttattaaaaaggtaatcaaaattaaaagaaaaataaaaaaatagaacctatttattttcatagagttttaaaaattttttagttttgttattagattcaattttattttaaaaattttttatttcaatatctttatctttttaacaatattcttatcaccatagatacatcttacaaaataaacacctgaagaaagattatgttttacttttatatttttatctttaaacacaattcctttgtatacctgtagaacttttttaccttgaatatctaaaatatcaatatcaacattattcatatcactatttgtaagataaagatctatttcatttccgaaaacatcttttgtaagatagaaggagaatttattcttttccattaaaactctcttcttttcatcaatagaagaataatcactatttttaaacaacttaaaaagtttcaaagtgttctttaatatatcatctggggttggatttatcacatatgctacagcaaaaacagctttttcattataatcaagatcaaaaggtcctgttgaaatgacaaaccttttatctccttcttcttctggcctctctgtttttccaggataacctacaacacctttcccccatttgggaaaagattcgtaagataaatcaggattg

SEQ ID NO: 2833 - DNA, 6008 bp, synthetic construct
  misc_feature 1..6008: note = Synthetic
  source 1..6008: mol_type = other DNA
gttgactgtattatgaaggattttctcaagttgtttttctctttctttccaaattttttggatcttcactttttcttcattgtatcctttttgtagttctaaaaaacctgttacaatagattcaaattgatttttaaactcaatacttgttagataatcatatacaatttcagatttttcctttttcccagtttgtatctttttttggtaatagacctgaattaacataaaccttaaaacaaaagcaactccctttaattcctttaaattacaaatccatactccttcttgttcaaaaaaactattttgtccaaatggaaaaacttctgttaccagaacaagtatatcagcttttttgtcaagattgtcctctttaaatttttttatccattctttgttaaagatttttgttcttttactttcgtaataaattttcccaatctcaacacctctttctaaaactgtttgcaaaatatcagcacctttttctccctttttaattggttcaataatatcttcaaaaaaactctcttttaaaagattctctatctctatttcctgtatttcaccttgtaattgaacagagccttgttccgcttttcttcgtgcttcctccaactgtttttttaaatcctcaattattttttctttttctttaactaacaaataatttttttcttgctcatttttttctataattgttttttctttatttatttgttctgaatattttttttcaaattcaagagttaattgctctttcaactccactttttccctttttaatctttcgatttcagcttttgttctatttaattcctttattttatctgttttttctgaaagttcatcatttaaattctttatctgttcttgataagaatattcgatctcttttttcaatctcttttcaatttcctttttttctatggaaagtttttcattaagctcttttttgattctttcttgaatattttctttctctttttcaattatttctctatcttctttcaacttttcttctttttccttatattttttttctaaatcatttttaagttttttttcaatttggaaataaaggacttcatcaacatcgatctcacttttacagttcggacaaataataatagattttcccatctttcctcctatttttaaaatatggaattaaaatttagtgataaaattcaaatatactccctataataattcgttaagataatccaattcaataaacctaaattaaaaagggcagatactggatctgcccgctggtccccgtagggactaacagttcggctttcgccttactgggacttgactacaaaatcgttttaagtagaattattaaaaattataaataaaaaaaactttttgtcaagggggagaaatgaagtatactcttggaatagatcttggttataactcaataggttgggcagtaatggaaaatgatgaaactggtctgccccaaaaacttctcaatactggtgtccatatttttgaaccatctatagaagaaattgaaaaggatggaaagggaaaaacaaaaaatgttaagagaagagaagcaagattgagaagaaggcaactttttaggaagacaaaaagacttgaaaggttactaaatttttttattcaaaaaggtttctttcaaaatcaaaaagatttaattaatgatcccttcgaaagggctgattttttgtatcaactcgataaaaagttgaaaaatccatatatattaagaaaagagtctctcgataaagaaatgagtttagaagaactatttagaattttttatcacatagcccaacatagaggttttaaaagcacgaaaagagaattagccaaaattaataaagatgaaaaaaagaaaaaagaagatggaacagttcaatctgaaataaactctttaaaagatgagatagaaaaaaataaatgcaggacacttggtgaatattttgcaatactttttgaaaatggggataagattagaggaaggcatactgatagaaaaatgtatgaagaagaatttgaaaagatattcaataaacagaaagaattttatccaaatattttgaatgatgattttaagaaaaaagtatataaacttatattccatcagagagaaattaaaagtcaaaaagataaagtcgggttttgccctcttgaaaaaggtaaaaaaagagcgcctctcgctttactaaactcacaaagatttagatatatgtgtaaagttaacaatctctctgttatagataatgaaactggtgaaattagagaattaactgttgaagaaaaaaagaaattgtatgaaaaattggaaaatagtgaaaaactcactttcgaagaaataaagaagattctaaatctttcaaatgatagatatcattttaattcagaaaaagacaaacacattttaggaaatacaactaatgtaaagatgaaaaaaattataaaaaattgggataattttgacgaagataaaaagaacctttttataaatgaagcaagaactattgtaaaaatagaagctctcgaaagaagagcaaaaaaattaggtttaacagatgaagaatctaaagaattttcaaaagttgtttttgaagatggttatttgaatttttcaacaaaagctatcgaaaaacttttaccttacttaaaagaaggtaaaaaggaatatgaatctatcaaaacagcttatcccaaaaacttagagcaaaatgataatttaaaagaacttgactttttacctccaataaaatcaaaagaattaaaaaaatattttgaagtaagaaatcctctcgttgaaaaagcattaactgaaacaagatatttaataaattttttgataaaaaaatatggtaaacctgaaacaattaaaattgaacttgcaagagaattgaaatcgtcaaataaacaaaaggagagaaaacataaagaaaatcaagaaaataggaaaaaaagagaagaaataatagaaaagctaaaagaagaactaaaaatttctgagccaactaaaactcaaattcaaaagtatcttcttgctgaagaatgtgattttaaatgcccctataccggaagatctataagcatggattctcttttcggagaacatccattatttgatatagagcatattattccttttgatagatcacttgatgactcttttttaaataaaactttatgttatgctgaagaaaatagaaaatttaaacacaataaaactccttatgaagcatattatggaactgaaaaatgggaagccataatagaaagagtaaaaaagtttaaatcaagtgttaaaaatgaaaaattgagaagattcaatatgacagaaaaagatttagaaaattatattcaaaatttttcaacacaaaatctaaatgatacaaaatatgcatcaaaattagctaaaaaatatctgggattactctatggttctataaatgaagatggaatagataaaaacagaaaaagaagaatttttgcaagttctggaaaagttacatctactttaaggtatgcattaggacttaatacaattttgaatgacgaaaatataaaaacaagagatgatcatagacatcatgcaatagatgctattacaatagcattaacagatagttcaatgataaaaaagatttcagatgcttcaaaaagagaaaaaaatattaattcattgttcaaagatttccaagccccttgggaaaattttagaaaagaagttgaagaaaaaattgaaaaaattaatatatcaagaagaataaataaaaaagtttcaggtcaattacatgatgaaactttttattcgaaaccatttaaaatagaagaaaaaaactatactcacaaaagaataaaaatagaagatttaatttcaaaagatcctgacaaaaaagattcaacttcaaaagctcttgaaaaaattgttgatagtaaaatcagagatattataaaaaattatttaaatggtaaaaaaacaaaaataatatccaaagatccaaaagaccacccttatataattcaaaaaaacggtaaaaaaattcaaatacataatgtaacaattaaaactaaatttgaaacatataatgaaatcggacccgataaagccaaaagatatgttaaatcttcagatagtcatcatattgaaatttttgaagatttaaatactaaagaatggaatggttatgttgtatcattgcttgaagcttatgaaagaaaaaagaaaaatatcccaattgtaaatagagatttaggtgaaggaaaaaaatttttattctctctcgctaaaggagaagtaattgaacttgatactgaaaatggcaaaagagaactttttgtagttagaattatttctggaagtaataatcaaattagattcacaagaataaatgattcaagaaaaattagggatattcctgcaaaaggattaactgctcttccatcatcattaaaagaacgaaattgtaaaaaggttgttataaatatttttggggaaaaacattattcaaatgattgaactttagatatacaaaatgactttaagagaatataaaggtttagaaaaaatcatagaaatatctgaaggacccgtaaagttaaattcagagtatgaacaacttattatttcaaaaaatgatgaagaaataggaaaaattcctataaatgaaatttctgtccttttaataactactcctattgcttcaatttcaacaaatttaatttcacttattacaaaaaataaaggaatgattgttgtttgtgatcaattctaccttccagttggggtctttttaccttatgagttaaattatattcagcaagaaagaataaacaaacagatcaatgcttccttgccattaaaaaaacaattgtggaagcaattaatatctgcaaagataaaatctcaaggtgctgtattgaataaaataaaagaatttgattttggtctatataatatttcagaaaaagttctttcaggtgatacttcaaaccttgaatcgtatgcttcaagaatttattttaaaaaactgtttggtgagaaatttataagagataaaaatttacccggtattaattcaattttaaattatggctatacaattttaagagcaatgacttcaagagcaatttgttcttcaggtttaaatccaacacttggaattttccatcacaataaatataattctttttgtcttgctgacgatcttatggaaccttatagaccagttgttgatgaattaacctataatttaatcataaaatcaggtattcaactatttttaacaaaggagttaaaaaggaatataataattgaacttttaaataaaaaattggaaatagataaagaaaaaattttccttaatgaagcattgtttagattatctttttctcttgttgaagtttactgcggaaaagaaaagaaattaaatataccaaatccttatgaaaaggaaagagataaaaactccaaataacagataccattcaatgtggcttttagctttattcgatttaccaacagaaacaaaagaggacagaaaaaattacagagaatttagaaatttattactcaaagaaggtttcgaacaattacaatattctgtttatgcaagatatgttggtgatgataagagatctgagacttttaagaaaaaaataagaaatgctgttccaccaaaaggtgaagttagaattatttcattaactgatattcaatttggcaaaatggaaatatattatcaaaattctaaaagaaaaccagaagtaaaacttgatcaacttctacttttttaactatataacaaaagtaaaccctctcttttatttaatttaagagagggtctattctacttgaaacgattttatagtcaagccccagctgatttccactaacaaaaataactcttgacattctacttgaaacgattttatagtcaagccccagctaaataaaactaatttataattttaaatttattctacttgaaacgattttatag

SEQ ID NO: 2834 - DNA, 23231 bp, synthetic construct
  source 1..23231: mol_type = other DNA
  misc_feature 1..23231: note = Synthetic
aggaagataaagtatgacagggagcctgtcttcgccggccgcctgcgccggccctccggaacccctcaacgcctcaccacggcccatgactgggaagacgtcgtgtccctcggccggctgccggcatcagaaaagccggcacgccccggctcgcccgcccgcccggcgccccggaagcccgcgccctcatcccagggcgacctcttccggcaatccgggcccagcctttcagaacaggcgctggcgggcttccggccgccccagggctggccggacaagccggacccaccacccaccgtgccaggcaagcggccgcgccgccggacagggatctgagcgtcatgggatcgatctgtctgcgcacttatctcgaaccggagcttgcccggaaggtgtcgaagcttgccgcaaggcagggccgttcggactcggccttcatcgccgcggcggtgcgcgccatgctggcgtcgggcgaagagggcccggcccgtgccgccggcgacagcctccggcgccagatcggccgcatcgagaacgaactcctgcggatctcgggcgagcaggcgatgcagcgggaactcttcctgacctacgtgcaggtctggctggagcataacccgccgctggacgaggcgatcacggaaagccttgccgccagcgcggacgcaaggctcgaccggttcatggaccttgccgcgatcacgctgtcccggggcggggcggcccaccttcacagtctcacagatgatcccgccgatgccgaaaccgaggaggcgtcctcatgagcgccgccgctgacctctccctgccggcgctccggcagcggagcgtcctcgacgcggcgctcgggcccgtgatcgcggccgcgctggccgatcccgctgtcgccgaaatcctcatcaatgccgatggcgcgatctggatcgaccgggccgggctggggctgcgggccaccggcgcccatatggctgccagtgaccgggagaccgtgatccggctgctcgcccatgtgggcggcgagaccgccggccccggccgcccgctgctgtcggcgagcctgccgggaagcgccgcgcgggttcaggcggtgctgccgccgttggcgcaggccccggtgctcgccatccgccgccggccggagcgcatcctcacgctcgaagattatctcgccgcgggtatcgcctcgccagaacaagtcgacgccctgcgcgcggcggtggccgcgcgggcgaacatcatcgtcgcgggcggggcagggtcggggaagacaaccctgctcaatgcgctgctcgccgagcccggcctcgccggcgggcgcctcatcgtcctggaggacacgccggagctccaggtctcctcccccaacactgtccagctgctgacccggcgcgccgccccggagatcactttgcgcgaccttgtccaggcagcgttacgcctgcggcctgaccggatcattatcggcgaggtgcgcgacggcgcggcgctcgacgtcctcaaggcctggaacaccggtcatcccggcggcctcctcaccgtgcatgcaaattcggcgcgcgacgcgctcgcccggctggaggatctgtgcctcgaggcgcaggccgcaagccccgcccgccttatcggctcggcggtggatcttgtcgtcttcatcacccgcacgcccgacgggcgtcgcatcaccgagcttctcgatttcaggaccgcaccgcccgaaggagacagagaatgaaccatcatccgtacacacccgcgaggatcgccaggaagtctgccctcctcattctgctcaccgcactcgcggccgcgccggcctttgctgccgggtccggcatgccctgggagacccccctccagcaggttgtcgagtcgattaccgggccggtcgcgcgggccgccgccgtcatcggcatcgtgctggcgggcattgccatcatgttctccgaagggggcgggggcgtgcgcaagcttgcctttgtcgggctcggcatcgccatcatgtttgcggcggtctccttcttcctcgatttcttcggctttgccggcggggcggtgctctgatgagcgagaagctgcccgagggctatgtcatcctgctccacacttcgctgacgcggccagtgctgcttggcggggtgccgcgggagtttgcaatcctcaacgcgacgctcggcgccgcgatcgccttcggtctgcagcagccgctgatcggtgtcccgctctgggcgatcgcgcagggggccgctgcctgggcagcggcgcaggatccctggttcctggagacctggccccgccacctctccaaaccctcatacctagaaagctgacagacgatgatggatctcagcccttaccgccgccgcgacgcccgcctcagcgattacctcccctggggggcgctcgtggcgccgggcataatcctcaataaggacggcgccttccagcgcacgctcgccttccgggggccggatctcgactcggcctcgctcagcggactgatgggggcctcagggagattgtccaatgccctgcgccggctgggttcgggctggtgtctgcatgccgaggcgcgccgccgcccggcgcccggatatccggatacggacttccggcatggcctcgcctggctgatcgatgaggaacgccgcattctcttcgagacggccggggcgcggttcgagactgcctatttcctgacgctcaccttcctgccgcccccggagaaagaggggcgcctcgaagccctcctctttgaaggcggggaggcggccgcgcccgccacagactacagcgcccggctcacccgctttgccgaagagactgaccaggtgcggagggcgctcgaaacgctcatgccggaggcgcgctggctggatgacgcagacaccctcggcttcctgcatgacgcggtctctgaccgaccgctgggccggctcgccgtgccggagacgccgttccatctcgacgcgctgctgaccgatgcgccgctgacgggcggcctcgcgccccggctcggcacccgccatctcagggtcctctcggtgcgcagcttcgtcagcgccagcgagccgggcttgctcgacaccctcaaccgactgccgctcgcctatcgctgggtgacccgattcctgcccctgtcgccggaggaggcgcgccgcgagatcgagcgggcgcggcggcgctggttctccaagcgcaaggggctcgcgaccctgctgcgcgaagagctcttccgcgaggaggccgccctccaggacaatgacgccgccaatcaggccgccgatgcggacggcgccctccagaccctgctcggggaaagctgcggggcaggctatgtcacgctgacgatcacggtggcggagagaaccgccgacgccgctgatgaagccgtgcagatgatccgtcaggtgacggacgggctgggctttgtgacagaggttgagagcgtcaatgcgctcgaagcctggctcgggagcctgcccggccaggcctacgccgatgtccgccgtccggttctcctgacgcccaacctcgcccatctcctgccgaccagcgccgtctggccgggagaggcctggaacgatcatctcggtggcccgccgctgatgctggcggcgaccgatggggcaacgcccttccggctgaacctgcatgcgggggatacgggccatacgctcgtcattgggccgaccggggcgggcaaatccgtcctcatcgccacgctgattgcgcaatggatgcggtatgaaggcgcgcaggctttcgtgtttgataccggccggtcctgccgcgccatggtgctggggctgggcggggtgttcctcgatccggaggcagaggacccggccctggcgcccggcttccagccgctcggccggattgaggacccggccgcccgggcctgggcggaaggctggctctgtgacctgatcgaagccgaaggcgttccgctgacgcctgagctgcgcctcgaattcggccgggccctgcagctcatcgcaaaacgccccgccccggagcgcaccctgtcactgctcgcagcctttgtgcaggacgggagccttcgcggcgcgctcgcgcccttcacccatgccgggcccctgggcgcgctgctcgatcaggaccaggaacaggcgggcaccgcagacgtgacggcgttcgaagtgggcgccctgctacgccagccccgggcggcgcgcgccgtgctgccggtgatcttccgcagtctcgcgcagcggtttgacgggcgccccagcctgttggtgctggacgaggcctggctttatctgaaggacaccgcctttgccgccgagatcgagacctggctgaagacgctccgcaagcagaatgtcgcggtggtatttgcgagccaggcgctcgccgatgttacgcgttcgcccattgccgcagctgtgctggagaactgcccaacccgaattttcctgccgaatgaccgagcgcgggagccggcgacccgcgccttctatgaagccgccgggctcaatgaccggcaggtgggtctcatcgcgggggccgagccgaagcgggactattacatcgccgggcgcgccgggagccgccggatcgagcttgagctcggccccgcgacgctcgccttcgccgccgccggccggcccgaagaccaggcgatgatcgacaaggtgctcgccacaaatggcgcagagggctttgcccggcactggctgatcgccaggggcctgccggaagcggccgccgccatcggccggttcgaagcccccgcccgcgatgaagcccccgaagccgcccacagcgaaacaaatccggagacggataatccgtcagaaacatcctcagccccgccagaggaggccgccgcatgactctcgcacgttcgctcttcaccgctctgatccttggtcttgccgggccggccgtcccctgtctcgcgccgtcggccgccgcgcagatcgtggtgcatgacccggccaatcatgccgagaacctgctggcggccgcccggatgctcgaacagatcgagcatcagatcgccgcgctggaacaacaggcgcggatgctctcgcgcagccccctgcagctgtctccggatcttgcccgcacgctcgatgaggccgaaacgctgttccggcgcggggaaggccttagccatgacatcgcccgcatcggcggcgagatcgaggccctctatccgcagacctgggcggcgtatgatcttgacggcgtgatcgaccagtctgtccgctggcgcgcagaaagccgggaaagcctcgcgcgcgccatgacggcgcaggcccaggctgctgcccgtctcagcgagacgcgggggaggctcgacgcggcgctcgccgcctcagcggcggccgaaggtcagacctcggcggtgcaggcgggcaaccaactcgccgggctcagtgcggcccagcttgccggcatcgaggcgctgatgatcgccgaggggcgcgccctgcaggccgagcggatggaacggctcgcccgggaggcgcgggccgaagacatccgcctgcgggcgtttccgccagcgcggccggcgcctgcgccgcccgcgcgccgggccttctgaagggaggacgccatggagaacaccatcctcaacggcttcctcgacagtttccttggcgtgctcgacgccggcttcgggttcattgccggggacgtggcctatgtgctcaacgccctgatcgtgatctcggtgacgctggcgggcgtgcaatgggtgcttgcccaggaagccgcgcttgggcccttcttccgcaaggtggtgttcaccggcttcttcgccttcctgatcaacaactggaacgatctggccggggcgatcaattcttctggcgccatgatgggtctgcgggctgggggcagcagcctcaccctcgaggatctccatgacccggggcggatcgccgggatcggcaccgaactcttcgggcggaccgccgcgctcggggaggggatgaacatcatcaccgattttgtgaccctgtcggtggtgttgattgcggccatcatcgtcatgctcggcttcttcatccttgccctgcagatttttaccgccctgatagcgttcaagctcggcacgctcgccgccttcgtggcgctgccctggggggtgttttccggcaccgcctggatcgccgagcgcccgctcggctgggtggtggggagcgccgtgcgcctcttcgtgctggcgctgatcgcctcggtttctatcgcttttgtcgacggactgccgcccgaactgacgctgaacgcaggcggcgcgctcaatgtgctcctctttggactgacagtgctctcgctcgcctggttcgggccccagctagccgcagaagtggtggctggccagccccatctttccggcgccgatgggttccgggccgcgcagggcgctgcggcgaccgtggtcgggaccgccgtcagcgcgcgcatcctaatgggcggcatgggcgggaagaaggaggaaccggccggggcgtccgacagaacccgttcgccctcggaacgtccccgcgttgatcattcgaagatccagcccaaacccagacccgccagaaggagatcctgatgcgctttccgttccgctccccggccatctcttatgcgcccccgccgcccgacacgccctaccggcgcgcgcaggctgaatgggatgcgcgcatgggctcggcggtcctctcggcgcgaagctggcggaaggtggcctttgccgcgctcgtcctggccgccggtctgggcgcggccctgatggtcgtcgctctgcagcagcgtacgttcgtgcatgtcgtggaggtcgccccggaaggccaggtcctttcggtgcgcaccaatgccggccgctggacgccgagcacggcccagacggcctacttcctcggcgcgttcgtacgccaggtccgcagccgcccgaccgacgcggtggtgatgcgggagaactggctgacggcatataaattcgtgacaccggaagcggccacaaaactccatacgatcgccagggacgagaaccccttcggaacggtcgggcgcgcggctcgcacggtccatatccgctcgatcgtccagcgcagcgaccagagctggcaggtcagctggaccgaagaggaggcaggccccgtcccgctcgcgagcggatcctggacgggcctcttcacggtcacccatgtgcccccgcgccgggccgatgacgtcgctgtcaatccgctcggcctctacatcaccgatttcagctggagccgcgaccaatgatgcgccctctcaccctccacgccctcgctgcaagcctgctcaccgcctgcgccacaccgccccctccggtgattcgcattgaaccgcccttcacggaggcttccgaaggccttggcgatctcccggaacccccactgccggcagagccggtcccggccgaagaaatcccggcgctcatgccggaagcgccgtccacggaagacctatctctggcgcccgaaccggccagcctgaagccggaccgcgctgagccggtcaccccgcgcgaggccgccaggatccttgccgaggccaatagcgccgcgcgccagcgcgccgccccgggcgcgttttccgaggcgaccctgctttatgcctgggagccaggcgccatctatgagctgcagacctcgcccgactttgtctccaccttgctgctcgaaccgggggaagtgctgatcgatattgcggcagctgataccgcccgctggagcgtctcgaacacgctgtcgggagaccgggccctgctgatcgtcaaaccctccgccccgaaactcaagactaacatcgtgcttgtgactgaccggcgggcctatctgatcgaggcggtctcagcggccggcgaggtctatacagcgcaggctgcctggacctatccagccccacccgcgccgccgcccgcaccggaacccgcgccaaagcctgagcccccgccacgccagatccatgaggactatgtcctcaaagctccgcgcaagggcccgccgccctggatgcccgaaaaggtctgggatgacgggcgccggacatatgtgcagttcccggaggatattgtggcttccgatatgccgccgctccttatccggaccgccgaaggactcgaactcgtcaactaccgcatcgatggccggagttacgaggtcgaccggatcttcaccgcggcagagctccggctcggccgcaagaagccggtcgtggtcaggatactgcgccgcccgccgcgtgagacaggggagggcgcgcgatgacggatactgcccagctcactccggccgaagaagccgtccgcctgcgggcccggccgccgtcaccgaagcggctctcccgcaaggtcctgctggccggggcaggcacaatcggcgcggtgatcgtcatcgcgctcgtgacggggctctcgccgcgttcccgggccgcgacaagccgcgccgataccgccccgccggtggcgaccgcgctgcccgaagggctcagccgcctgccggcccggtacgagaccgccgcgctcacgccgccgccccgggcagaagatgagccctatgactggctctggggaccggacgggccacctgagcatctctatacggatcaggaagagctgaccctccccgaaggcagcggctgggacacgcctcactccaaccgggatgcctataccagctcacaagtttcccctccgccgccagcccccgcagcgcttttcttctcccgccgggacctgccttcggtccgttccgtcgcagcagctgaaagcgccagtgcagggaaagctttgtctctgtcacccggccagatctacctgaccgccacgcccgctccaccgccggggccgccttttctcttgcaggccggcagcgtcatcccggcggcccttctgacggcggtaaactctgatctgccgggccgcgtgatcgcgcaggtctccgggcccgtccatgacaccgtcacgggcgatcatatgcttatcccgcagggcgcgcggctgatcgggacgtattcgagccaaaacagctatggcgacacacgtgtgttcctcagctgggaccggctcctgatgccggatggcagctcgattgtcctggcgcagatggcagcgaccgacggggcaggggccgccggtctgcaggcccgggtcgacaatcatctcggacgcctcggcggcgcgatcgcgatttcggcggtgctcagcattctcgcgaacgaagcggaaaacacctctgacgggcggttcacccgcagcctcggcgacgcggccgcccaggaagccgcccgtacggggagccggatcgtcggccgcgaactgaacctccggcccacgctgcgtgtcccggctggcgcgcccgtccgcgtcctcgttaccgacgacatccttctcgagccctatacggagtaaagtcatgcctgctcgcaagcccgaacccgcctcgcagttcgatctgttttcagcgaggccagaaccacccaagcgcccggcgcccgcgacgccgccacccgagcctgcaaatgacaggcgggcgccgcctgagcgaccaaaacccgcgccggtgtcaaacccgctgcctccggctgccgacgaatggtggaccacccgcatgacctgcgcgttcctgaaaatcagccggaagacgctctgggaaaggcggaaggatgagagcctcgggttcccgcaacccgtgcagctcgggggcgcgcggaatctttatcgtgcgtcggctattcggagttgggcagatgccatggcgcaggaacagggcggagcagcgagtccgtgagaggagataggcgacgccagcgcgataaggacgttcagcactacccagcttaaaacagaaagcaaaaaggcggcccgcgggccgcctcaatctggtgcgagtactcacttattatcggtgaagactctgtcgagtgatttgctaagaccttttcttttctacctttccgcgcttatgtcaagttcgatttagaattcgagggggcgcaaatggcattgcgttatgcttatgattttggctcaagctctataggttgggccattttccaaactgaagacggcagaccatgtcggttgatcgatttgggtagcagattattcgacgatggacgcgacccgcaaagcggggagtctaacgcgaaagcccgccgcgaaccacgagccatgcggagaagttatgaccgtcgtttgcagcgcaacaaatacgttatggatgttctggttcaactgggcatgatgcctgtagaacaagaggcccgtaaaacagcgatcccactgtctccgtacgagatccgcgccaaggcgcttctggaagcattgccacttcaccatcttgggcgcgcgttctggcatatcaacaaacatcgcggcttcaagagcaacagaaaagcggatgtgccggacgaaagcggaaagatcgcgtcagctgcggaacgattgaatcagaaaatgcaagcaatgggttgcgaaacctatgggtccttccttgcagcccgccaagctgacccggacgtcagaaatcgtaagcccacgcgcatccgccaaaacagccacatcaaggacgaactttacgagttttatcccacacgggatatgctggtttgggaatttgacctgatctgcaaacgccaacgcggttttaactccggctttcctgacgaggcacagattgcgcctctgcgtgatgcaatcttctggcagcgcccactcaaacctgtcgatcccggcttctgtagcttttttcaagaagaagtaaggctcatgaaggctcatccgttagcggaagaattcattgtataccagaaggtcaatgagcttcgcatcgacgatgacgaaggctacccgctcccgctaaatagagaaatgcgcgatcaggttgttcagcagcttctatcaggaagagatgtgagttggatgcagctaagacgcatagtgggcctcgggaaggactcaggacggataagtctggaggaagggggcgagaagaaactggaaggctcgtccatggcctatcgattcaagggcaacaagaagcccggaccatttgctgaaacctggacggatatcagacaggaccggcaaaaaattgatgcccttcttgctgcttacaaaagttcaaacacagattccgagctccgggacgcccttgcgcctttgaatctgggggacgcggagatagaactagcgatgaagtgcagcctgccagacggtcatttgatgatctccatgaaagcggtcgacatgatcttgccgcacttgaaagcagagatcatcacctatgcagaagcttgcaaacgcgcggggcttcatcatagcgataaacgcgacggcgaagtcttcgacttccttccgtattacaacgaaattgatagcatgaggcgctttctggggcatgggacgggcgatcctgatgacccacgcgatgtccgatatggcaggatcgcgaatccgacggttcatataggtctaaatcaactccggcgtctgattaataccatgatcactcagtacggcaggccggacgaaatcgtgcttgagctgtcgcgggaaatcaaaaaaagcaaggctcagaaagacagggccaaacgagacaatcaacagaaccgcaaagcgaatgatattcgcaaacgagagatggaagagattggcttttatagtagaggcgaccgcttgcgcacgcgcgaagctctcgagcgtatacgcctttgggaggaattaggacgcaatccaaatgaccgcgtttgtccgtatagtggcaaaccgattcaaagcctttcgagactgctctcagacgaggttgagattgaacatatcctgcctcgctcgatttcccttgatgacagcccggctaacaaaactattgcgtatcgtgaatggaaccggctcaaacgaaatcttaccccctccgaagcggcccagagttttcctgaaaaattcaatcaggatgacatgatttaccgtagccggaatatgccgctgaacaaaaaatggcgatttgggccggattcacgggaaaggcttggactggaggacaagtggcaggataggctcctaaaggaaactcagcattttggagttgtggcgggccattatttgaaaaagctcgcgcccgcagatgtgaaccgcaaggaaatgagcgtctgggtgacatctggacggctgacatcagaacttcggcggaaatgggggttgcatacgggtactaaccagaaaaaccggaacgaccatcgccatcatgcccttgatgccgctgtgatcggcgtgacagaccgcagtcttgtcaacatcttatcccgcgcagcggcccaggacgaagtgcaggcatttgcccgggttctggcagatatccctgagccctttgacggtttcaccgatcaagtaaatacagctgtaaaaagggtgatcgtctcccaccgccccagtcatcgcgtcgccggaaaactgcatctggatggagcatacggcaaagttcgggagaacctcactaacattgaacgcggcgaacctgcccgcggtaatctcgttgtccggcgggatatcctctcgctgaaacctaatatgattgagcaggtgcgcgatgagaaagtccgtctggcccttcagcaggtgctttacgaggcgaagcaggcaggcgggagtgacaaaaaggattttgagaaggtactgactgagggactggctgagtattcgcgccaaacgggaacgcgacgcgtgcgctgcctttatccgaaagagaacgccattcccgttggcaagagcaagcagggggagcgatacaagtatgctattcccgcagaaaaccatcacgtcgatatcgtcgaactgacgaatggtagctggcaagccgtatgggtggatattttcgaagcaaaccagacgacgctagcagagaggaaggggcaggtgcaaccaccaagatggcaaactagatatcccgatgccagattcatcatgcgcctgcataaaggcgataccttacagctgttcgacgatgataagataaatcgcgttaagattatcgtcagtctgcgtgcttcgttcaatagtttgcaactggctgagcatttggaagggggtgttttgcaaaaacgccacgacgaccaggatgatccattccggtgggacttcgcaaacattagtaaattgaaggatcgacgcgcccggcgcgtacggattgatgagataggccgcattcggacagtcaatcacggctcagtctgatctggcccgaatattgcagattcttccaaaagatgcggggaatctgtatgggtcgtatcgttgaaattacaaatcctggccgatccgtgcataaggaccacggatttttggctatccgggaaggcgggcaaacgctgggccgcgtgcctcttgatgatattgacgcggtgatagctgcatcacagggtataacttggtctgggaccagtctgacggcccttgctgagcgttctgtacctgttgtctttgtcgggaagaactttgcaccgattgcacacatcttgccgcttgccgcccatcataatcaaggtggcatcatgcaggcgcaggctgatgccaaacagcccgtgcggaaaaggctttgggcggacatcgttcgtcgcaagatttcggcccaacaggcggcacttcagctctatggcctcgaaagcgcacgactggctaagctgaagttggatgtaacctctggcgatcccgacaatcgcgaagccgcagcggcgcaatattactggcgcacattgtttggcgaagatttttctcgagaccgagtgagtccaggctcaaatatcgccctcaattatggctacgcgattcttcgcgccgcgacagcgcgcgcgattgtagcttctggcctcaacccttccctgtccgtacatcatgtcagtgggggagatgcgctgcgtcttgccgacgacttgatggagccgttccgctcggcaattgatattacagtgaaggatatgaggctcggcgcaacggacgaattgactcctgttttaaaaaccgagctggcggctgtcatgctggcggactacgcgacggaaaacggtcggacccccttgtcgcaagttctcgtccgtctcgcgcaatccttggcgcgtgtctatctggggacggataaacgtctcgattggccacatagcgatatcccccttcctgtatctgcaaacgacataagcgaggagacatgggacagcgttttaccgtagtctctgcgtatcagatcatgtgggtatgggctttatttgatcttccggttacgacaccgctagagaggaaacgcgcaacgcgcttccgcaaagatcttctcgatatgggttttgagatggtacagttttccgtgtacactcgtttttcggccagtaagcggcgtgcagaagccctggcaaaacgggtcggagcgctcgtgccgcccgatggcaaagtggacatcctgttttttacggacaagcaatatgagcttattcagagttacagaggccaatccagtcggtcaaacagatcaaaaccagcgcagcttgagctattttgatgggattttctctagttttttgcatcacatgtcgaagaaaaacccgctatatcaaagcgatatagcggatcagtcttagcagatcactcgacagagcccaaccggaacacggcacgacctttggcagacacgtcatcagtcttagcagatcactcgacagagcccaaccggaacggggagattgagcgcctgcaggcgcagggcgtcttagcagatcactcgacagagcccaaccggaactgatgatgcgggcgatcctattttcactgcgtcttagcagatcactcgacagagcccaaccggaactgtgggttatggcggggcggttcatcaggagtcttagcagatcactcgacagagcccaaccggaacaccagccgccgcacccaggaccttcaggaggtcttagcagatcactcgacagagcccaaccggaacgatgaccgcgatcacgcgctctaggctctcgtcttagcagatcactcgacagagcccaaccggaacgaaaagcccaaggacgcggccaacgagcaggtcttagcagatcactcgacagagcccaaccggaactaccttggctaccgcctgatcacgggggccgtcttagcagatcactcgacagagcccaaccggaacacccgctgatggctggccggtcgcgtcaaggtcttagcagatcactcgacagagcccaaccggaaccatgttgtggggcgtgttttcacatatccagtcttagcagatcactcgacagagcccaaccggaaccatcttcacccggccccgctgacccggcacgtcttagcagatcactcgacagagcccaaccggaacaaccaggagagagatgatgggtgaggtgaggtcttagcagatcactcgacagagcccaaccggaactgccaagctgaggtatcgccgggacgttccgtcttagcagatcactcgacagagcccaaccggaacggatggatcggcatcctcgccggttacggcgtcttagcagatcactcgacagagcccaaccggaacaaggggctcctggagttcggcaatgggaaagtcttagcagatcactcgacagagcccaaccggaacccgctgcccgcctcgccggtcacccagcccgtcttagcagatcactcgacagagcccaaccggaactccgaagtggaccgcctcagagcagaaaacgtcttagcagatcactcgacagagcccaaccggaaccgtaaaacagcaagttggaaacggggggtgggtcttagcagatcactcgacagagcccaaccggaaccatacttttaagcaaggctgcggtagcggcgtcttagcagatcactcgacagaggccaaccggaaccttgtcagcgcgggcgcgttcggagaagtagtcttaggagatcacccgacagagcttgacccaacccttgatccgggcggtcaatttgtaaacaatcttccgctatgatgcgagtatagctcgaaattcagacgcctttttcagcttcggcctgtagccgcgcgagtcgctcggtgcaaagctctcgggccatggcaatcaactgctcgatatggtcagcctgccaggtgaggatttcctgcgtggtctcataagagggtgagtagcgtgcttcgacataggcgcggcgcaggagctcgaaataccgcttgtagggcctttgaggaggaccccatgcgtcttcaagacgaccatcaatcgtgcgggcgatgttccgtaactttgcgagatggtgggtgcccggtgcgtaaagggtcgtggtcagcaggaacatgcggtaagcgctctcggcggcttggtggagttggaaggccgcaaagtttcttgtttctgagtcctttccttcaaggtgctgcttgcccgttgcaaggaacaactgggcggacttgctccagctttggaaatatttttgagctgccacgtatgctctatgcgcatctggcgttgcaggcttagcgagccggtttttcgaatcgccattcttatcgggctccccgtcttcatagagcaggatgccctgctggatgatctctgagaagaaatactgaccgtccttgagctgacggtttacgtcctgcagggtgtggacgatgatggagacatcccgtttgacaagcgggtcagtgtagaggtggtcttcgacctctccccagaaggcactcatttcggtgagggcttcatggctgacgatggcgaggaggtcgacatcggaggcgcgcccggaccggctgtcctcaaaccaggtaccttttgcgaagcttccgaacaggacgagcttcagaagacggtagcgttttgcgcgggctttgccatccgctttgatacgggtctccagctcctcaaggatgacctcctggatacgggcaaattctgcctgccgggcaggggggagatgatcgagggaagtctgcaacggctcgggccttcgggtatctgaaagtattgcgccattctccgaaatcggggcggccctgtctattgcagattgagatcctctgggaggttgttcgcgggtttcggatatggatctggtttgccctccagttcccacgaacacggccgtggtgtctattgcctgacgcgccattgacggtattcagggaggggtgggtcggcgcagcgataagaacccccgttcaaaacctgcgccccgttgcgcatgcttcgcggttttccgacggcccacacttttcctttcagggttgcgtttgcgatcaacttttgtcagattccctacagcatctctccggaggggctcggggcgtcggaaaccccgccagagcatgagtctgtcccaacgcacctgattttcgcgaacggcttgcctgtgcctgacgtatgacgctgccggccggagtccggatcaggatgcgcagggcgtcggaaaccctggagaagcgtgagacgtgtttgcgagcgccttgccgcaaatccctggtgcttgtctgacggtccggcatgaactggcagggaggacgcgcgatggcgccggcagacaattgcagaccagcagcggaggcgacagggaaggctgtcagcgcgggcatgctgccccaatccgtatgcggatatgaaggtgtgcagcctgattttcaagcactgccgctcacacggctcttccgcagccagtaccggcagttggtgcggttctgcaggatccgggttcgtaaccaggcggatgccgagaacattgtgcaggcggcgttcctgaatgcgcgccgcgcctatccggacaaggggatcgaggagctcaggccgctcctgttcacgctggtacgcaattgcatgttcaattttctcaaatcagccgatcaccggcgacagcaggcatcccgcgagatcggggaggtagcagatcaggtggcctgccagaggatggtcagtccggagcagcaggtgatcgatgccgaacgtctgacgctcgtcgaagcgctcatggaggcgatgtcggcgcgccgacgggaggcgctgcgcctccaccggttggagggactgacgcataccgagatcgcgacccgcttatcgatcccccgccagaccgtcatgatcgatattgccgaggccgtggccgaactggccgagggcctcgcgcgcgcagagggagggcgtatatctcgtccggaagcgtccgcgaacaggcccatcgcgcgcaaggcgtgcaaatccggtgtcgtaaatggcaaataacggtacccgagagtgtaattattgcgcatttcagatgcgtgaaaattattgacatctgcgacggccagcgtaattaaggcgcatctgagatgcgagataattacatgctgtaccttgttggcgagaatattgacacggtcacggctcatcgcaaggcccaggcgggtgagctccttcaggtcgtccggggggtataccttgatgctgcttcagatgttgaccagctcctgcgggagtttgctatccgcatcgcccactacctgtatccccatgcgtacctgtgttcggccagcgctgttgatctcgcccctacggcggacggccgcctgttcctttccgggcgcaggaatcaacgcacccggctgcgggcgctggagattgttcaaacccaggcccctccggcgccttcgctggatcgcgccacaatcggtgatcggctgggcgaattcaccctgcgcgtttcttctccggagcagcgcttcctggaagccttccggctgcgcagtgagcaggccagtgcactgaccgagccgatgcgccgcgcaatcgccgagcgcctcatcgcaggacatggcagtgccgatcaggctgcagacgtgctgtggactctctcgcgcgccaaccagtggtacagggaaggggagagcgcagagcggtatctcaaaggacaccgcccggaggtgcccggcgtcaggaacctcgccgcgttcaccctggaggtcgcctggcacggcgcaagcatcggcaggctgaagcatgatggccatgagtggcgctggcagcctgggaacatcgacgggccgatcctcgtgcgggacccggtgcccggaacactcccgccctttattgaatctctgcttccggagggttggcttgcaaccgttctgaatgacgaggaccagcgcagcgctctacgccatgggaggcggtacctgtcgaacataacggtcggggaatcggccgccgccctcgccgctctgcccgcagacatactggcaggcagtttgcccgtcttcaccgaagacggcgttttctccggcacataccggggacccggccggggccacctgaatgaaacatttgaagctaacctggcgcgcctcttcgccgacaggaccacgccgcgcctttccggtgtgcagatcaaagcgcctatgttccttgatcgcgagggcatgcttattccggccacggaccagcccttcacccatattctgaaaccggcggggacgtcgggattcgaacggatgccggttgtggaatggctgtgcctgtccctcggcagggccgccggattcatcgtgcccgacttcgccctggtcccaatgccggacaacatgccgccagcgctcctggtcgagcgatttgatatccgacaggacgaaaaggacaggcggaggttcgctcttgaagatttctgctccattctcgggcttcctgcagaagataagtacaaggggacgattgagcgggcggcccgcagcctcaggccgttgtcgacaagcccggacgaggatctcctgaccctgtttgagagggctgtattcgcgtggcttgtggcggacggcgacatgcacctcaagaacattgcggtgctgaagattgcgcagggcgcgggtcgccgggactttgccagtgtccggatggcgccgctttatgatgcgcttaccacgcgggtctttccaggcttttccgaagatcgcatggcattgaaactttccggaaaggacgacaatcttcacgcccgcgacttctatacgctcgcgcgggttatgggcctgtctcaggaaacggcccgcgcgtccctcacgcgactggccggcgatctgcacgatgctgtttcatcaaccgcgttgccggatctcatagcatgcaacagcgatgccgctgcgcgttcccggaaggtcctggaaattgtgcgggaacggagcagtgatctcaagatccagatcttagtcccggattaataaccaacggaggcctgagatagctctctggaagtgcctgctttttgcagcctgataagcggcaccaaataccagaacttgttccggctgtattgattacgcttccggagaagacgccgagccgaatggagagtggttgaggatgcaggcaaggacctcgtcgcgcacgccgcagcggtccgactccatgatgcggacgcccgtgcgctgcagttcgtgggccgtgccttagtcgatgtcgagcttctcatcgatcctgctgacagcgcgcgtgacgacttaacgacccgcagcgggttacttttccgggagcaccccgtatgcgtcaaccttgcaacaacgcctgtcgcaccaacggcaactgatcattcccgaaatacatcctggatccgtccaggaagagggtgggcgaaccgaacgcgccccgttcaatagcctcatctgtgtgggcccggagccggttttttgtctcttgctcctgactcttcgcgacgagcgcccggccatcaaatccggcggaatccgcaaccgagatcagaacatctgtatcgtccagatttctttgatcgccgaagtaggcttcgaatgctgcatttgtaaaccgaaacagatctgcctgctgatcttcaagaacgcagcaacaccgcatcgcggcaacggacttgaggggatggaacgccgaaggaaagttcatgggcacatttgcgagactcgcccactctttcagccagacccagctattgcgatatctgggcgactccatatcggcacgcatctggtaaactgtctcatttacggcattgaagacgccgccgacgaggaagggccgccagaccagggtcgcccccgtctcctgcgcgataggctggatgttctcgaatgccagtcgtgtccagggcgaagacaggtcaaagaagaattcgatttgtggcatagatggctcttccggggtggcggctgactttcgaaggatgtgaccagagatgatccgatcagtggacaaattatcccctcgtcaagaaatacagcgctgctaaaggaaaacgactaatctctggcatagcgacgtgcttgctctgaaaaacatatgcctccaaggaatttggatcacaaccatataaaacgagcgttctaaattttatgtgattttcgagtgggactctctcacagtatgatagattctcaatttttcagctatgcccttacgaagggaacgcgtgagagcttagggtctcctgatcggggcctatatcgcagaggatggtgcttcaaattgatcgggcgctcctcgcatccgggcaagcaacaggcggatcattggctgatgcctgatcctccatgaagaggcacacaaaacgactttggcagaatgctccagcccatcaacgagcacagcccagtcccgaacaagctgccggtccatccctccgcaagtttctattcgcatcgcaggcatcgaagcatcgcattattccccgatcagtcgcgcctcggaaccggcaaacaattcggtcagaaactgactcaccgcgcggatccgggcgagtacgtgaacgtcttcatggatcgtcagccagaaggagcgttccagccggactacatccggcaggatctgtacaagctgcggatcattcgcggcaaggaagtgcggcagaacggcgataccggcgccggcgcgtgtcatctgccattgggccacgattgaaggactgcagtgtttcagggtgaggcctggcatgatttcttcgtggtagcgaagctgcgaagaataaatcagatcgtctacatatccgatcagatcatggctggccaatccggtgacgtcggggatggcgccgcgtcccttaaggtattcgggagaagcgtacaggtgaagcgtgtagtctgataacttcctcacgatcagacggcctgcctggggccgggtcagcaggattgacatgtctgcttcccgtttgggtacacttacgaagcctgacatggcgatcaggtccaggccgagtcccgggtggcgcgctgagaagccggcgattgccggagcaatcatcagggtaccgagtccttcaggtgcaccgatcctcacacgtcccgtggcctggggaccttcgcgttcagagatagccgagacttcagcagcggcctgttcaagcgcttctgctttgcgggcgatcatctcgccgtcgcttgtcagttgatgtccctttgccgtgcgctcgaaaagcgcaagcgagaggtcggcttccagccgcctcaatcgccggcttatcgtggtcgggtccagtccggtccggacagatacgtcggcgagcctggggtgccggctcacttccagaagtaatttcagatcatcccagttcattttaaagcgcctgcaaaaacgcagccaaagactgcaaaaatcaacatttaacggagattaagaggccgctagtcttcggtcaaagcgaaatcatcaagggagatggcagctatgggcgaggtccatcatttcatcaacggcgtggcagtggccgggacatcaggccggtttggggagatttttgatcccaacacaggcaaggttcagggcagggtggcgcttgccacgaaggcggagctgggcgcggcggtggatgcggcgcgcgcggcctttccggcctgggcgggtaccaacccgcaacgccgggcacgcgtgatgttcgagttcaagcgcctcgtagaagccaatatggatgagctggcctacatgctgtctgtcgagcatggcaaggtgattgccgactccaagggcgacgtgcagcgcgggctggatgtggtggagtttgcctgcgggatacctcaccttttgaagggggagtataccgaaggggcggggcccggcattgatgtgtattccatgcgccagccgctgggcgtgtgcgctggcatcacgccatttaactttcctgcgatgatcccgtgctggatgtcggcggttgccatcgcttgtggcaacactttcatcctgaagccctcggagaaagatccgtctct

SEQ ID NO: 2835 - DNA, 12430 bp, synthetic construct
  variation 6364..6415: note = note, n is a, c, g, or t
  variation 12295..12307: note = note, n is a, c, g, or t
  misc_feature 1..12430: note = Synthetic
  source 1..12430: mol_type = other DNA
aaatgctcgatgtcgaggacggcagcgttttgtgggtcggcaacggttccggaacgcaaggcaaattgctcggcacaatccttggcgcagcattaggcgcgggagcaggcgttgcagccggcggagatgacaagagcgataaaactgtaggcggggtaatcggcggagtcgtcggcggggcggcagggaatctattgacgccgcaacagtcaaaagcggcggaaaatatcatagctaaaatctgtaaggatatgccgggacgattgccggagacgaaaaagaaattacttaattggtgagaagggatagccgctaaggcatccgctgacgctaataaaaaggtttaccccacaggcctttttagaacaggtgagcaggagaacagttgaacaggtgaaaaactcgcataaaaaaggcgaggccaagcagcttttggtgtatggtcgttggtatttaggaggaatttttgtggacaaggcgggttgattttggtagtattccagcggacaaacacagaaagaaaaatcaagatttgaaacatagaaactatgttaaaaaaactgacaagtcgtttattgacaaagggtaagataaaaaaggagcgattagttttaatcgctcctttatagttataatatgaggagatgtcaaagacagaactccgcatcttccgaagaagatttattataacttgctctcaaaagagagtataaaataaccggttaaaaatatcaagaaaaaaatgaggtgaaaattgagtacggaaaaagtggttttaggattagatgtaggggtatcctcaatcggctggggaatagtcaaacttcaggaaggaccatatcaatctgaaacagccgacgggaaaccagataccaaacctaaaattgtcggcggagaaattataagaaccggtgtaagaacttttcaacttccggaagacagacagaaaaaaagtttagcacttattcgaggctcagccagaaggacacgcagaacaataaaacgcaaagttcagagaatgaatcggcttataaaccttgccaaagaatttaaactcatcggcgaggattttgacagagacagtatattaaagccccaaaaaggtactaacaaaaaagagaaatgggatatatggcttatacggaaagaagcacttgaaagaaaattaacagatacggaactattcagagtgctttaccatatcgccaaacatcgcggggcatattttcataccaaagcagaatttctgcccgaagaagatgaaaaggaattaaataaaaaccaaaaacagaaaaaagaggaaagcaaagaaggaaatgaaaaagagaaagttaaaaaggggcttagaagaatccaaaagatgttaaaggacagcaagtatagaaccataggagcgttgttctatgaaatgttcaagcaaacaaacagcaaaggaagtaataaaaaaaggaatgcccctgataaatatgaaaattcgatacgtcgagagcttctgtgcgatgagattgtagaaatttttgaaagacagcgggaacttaaaaatccaaaggcagtagaagaattcaagcatcgctatatagatgatattttgatgcgtgaaaaagaagtcgatgaagacagattgcgaaatatgatgagccggtgcgaatttaccggtgatttgtgtgcaccgaaagagagttataccgcagaaagattcacattgtttaacaggctgaatacattagcgacaagagacggcaataataaaaattgtctgataccattagacaattcccagagagataagataattgcacttgcatataaaaatgccgaggtaaatttttcacaaatcagaaatgaattagagtggcaggataagccgcatttaacttttaatctttgttcttatgcggaaaaaaatcctgagtataataaaaaactaaaatgcgaaattaaaaacggacaattgcaattcgacgaaacgcacgaagtaccaatcgtagatatgacaacaggagaaatcatggcattaaataaggagataaaggagatatttcaaaaaagactggattcccgctttcgcgggaatgacacccccgccacaggtgcgggggctaaacaggttacgttgtattactcggatatacgaaaagagttgcaaagcaatccggaatttaaaatctcagacttcagatttcagaaatttggaaaagaatacacaaaatcagaggaagaattaggcagccaagaatatatcaagcaatttgaaaaaaaagatatatttgtcaaacttgcgggttatcgtaaaatcaaaaacgccttagagaaagctgacggcaaatgggaacgaatcaaagaagatgcagacaaactcgatataatcgcagaggcgttgacattctgcaagagcaataagacgcgaacagaatatctacaaaagaacggtataacagaccagagtattatagatgccgtgttgactatcgatatgagcgggcttgccagtttttcaaaaccggcgttaaaaaatcttttaaaacatatggagcaaggcgcattgcctaatgaggcaaaagaaaagtgcgggtatgtcccaaaggaacatgaaaaacaggcaatactcaaaccatacagcggattttttgaaaaaaatcctgttgtggcgagggtaatatcgcagacgagaaaagtgataaacgcgattttgcgagagagcaaagataaatatacaatcgaccagatacatatagaaattgccacggaactggcgaacagcaaggagcgaaaaattgatatttcgttggggcagaaaagatacaaagaagctaaagagcgggcaacagaaagatgcaaggaaaaagggataaaccctgaagaaggacaaaaccttttgatgttccgactggcagaggagcaaattaatgaatgcccctataccggcaagaaaataatgtttgagccgacaaccggcaagaatgcggtttatgtacttgactgtgagattgaccatataataccgatgagcaggtctttcaatgacagtttaaacaataaagttctatgcgaccaaaaagcaaaccaggacaagcaagacagaataccttatgaatggtttgaagatatgtacggcaaggatagtcaagagtggcgcaactttgaaaacagggtgaaaagaatgaacggagtgcgatatcccaagaagaaaaatctgttacgaaaaagctggacggatgaggataaggaagagtttttgagcagaaatcttaatgatacgcgctatgccgcacgacatatagcggattatctgcggaagtatttcgatttttctaaatccaaaattgaaacaaaagatgtaaacagaatacaggtacgcagcggcgggattacggcatttctacggcatatgtgggggctgaacaaagacagagacaaagacgacctgcatcacgccgtcgatgcgattgtagttgcgtgttcgacttacggacatgtatttttggtatcgaatcttgccaaagaaattgagagagaagggaaaagctggtttaagcgttttgattttttgagagagaaatttaagccgtggcaaaatatcagagaagatatattgaatgaggtcgaaaaaatattcgtttcgaggatgccgagacacaaagtaacggccccggctcatgatgagacgattgaaagtcttgttgagaaacgtagaataaaaaaggccaagaagaagaaaccggataaaaaaatagattcgctgcctatggatactaacagggtcataaaagttaacaaaggatatgccggaattggcgaaatggttcgagcagatgtttttacagatggaaatggtaaaaattatgttgtgccgatttatgcggttgatatgttcagcaaagaacctttgccggataaatatttgcacaaaaatgatgccccatacgaaacgtggccgagtgcaacggcggataatttaaaatttaagttttctttgttcaaagatgacctgataagcattaatggtgaaatgttttatataaattttattcaggggacgcgttccaaaataaatgtacgcagtattgatggggcagttaaagaaaaagaaacgggttataaaaaagttgaattaaaaaaatatatggtagatttgcttggaaattacaaggaaattaagaaggaaaaacggctgggcaatgagggggtaaaaagggtgaaaaaacctaagaaaaatgattaaaaaatgaaattatgcgggaaaaatttacagttttttaagagtgaatttgacgtaagtcttttaaaagtaaagaattgcggcacaggcgttatatcagatatgaaaaagagagcaagttataacccgaggagcaggccgaaaactttgaaatcgttatatcagatatgaaaaagagagcaagttataacataaaaccggcggggacgccattatcgattgttatatcagatatgaaaaagagagcaagttataaccgggccagtcgcggggtgtgccgtggatagttatatcagatatgaaaaagagagcaagttataaccgcaaaaatgggggcttgtgaataccactagttatatcagatatgaaaaagagagcaagttataacatcaaaggcaacaattcctgccgagaggatgttatatcagatatgaaaaagagagcaagttataacacagtcgcagcgatagaaggcatagaaggtgttatatcagatatgaaaaagagagcaagttataacgccctcatcgatgagtgtaatcgccctgatgttatatcagatatgaaaaagagagcaagttataactcatctcggcgacgtttaaccctgccatatgttatatcagatatgaaaaagagagcaagttataactatttaattatgaggtgtttaactgtagcggttatatcagatatgaaaaagagagcaagttataaccgttgccgccgctttaactcctgccgctttgttatatcagatatgaaaaagagagcaagttataacctgaatggtcattgtcagtgcatctacaaggttatatcagatatgaaaaagagagcaagttataacttcaacgtcgtcgattgtgatattgccaaggttatatcagatatgaaaaagagagcaagttataacctgaaaattgcggcactacccgcagggtaagttatatcagatatgaaaaagagagcaagttataacgattcgcctgccctgccctgtccaatagatgttatatcagatatgaaaaagagagcaagttataacgaccgcctttgtggctccgtccagatttgagttatatcagatatgaaaaagagagcaagttataaccatttgtgtgcccatatcttcgagggcttggttatatcagatatgaaaaagagagcaagttataacgggaaatgaagataaaaagagtaagaaataacgcacccccccgtcacgataaaatctgaaaatgaaaaaacgagataaaaaaatgatagtgtactatgattaaaaggattatcgagatatcgcagcaaaggactgctttatcgataaagtacggtcaattgataataaggtcatcaggttccgacaggggtgaagaaccgccggtaaaaccggcggctaaatatgaggaaaggtctatcccctgtgaagatatcggggtactattggtagataatccggcgacggtttacacgcatagtgtttttacggagttattaaagcataatgcggctgtagtactttgcgataatgaacatttgccggccgggtgcttgttgccaattgagagtaattcaattcagacgcagcgaatcgcacagcaaataaaagttaaagagccggtaagaaaaaaattatggcagcaaattgttcgggcaaaaatcagacatcaggcgaaaattgtaaaagataatacgcaaattcataaagcattaacggcactactcagtcaggttcgcagcggcgacccaacgaatatcgaggcaagggcaagtaaattattctggcaggcgtatttacaggatgtgttatttcggcgggacagagaagggaagccgccgaacaatttgctgaattacggttatatggtaatgcgggcggcggtggcgcgtgcgatttgcagtgcaggattattgccatcggtgggacttcatcatcgaaataaatataacgcattttgccttgcagatgatttggttgagcctttcaggggatatgtcgaaattaaagtaagagaaatcgtgcaatcgagtgaagattttgaggaactgacacagtcgctcaaggcaaagctgcttgaggttttatatgaagaagtagaaatatccgatggctatgccacaggttataaagggccgctaatggtnnnnnnnnnnnnnnnnnnnnnnnnnnnnnnnnnnnnnnnnnnnnnnnnnnnnaaagaaattgatttacctaaaatttaaccacgaatgaacactgttaaaaaagattgccacgccccaaaggggctcgcaatgacaacccccggcacgggtccgggggctaaacaattatgataataagcgggtatagagcggtgtggatatttgcgatgtttgatttgccgacggatacagacaaggcacgaaaagattatacgcattttcggaaaaatcttttgaaagacggctttgctatgttacaatactcggtatatgcaaggcactgtgcaagtgaggaaaatgccgatgttcattaccgcaggatacagatttttttgccgccggacggcgaagttcgactgcttacaatcactgataaacagtttgaaaagatgcggattttctggggaaaaatgcgaaaaccgatgcctcctgcacccaaacaactcgaattattttgagtttgtttatacgcaactcctttgcagacaacaggtagcggaaaaggtagtgtaactaatcccgacctgatgtcaatccacaacaaggcggacaagtccacaacgaaaaaatagattatggagatgccgctttatttacaaaaaacgcaggagcgagacgggggggggcaaaaagacggaaaaatttcaagacttgttatgcagtagtacactatccaaagagcaaacgaactcccggcatccgccttcgttcctaagggactacggcggacaagtaatcaagaaatgaccaatcgtagagcaatgaccaatagacaatttccaataatcaagaaatgaccaataaccaaacgaacccccaccgcaggagtgggggctaaacaaatcaataataccccttccttacggtcggggctctgtggcattatggcagcacatagatttcgcaggagacccgctcattgacattcgcggctctgataagaaattgtttgtatttggcgaactttggggtagagtattagcaaacaaagaacaggcctgtgaaaggtgactaaaatgaagaaaatgccccttattttgtcgttagcggtcaatgttttacttgtattagcaatctttgctgctcgcctgcattatcataaaatgatatatcgagcacttcataataccgctatggctgaagtccaatttaacgaacaggtcctaactgaacttcaatctaaagatgaatataaaatcgaaagagttacgggtatgcttgaaaaaaatattcgaaaggggaagcaatctgcagcaatctggcaatccgtagcagacagaatcgggattaaatagattaaatccgccggaggcggacaagtttatacgacaaagaaacaggataatatacgaaatacgaatacccaggacagtgagataatcgccatcaggaagcagatgccggcccaaagccaagtgatacggcgttttacatattttaattcattttcgagtttttcaaattgcagttcttcagtcatttttgttctcctttacaaaatcgatataaattgtacataggggagggggggaaaaacaagtaaaaataggcgaattttgctgttgcgtttaatagcagggagcgagtataatcccgatgtattttgtataaaatttctcaaaagaaaggaagtaaacagtatgaacatttatgcaggtaatttatcgtttgacgtaaccgaagatgagttgaaagagctttttacgccatacggcgaggttacggaagtccgtctgataatggataagttcagcggcaaaaccaaggggttcggctttgtagagatgccctcaaaagaggaagcagaaaaagcgattgcagagttgaacggcaaagatatgggaggccgggcgataacagtcaacgaggccaaaccgaaagttgaccgcggcggcagaggcggcggcggcagaggcggttacggcggcggtggcggcagaagcggcggtagaggtggttatggcggtggcggcggcagaagcggcggcggcggttacggtggcggcggcggcaaaagtcgctactaatagccggtatcgctgaaaaaataaatacacgacaagcaatgtaacagagttgcagatgtgattagtcgttttgtgtggaaaggaaaccgatatgggtgataagggaaaaaaagacaaaggcggacgagagcaaaggaaaaaacccctgcttagtccggaagaaaagcgaagactaaaaagagaaaaaagaaacagttaattactgaccccgctaaaatcccggcggggtcaatcatttctgagccaaataatccgtgaaatttgccgtattccttcgactggactcaggacaagttcccgattaaaatgaagatatggcaaagtttcaattgataagcaattttgaaccgaaaggcgaccagccagaggcgataaaaacccttgccgataacctcaaaaccggcaggcagtatcaaaccctctatggcgtaacaggtagcgggaagacatttacgatggctaacgtcatcgcggaatatcaaaggcctacgctggttatcagccataataagacacttgcggcacaactctacgaagaatttaaagggctttttccgaacaatgccgtcgaatactttgtcagctattacgattattaccagcctgaggcgtatataccgcagcgggatatttatattgaaaaagacgcatcgcggaacgacgagctggacaggcttcggcttgcggcgacggcgagtctgacgagtaggaaagatgtgattattgtcgcatcggtatcgtgcattttcgggctgggttcgcctgaggattataaggcaagcgttatcggggtcagtacaggagagactatcgagcgaaatgaactgttaggcagactggcggatattcaatacgcaagaaacgatatagattttaagcgaggaacgttcagagtgcggggggacgtggtggaattgtggcccagctatgaatcgtttgcggtgagactggagtttttcggcgatgaaatcgaaaaaataaattatatcaatccgacaagcggcgaaattatcgcggcagaaaaacagctattcgtatatccggcagggcattatgttatgcctgccgagcggattgagctggcaatcgagagtataaaaattgagcttgaacagcaattgatgaaacttcggcaggaaggcaaactgctggaggcgcaaaggctgcaggcaaggacaatgtatgacgttgagatgcttagggaggtcggtttttgcagcgggattgagaattattcgaggcatttgagcggtttgcctgcgggggcaaggccttatacgctgatagattatttcggcgatgattttcttttgtttatcgacgaatcgcacgcgacggtgccgcagattagggcgatgcacgccggcgacaggagcaggaaagaggttctggttgagcatggattccggctgccgagcgcattcgataacaggcctttacggttcgaggaatttcagaaggactggaagcgtgtgatattcgtttcggctacgcctgcggaatttgagttgaatctcagcaaaggagcggtagtcgagcaaattgtcaggccgacaggtttgcttgacccggaaatttttgttcatccggcgtctaatcaggtgcctcatctgctcgaagagattgaaaaacacattcaggcaaaagagcgggtattggttacgacgctgacgaaaagactggcggaggacttgtcggcgtacatagcgaaaaagggatataaatgcaggtatttgcacagcgagataaaaactttggagcgtgtggaaattttgcgtgatttgcggttgggccggttcgatgttcttgtcgggataaatcttttgcgggaggggcttgatttgccggaggtttcgttagtggcgattttagatgcggataaagagggatttttgcggagccagacatcgcttatccaaaccatcggcaggacggccagaaatgtcaacgccaaggtgtttttgtatgccgacagagtgacggattcgatgcaaaaagcaattgacgaaacgacccgccggcgtacaatacaggagcagtacaataaagagcataatattacgcctgaaacgataaaaaagcagatttataccagtttgcaggacaagctcaaggcaagacaaatcgctcagcaggcggtaaatctgggcgatgcagaatatgacgctgcggaaatagcggtgcagattgaaaaggaaatgctggaggcggcggaaaaactcgattttgaacgggcagcgttcctgagagaccaattgaaagaattaaaagaactgccgcagataggaaaacgaaaatgaaaagcctgaactctgaaagaataagcaaactcattgatatggcgattgaggaagattacggcggaagtgacccgtcgagcgaactgatgattcctgccggggcaaagggaaaggcttatattgtaacccgtgaggaaattgttgtaagcggtatgtttgttgccagggaggtgcttaagagatacgacccgaagctgaagctgaagattctaaaacgtgacggacagcgtgccaatgttgccgacaggctcggtgttatggaagggccgatacgaacgatgttaagcgccgaaagggttgtgcttaattttctccagcggctttgcggtatagcaacgatgacttataaatatgttcacgctacccgcggtacgaaggcgaaaatacacgatacgagaaaaacaattcccggctggcgtgagcttgaaaagtatgcggtcaggtgcggcaaaggatataatcaccgctatagtctgagcgaagctgtaatgttcaaggataatcatattgcgcagctcgggaagaattttgaaccgaagctgaaaaaacttgttgagaaggccagggaaatcaagggcgtaaagtttatatgtgtcgaggttgaccatgttgataaccagcttaatcatgttctaaaggtgcagggcattgatgttatcctgctcgataatatgggccaatggcagtataaacacgctgtcgcgatgagaaataaaatgtgcggggataagccgctgctggaggcaagcggggggattacgcttaataatgtaaggcagatagcactttgcggagtggacagaatttccataggggctataacgcacggcgcaatttcagtcgatatcggtcttgacagggaattttaaacggatgtccgagtgtattcctttagatgctgattttataaaatcaaatctcgatacgcaccggatcggcagagagataatcgttcataaaagcacgacgagtacgaatgatattgcagcaggatatgccaggagcggtggcaagaacgacggtcttgtaatatttgccgagcatcaaaccgccggcaggggcaggagaggtagtaaatggttcgacgataccggtaaaagtatcttgtgctcgatactgctttttaatcctaaaatagaagcggatatgataactattgtcgctgcggtgggactggcagagacgattgcccaaaatgcgaaaatcaaatggcctaatgacattatactgtccggcaaaaaaacggcaggaattcttgtcgaagcattcggggaaaacaaaaagaaatattatgcggttggtatcggggtaaactgccatcagcagaaaaaagattttccggacgagcttgccgagaccgctacgagtatcgatatggaagtcggcgcaaaatgcgacaggagtcggcttgcaacgaggctgattatgaatcttgaccactttcttgaagttgcagaaaaaaggcctgatgaaattattgaaaaatggcgaagcagaagtatgctgctgaacaggcggattaccgtcgggcataacggccgggagtttacgggcaattgtatcgnnnnnnnnnnnnncgagggacttataattcagcttgatcgcggcggagtcaggatgtttcattcggcatctaccacaatagttaaagtctggacagatggaggttgatagtggctgaaaaatttgatgttgctgta

SEQ ID NO: 2836 - DNA, 10064 bp, synthetic construct
  source 1..10064: mol_type = other DNA
  misc_feature 1..10064: note = Synthetic
agagctttgtcagcgcttcgtgctgaatctgccggattcgctctctggtcaaaccaagcttttcgccgatttccttgaaccccatcggcggtttgccgtcaatcccgtaatgcagccgcaaaatctccgcgtctctcggggccatctggctcaaaaacccaatcgccttggccttttcctcatcctcaaccatatcgtcttcgggcttaccaacgctctggcagctggtgttcgcgtcgaatatctggctctcctcccccgcttcgggaagctggttgtccttgaccgagccgagaacctttaccgtctcatcaataaccttcgccttcttcgcagacatacccatcacgtccgccatttcctcaacagtcggcttcctgccaagcttgttctcaacctccgccatcgtacgacgccactggttaatcagcccaatcatataaccaggcacgtgaatgggccgaacatcccctaattgtgcgctctttatgccctgctttatccaccacgccgcgtatgtgctgaatcgcgtcccgcgactcgggtcaaaataatcaaccgctcttatcaatccgaggttgccctcctcaatcaggtcgccgagagttaacgcccccctgttggcgtatttcttggcgatattcaccactaaccgcaggttgctgcgaactaacagttctctcgcctccgggtcgttatcttcggtaatccgcagggcaatctcgtgttcttcctgcgccgaaagtagcgacgcctcgtctatttcctcgaggtacccttttattgtcacgtcaaaagccatatttgcctccatcccaatctcgatttataatcgcattaccgcttccccaactaccacccattttctgtcattcccgcacacattttaactgtcattcccgtaccaattttaactgtcattcccgcgaaagcgggaatccagaaatgtttagtagtgctgggttttatccgccttcggcggacgctatacgaatatcgacacacattcacccccggtttacctgaaatttatccgccgcaggcggaaaacaccgcaggaatgcgttttatcagaaaaataaaccctttgttatcggcattaacctccttggcgggtttagccgccgccggcacggcggcgcaattatctattcaacaccggttgtagttatagggcggggctttatccgccgtaggcggagtgcaatcgtcaggttcgcttattgtcattcccgcgaacctgtcctgagcttgtcgaaggaacgcgggaatccatgttctgtcattgcgaagtttacccgcctccggcgggccgtaagccgaagcaatctcttatgtctgtgtcagtccgtgtgtcttaaaagtccgtgtctgtctgtgtcttaaatcatcaatcagaaatcataaatacgaaaccccttgtttccccctcatttccggctacaatgcattccaggaaaaaagataaattatgacaggatgaaatacggtcttgaagctgaatgaatacagaggaagaaataaaagagcttgaaaaggcaagattgaaatcaaagaaagcaattcctattgaggtgggctcttttgttgtagtggctttagccctctggattacctcgaagttcgcttttgtacctgcttgggtcatagtcctttcaatcggtttaactgtctttccgttacttggcgatatcatcaactacatttattgtggccgcaagttgagaacattacagtgattcctcttaatgaaatatggagtcagtttttaatttactaccaatccgagcaaatgcattgttcatctgtgttaatctgtgtctaaaaaaactctgctcgccacggcgaagcgtagcgaagcctggtggtgaaaaaaatccgtgtcaatctgtgtaatctgtggttaaaaaaaggggtcaggcccctttctgtcctgaccccttatcatctctatcacaaaccgcttttatacaactggctgctccgggcctggctcatctgccgccggctgttcttccgctggcatgccttccggctgtgctgtctcagcgacaactgcgtctgtggcttctgcctcagtagcaacggcctcttctgtggcgaccacatccatgccttcgcctgactgcccttccgccgcccactgtgcccttcgcaaactcaacccaatcttccgggcctcgttatccaccttcagtatcttcacctcaagctcatcgtcaaccttgaccacgtcctgcggcctcttgattttctggtccgacagctctgaaatatgcagcaggccctcgaggtccgactcaagctgcacaaatgctccgaaattcgtcagcttcgttactttgcctttgacaatatgaccggggatatatttctccggtatcgcgtgaagccacgggtcctcgctcaactgtttgacgcctaacgatacccgctgcttgtcagggtcgatatcgagaaccacgcacttgaccttgtcgcccttctgcagtgcctcgttcggatggctgaatttcctcgtccagctcaggtccgaaatatgaatcatcccgtcgatgccttcttctacctcgacaaacgcgccataattcgtaacgccgcgtaccactgcattgacgagtgtccccagcgggtacttctgagccgccacggaccacggattcgtctccgtctgcttaagaccaagcgaaatctcctgcttgtccttgttgacgttcagaaccattacctctacctcgtcgccaagattcagcatctcgctcggatggttcagccgtttcgtccagctcatctcgcttatatgaacaagcccttcgatgccgtcctcaagccggacaaacacaccgtaattcataatattgacaaccttgccctttacccttgtacccacgggatagtcctgctccacgttttcccacgggcttgggcttttctgcttcaggcccagtgaaatcttctcgtttgccttgtcaacgcctatgacgacgcactcgatgtcatcatcgagccggacaacttccgaaggatgactgactcggccccagctcaggtccgaaatgtgcagcaagccatctatgccgcccaaatcgacgaacacgccgaaatcggcgatgttcttgacgatgcccttccgcctctgcccaatttctatttccgcaagaatcttctctttgtttaaccggcgttcttcctctatcagcttgcgccttgatatgacgatatttcggccttcgatgtctatcttcagaactatgcactcaacatccttgccgatgaatctgctgatgtcgcccggtcgccttatatcaacctgcgatgcgggcaggaataccggaactccgatatccacgagcaacccgcccttgattcggcggacaaccttgcccttgaccacgtccccttccttcttggtattaatcaggttctcccagcccctgattctgtccgctttgtgtttgctcagcagcagcaggcccgtctcggaatccgtatcttcaagcagcacttctatatctgtgccgggtaccagttccgaagcatcctcgaattcagacgcatcgacgacgccttcgcttttgagccccacttcaataatcacatcattgccgatttgggtaacaattttgcccttcaggattgttccgggcaggtgagaatccaccttcgcctgcaacgcctcctgaaacatctcgttttccttttcaccgaacatctcattgacctgcaagtcaacctgctcggcagacatacccaacttgttaattatatttctgtcaaccataaatatgcttatcccctgtggcgtctggtttttatccgcctgaggcggattacacgcgtctgcgccccacatttacgcctacacgtcgccgtgcagcatagcccggctaaaaggttaataattcactaaagcgtctgcccacacagcaaacgccagtatccacatttttgtcattgcgaggagtcccgattcatcgggacgacgcggcaatctttgtgtatcaaacgactgagattgcttcgcttcgctcgcaatgaccttcaatcagtgctgccagcttccacagcttcaaggttcttcacgaagtcgtcaataatccactggggcgttgaggcccctgcggtaacgcctgcggtccgacagccgaaaaccagctttttatcaaattcatcccagttttgcaaatgaaatgttctattattgtactttttgcacaattccgccaatttcctcgtgtttgcgctctccaaaccccctaaaacgaacataatatcgactttcctgcacaattcaactgccgcctgctgccttttaatcgcctccttgcacagggtatttatgactttcatctcgtcaaaacccgccctggctattgccaggagcatttggccaaaaaattcggggctttgcgttgtctggcagacaattcccagtcggccggtccctatcgtgcttatatccgactcattgccgacgaccaccgccccctttgtgcagccgacaaccgcacgaacctccggatggttctggtcgccgactatcaccaccttatacccctgcccttccatctgcatcgcgatttgctgcatcctcttgactaaaacgcaggtcgcgtcaatgatatccgcgtttttctgtttaagatgggctatctcttcagaggccgcaccgtgtgaacgtatcagcaccgtcgcccccgccggtatctgctccacatcgtcaaccgtaacaagacccttcatggccaatcgttcgacaacgccggggttatgaataatcggccccagcgaataaacctggcctttctccgccagcaccttctccgccgtgcttatggcgttccgaacgcccgcgcaaaaaccatatttttcagctaccatcactttcataaggaacaggattataccactaagacaccaagacacgaaggattttagccacccgccaagccacatagcggcaggcggacgaacttatgcaggtttttggaattgacggagaaatggggttaagttattctaaggacgatataaaaggagattaataaaaaaggagcaagcacttggcttgccccttaatagttataatatgagaggatacctaattaaaggaataccccgcatcttcttatttctaagaagattattataacttgctctcaagataaaatgttaatcggattgagttaagatgtcaagaaaaaatgagggaaaaaatgaacaaagaaaaggttattttggggcttgatatcggtgttgggtcagtcggctggggtttggttaagcttgcagaggagaaatatgtcgttgagaaccaggatgggacagccgatgagaaatacaaaataaccggaggagagatacttgatgccgggatcaggacttttcaattacctcaggatagacagggcgaaagtttggctattcacagaggcgcagcgagaagaagccgatggacaataagacgaaaagccaaaagattaaaacaactcacaaaacttgcacgtgaatttaatttaattggggacaattttaatcgagacgaaatcctcaagcccaggaaaggcaacaataaaaaggagaaatgggatatctggcgtatcagaaaagaagcccttgaaagaaaacttacagacgacgaatttttcagggttctttaccatatagccaagcatagaggaacttattttcatacaaaagcagaatttctgcctgaagaaactaaaggagaaccaaaagataaagaccgtgaggcggaaaaaagcgaaaaagataaggagaaagaaaaggtcaaacaagggataagaagaattcagaaaatgcttgaagaaagaggatatagaaccatagggcaaatgttctgggagatattcaagcaaaccaatgcggacaataaaaggaaaagaaacgccaaagataaatatgcgaactcaatacgtcgcgaattacttcaaaaagaaataatagagatatttaagagccagcgggattttggtaatccaaaagccaaagacgagctcaagcaaagatacatcgacgaaatactgatgtttgaagagggaatcgatgatgagcgacttcagaaaatgatgagtccatgcgagtttaccggcaagttatgtgccccaaaggagagttatacagcagaaagattcacattatttaatcggttaaacactttggaactggttgacactcaaaacaaaaacaagcatctatcgttagacgatacacagcgaacccaaatagtagctcttgcatataaaaacagtaaagtaacatttgcgcagataagagaagaattagtatatgcggataggctgcatttaagattcaacctttgttcgtataacgagaaaaaccccgaatataacaagaagctcgaatgtgaagtaaaaaacggggaattgcaatttgaagacaagcataaggttcctatcgttgacataaaccatggatggaaagtgcttgacgtggaaataaaaaatatactccgcagtaaaaaactgtggcctaaggcaactaggatatatatttactattcggatataagaaaacaattaaacctttcaggggatatcagatttgggtattacaaaaaagatggtgttattaaagagcttgaggggtatacaaaatcggcggcggaactcggaggcaaagagaaattcttaaagcagtttgaagaaaatgatacatttatcgaacttaaggggtatcacaagataaggaaagcgattgaaggaaaaggtagcaatggaaaatgggaacaaattcgcgaggatatcgaaaaggttgacgcaatagccgaggcactgacttattgtaagagcgacgaaacaagagcagaatatctgcgccagcataatatcgtagataataacataattgaagccgtattgaccctcaacatgaaacagcttgccacctattcgaaagaagcattaggtggtctgttgaagtatatggacaacaaaaaagaatggatgctttttaacgatgcgaaggaaaaatgcggatacggcaaaaccgaatataagaaacagacaaagcttgaaccgtatagtggcccctttgagaaaaatcccgctgttgcgagagccatatcgcaaacaaggaaattggtaaacgccattgtgctaaaacataacagccggacacctatcgaccagatacatattgaagtcgccaccgaactggcaaacagtaaaaaacgaaagaacgatatcgcccagggacagaaaagataccaagaagataaaaagcgtgcagaagagaggtgcaaagaattcaatatagaccctgaagaaggccagaatcttttgatgtttcggctcgcagagcagcaaaacaataaatgtccctatacaggtaaagcaatcaccttctaccccgctgcggcgaataacgaggttaatatacaagattgcgaaatcgaccacgtaattccaatgagccggtcattcaatgacagcttaaataataaaatattatgcgccccggaagccaatcaaaataaaagagacaggataccttttgagtggtttgaggatacttacggcaaggacagccagcaatggtcggattttgaaaataccgttaaaaaaatgtatggcgcgccttacccgaaaagaaagaatctgctcagaaaaagctggacggacgatgataaggagaaattcttagacagaaatcttaatgatacacgatatgcgacacggcatatcgcagattacctgaggaagtattttgatttctcaaaatctcaaagggatgacataaaagatgtcagcagaatacaattacgaagcggcggaataacagcgtttttgaggcatatgtggggactcaataaaaataggaaggaaagcgaccgtcaccacgcccttgatgctcttgtggttgcctgctcgacatacggccatgtttatttagtatcaaatctatctaaagaaatagagcgtaagggaaaaaactggtataagcattttggaagagagaaatttaagccatggagcaatatcagagaagatattcagaaaaaggtcgataatgtgtttatttcaagaatgccacggcataaggtaacaagtgctgctcatgatgatgaaatttggagtttcatagaagaacgtagaataaaaaaggcaaaaaagaaaaacccccagaaaaaaatagattcaatgccaatgccaacaaaaagagtcataaaaactaatgggggatatgcccaaataggtgatatggtgagggcagatatttttgcagacaagaacggcaaaaattatgttgtgccaatttatgcgacagacatttttgccaagaaaccactacccgacagatatgttcctgatgacagattattgccttacgagaaatggccaaatattaacgatggcgatttgggatttaagttttctctttttaaggatgatttgatcagcattaatgataaaatgttctatataagtttttttgaggcaaccaccgctaatgttaatgttaaaaaaatagatggctcaattttcccggataagaaagacgcccaagacccatacacaaagaaaatcgcgtatcggccaaaaagcaggacgaaaaagtgtgttttgaaaaaatattatgttgatatgctcggcaattacacagaggttatacaagaaaaaaggcccgttaaattcattaaaaaaacagcgaattgatgcttatttgcaataaaaaatcgcgttttttgtttccgaaaacggccgtaaggcctttcgcgccaatgagttacatatcaaccattatagcagacatgtaaaagagagcaagttataacccatatcgcggttaaggtgcggtatcttgcattatagcagacatgtaaaagagagcaagttataaccttttggtcgcaagtttccacttattattaattatagcagacatgtaaaagagagcaagttataactgtttgcctaaccagaccaacatgcaggaaattatagcagacatgtaaaagagagcaagttataacctaacatcaggcaatgccagcttgtcgcgcattatagcagacatgtaaaagagagcaagttataacaggaaatcatcggggttcgctttcccaaacattatagcagacatgtaaaagagagcaagttataactgtcagctaccatactcttgccgccaaaatattatagcagacatgtaaaagagagcaagttataaccgcagggtcgcaggagataaccttgcccttattatagcagacatgtaaaagagagcaagttataacaaggttaggcaggagtccggatgatgctgaattatagcagacatgtaaaagagagcaagttataaccagttgccgagatgggcgacgatagtcaggattatagcagacatgtaaaagagagcaagttataacccgcgactgctggcaatcaatctgctttatattatagcagacatgtaaaagagagcaagttataacccgtaaccgtagcggtgtaataatttgccgattatagcagacatgtaaaagagagcaagttataactgataacttcgagattaaaagttatgagtgattatagcagacatgtaaaagagagcaagttataaccgtaatctgcgtgtctgcaatagcattaccattatagcagacatgtaaaagagagcaagttataaccgaacagtttaccggtacagacggctatcgattatagcagacatgtaaaagagagcaagttataacgaaaatggcaggaagacccagaaaacagttattatagcagacatgtaaaagagagcaagttataaccgccatctcggccgaatcagatcacaaaagattatagcagacatgtaaaagagagcaagttataacgttcttatgcttaaagtcagcgcgggagcaattatagcagacatgtaaaagagagcaagttataacgcaaatgggcgtcgagagtgggttggatgtgttttcaaaatcattgaaataaattacatctgcatttaacagttggctccaactcaaaaaacagacactcaaaaggcacagcaacttaatcttc

SEQ ID NO: 2837 - DNA, 5850 bp, synthetic construct
  source 1..5850: mol_type = other DNA
  misc_feature 1..5850: note = Synthetic
tttatgctgcgcagaaatatctgcctgctgcaacaaatcatatccgaacatacttgaacattcgagaaggagaaatcttttaccattaaatcaccagcagcaaataaagtgccgaacaggattgcacggtcgttaaaaaaagcatacctgtgttaagatgttaagatggataaaatgggaaagatatttttggttggtaaaggaattgacaaaaagggaagttttggggtattatgcggtgggttaaaaggatttgccggaggttcaccattgaatattaaagacaggcggaaaaatggcataaaaaaaggagcgactaaatctaatcgctccttgatagttataatatgaggagatgtcaaagacagcactccacatcttccgaagaagatttattataacttgcctcaaattcgtaaatgacaataatgtacttgtcttgaattgtcaagaaaaatttttgattggggaaaaaatgagtaatgaaaaagttgttttggggcttgacatcggcgtcgcttcaatcggctggggtttggttaaacttacggaagaaaaatatatcgacgaaaaaccggacgggacaatcgaggagaagcataaaatatcagacggtgaaataatcggcacaggaatcagggagtttcagcttccacaggaccggcagcggaaaagtctggctcttatacgagggtcggcacggagaacacgacggacgataaaacgaaaatcccaaagattaaaacggcttgtaaaacttgcaaaggaattcaatttaattgcagaagattttaatagcgaccaaatcctcaagcctacaaaaaatgctaataaaaaagagaaatgggatatctggcttataagaaaacaagcccttgaaagaaaacttaccgatatcgaattattcagggtactttatcatatcgccaagcaccgaggtttttattttcatacgaaagcagaagaagtacagaaagaggatgcaggttctgaaacaggcaaggcaaaagccggccttgcacggataagcaagaaacttgaagatggcaaatgggaaactgtcggccagatgttctggggtgaatttaagcagacaaatcctgaaaataaaagaaaacggaacgccaaagataaatacgaaaattcaattcaccgattactgctgaaaaaagaaattgaaaccatctttaagaagcagcaagcgtttgggaatatgcaggccaaagaggaacttaaacagcgatatatagatgaagtactgatgtatgaggaggggattgacgacgagagacttcaaaaaatgatgagccggtgcgaatttgttaccggcgcgatgtgcgcaccaaaagaaagttatacgtccgaacgattcagcttatttaacaggcttaacagtttaagtctgattgatactaaaaacaaaggccagaatctgccgctggacggccaacgaggcaaaatagaagctcttgcgtataaaaacgcaaaagtaacattcgctcagataagaacagaattaggccttcaagacgacctgcatctaaggtttaatctttgctcatacagcgaaaaaaatcctgaatataacaaaaagcttgaatgcgaaattaagaatggtcaaccgcaatttgacgaaaagcataaagttcccgtcgttgacatccatacaggtgaagtaacgatacttgacaaggaaataaaggatatattcaacagtaaaaaactatgggcgaattcaaaaaagattcacgtttattatttggatataagaaaacaattgaacctttcaggagattttagatttaaagacttgtcgggatacacaaagtcggcagcagaattcggcagtgaggcaaaatacgtaaagcagtttgaaaatgatacctttgtagagcttaagggatatcataaaataaaaaatgcgattgaaaaatgcggcgatggacaatgggagcatatcagcaaggatatcgcaaaacttgacacgatagcggaggcgctgacgtattgcaaaagcgatgagacaagagccgcatatctgaaagaacacggtattactgatgaaaaagtaatcgaggctgtattaaccatcaatatgaaacagatcgctaccttttcaaaagaggcgatgagcaatctattaaagcatatgagcgatggcacactgttcaatgaggcaaaggaaaaatgtggctacggaaaaatcgaccataaaaagcaggcaagacttgacccttacagcggattctttgagaaaaatcccgttgtggcgcgggtgatagcacagacaagaaaattagtaaacgcaatcgtgcgaaaatgtaatgataagtatccgatagaccagatacatattgaggtcgctaccgagttggccaacagtgaaaaacgaaaaaatgaaatcgcacagggacagaggagataccaagaggacaaaaagcgggcagaagaacgatgcagagaattcaaaatagaccctgaagaagggcaaaaccttttgatgttcaggctggcggaacagcaaaataatttttgtccatataccggtaaagcaataaccttttatccaaccagcgcggataatgaaatttacatacaagactgtgaaatcgaccatataataccgatgagtcggtcgttcaatgacagtttaaataataaagtgttatgcacacagcaggcaaatcagaacaaaatggacaggataccttttgagtggtttgaagatactcacggcaaagacagccagcagtgggcagattttgcgcggcgggtagaaaagatgtacgggatgccatatcccaagagaaaaaatcttgtcagaaaaagctggacggaggaagacaaggaaaagtttataagcaggaatctaaacgatacccgttatgccgcaaggcatatcgcggattatctgcggaagtattttgatttttcaaaatctaaaagggacgatataaaagacgtaagcaggatacagcttcgcggcgggggcgttacggcatttctacggcatatgtggggactgaataaggatagagaagaaaatgaccttcaccatgctcttgacgctcttgtagtagcctgttcgacatacggccatgtttatttagtttctaatctttctaaggaaattgaaaggaaaggcaaaaactggtataaacatttcggcagggataagtttagaccgtggaacaatatcagggaagatattcagaaagtcgttgaaaaagtattcatttcaagaatgccacgacacaaagtcaccgctgaagcccataaagacactattacaagtttgaaagaagcagcaatcgccaaaagagtcatcatgattaatggcggatacgccgaaatgggggatatggtacgagcagatgtttttacagacgataaggacaaaaattatgttgtgccaatttattcaacagacatttttgccaataaaccgttgcctgataaatatgttcctgatgacaggctgctgccttatgagcaatggccaagtgttctcaataatgcgatgaatttcaaattttctctttttaaggatgatttgatcagcataaatgataagatgtactatgtaagtttttttgaagcaaccacagctaatgttaatgttaaaaatatagacggttccatttttcctgacaaaaaagattcaaatgatcccaagacaaagaaaataggatataggcctaaaggtaaaacaagaaagtgtgttttgaaaaaatattctgttgatatgctgggcaattataaggaggtgaaagaggaaaaacgactcggtaacaagtttcaaaatgaaaaactggtttgatttgtaagaaaaaatggcctaaagatgaaattaaacacaaaaataaagcatttttttaaaccaaaaaccatacgtaagcccttgaaaattaaagggttacgcctgccctattatagcagatatgaatttgagagcaagttataacggacactgccttttgactcggctatcttgattatagcagatatgaatttgagagcaagttataaccttcaaagcaaaaacaaacaaatgtccaacattatagcagatatgaatttgagagcaagttataactgatagatgcttttggttatcgtcaagagattatagcagatatgaatttgagagcaagttataactatgattatttgcgatatgccgcaagtaagattatagcagatatgaatttgagagcaagttataacgttgtgtatatcggtcagtgcatcaactacattatagcagatatgaatttgagagcaagttataacccgaaatgtatttaccatattcttcgttaaattatagcagatatgaatttgagagcaagttataacttatcccataaccgccttaattcgcttattattatagcagatatgaatttgagagcaagttataaccattaccgagtatcatcaggtaaacaatttattatagcagatatgaatttgagagcaagttataaccgggctttggattgccctttcactgcgtaaattatagcagatatgaatttgagagcaagttataacaatataggattgaacctcatcatccagattattatagcagatatgaatttgagagcaagttataacgatgaacttgtagttaattgaaagggtgtaattatagcagatatgaatttgagagcaagttataacgaatacggcagtttcggcatctatcgaggcattatagcagatatgaatttgagagcaagttataaccaaagggctgatcttgcgaccaaccctttgattatagcagatatgaatttgagagcaagttataacgcaaagaaccttggttagagcagacagaacattatagcagatatgaatttgagagcaagttataacatattgaggttcgtgtaaccacaggtcttgattatagcagatatgaatttgagagcaagttataacttaatcgcaacaatatcaaccactctttgattatagcagatatgaatttgagagcaagttataactaatttgcttgcgataatcggttgtcatttattatagcagatatgaatttgagagcaagttataacggctaaacccttttctccatttttaccatatattatagcagatatgaatttgagagcaagttataacttcgccaatcttcggtttgaccggtcgttaaattatagcagatatgaatttgagagcaagttataacacatacataataataaagaggccatagattattatagcagatatgaatttgagagcaagttataaccaagatactggctacccgcaataaggcaacattatagcagatatgaatttgagagcaagttatagcttatagataattgacgttgaggaagaccttttaattgattatggattattgatgattgattattgacgttgaggaagacagtttttacggacaccgaggcaggccttggtactaaacatgccctttgcagcataaaaaatccgtctacaaacttggtgtgtatcccgcaaaacggggatggccaaaatagttttgacggcgaaacggtttaggggtaagatgacggacaaattaaggagattatgatggattaccgaagaataataccgtgtttagatgtgaagggcgggcggttagttaaaggggtcaattttgtaaagctaaaagatgtcggagaccctgcggaaaatgcggcggcatacagcaaggcaggcgcggatgaacttgttttcctggatatcaccgcaacaatagaaaacagaaagacacttctggatgcggttaaaaggactgttgataaaacttccgtgcctttaacggtcggcggaggaatcaatagc

SEQ ID NO: 2838 - DNA, 5649 bp, synthetic construct
  misc_feature 1..5649: note = Synthetic
  source 1..5649: mol_type = other DNA
ggataaacaactgcggcttattccttaatccacagtatcttacgttcaagatgtacacgaatcactcaggcccgaccctgctcaaaaccagcgtaaaatgcgacacattccccgcaccggattatgaagaaggcaggccgcaggccaaaagcaaaataccgtatctggacgtatcggcaacaacggataaagatggaaaaaccgtttacctggctgttattaacttacacgcagataaggagataagaacaaaactttcatttgaccgctgggatttcacgccggatgtgaaaaccgttgagctttatcaccctaactatatggctgaaaacacgttagagaagccagacaatataactataaaagagaattcactggccgggataagcaatccgtttgagtatacctttaagcctcattcggtaacaattctggagttccagaaaaaataaacagtcgtaaactattggcctgcctagaaatagcgaaagtttttaatctcagaaattgttaaaaacagggggagaattttggggttttaggctgaatttttcaaagccacagaggccgcagagaacacagagagataagtatttgttattaaagaagttgtagagttttatgaaatgacagattaaacggtttttttgttaagatgggtaaaatttaactattgtaggggctgggaaaattttttgtgttttgtctcgaattagcgccaattgtctcgaattgctctcgaatcactctcggatagtactcgaaatgctctcgaaatagcgccaatggtgcgccaaattgcttgaattgtgctgaatttgggggtctgttttttgtaagtaattgtttggcaaagagttaggtgtttgcgacgggcggttgttgaagaaaataatgtaggttcggcaagggtggtgaggattctgccggggcgaaggtagttttgtttcattttcaccggaaagctccattaaattttatttcactcaatatggggacgtagtatcttcccataattgggcggagatgcgcatttgggttgaccctacttcgccctgcgggctacgaagggcaggcaaaaaaaagataacttgttatgggataaggagtaaggggatttgaaaaaaattttaatttttcccatatttggcgaagagtgggtgcgtttttggtcgaattcgtgatgcgggtgcgtattgcgtagagcggatgtaaaattacctaatttaacagataaaattttgttgaaaggggtgaggatttggggtattttgtgatggcgaaaaaaggattgggcataaaaaaagaaggaggatgtgggtttcatgcgatataaaaaaagaaggagcgagcagttgtctcgctccttgatagttataatatgaggagatgtcaaagacagcactccgcatcttccgaagaagatttattataacttgctctcaaggtaaaatgctaatccgattgatttaagatgtcaagaaaaatttggggaaaaaaatgagtaatgaaaaagttgttttggggcttgatgttggagtcgcttcagtcggctggggtttggttaaacttacagaagaaaaatataccgacgaaaaaacggacgggacaatagaagaaaaatataagatatcagacggggaaataattgatacggggattagggcatttcaacttcctcaggacagacaaaagaaaagcctggcattacaaaggggttctgcaagaagaagtcgcagaactacaaaaagaaaagtccaaagattgaaacgacttatcaggcttgccagagaatttaatctaattactgatggtttcaatcgagacagcatactcaaacccaaaaaaggcgacaaggaaagcaagtgggatatctggtttataaggaaagaagcccttgagaggaaacttactgatattgagctattcagagtactctatcatatcgcaaaacatcggggcttctatttccatacaaaggcagaagaaatacaggaagaagatacaaaatctgaaaccggtagagcaaaagccggacttgctaatatcaggaagaaacttcaagacagcaaatgggaaactgtcggccagatgttttgggaagtattcaaacaaacaggtgcaaacaacaaaagaaaaaggaacgctaaagataaatacgaaaattcaatacaccgactattattgaaagatgaaatcgagaccatatttaacaaacagcaaaaattgggcaatttaaaagccaaagaagaacttaaacagcgatatataaatgacatcttgatgaaagaagaggaaattgatgaggagaagcttcaaaagatgatgagccggtgcgaatttaccggccagttgtgcgctccaagagaaagctgtactgcggaacgattcactttatttaatcagcttaatactttggagctggctgacacgcaaaataaggacggacatttgcatctcgatgataagcagagagaaaaaatcgaagctcttgcgtataaaaatgcaaaagtaacgtttgctcagataagagatgagttagaacttgcggacaagctgcatttgaggttcaatcgttgttcatacagcgaaaaaaatcccgaatacaataaaaaactcgaatgcaacataaaagacgggcagttgcagtttgacgaaaagcacaaagttcccatcgttgacatcgaaactggagaaataaaaatattagttcaggaaataaaagatatatttcagaaaaagcttaaacccaactacacacatgtaactctgtattattccgatatcagaaaagaactacaaaatttagcggatttcaaaatttcagatttcagatttcagaaacttcagaaagaatacacaaaaccggcagtggaattgggcagtgaggggaaatatataaagcagtttgaagatgatacttttgtagagctcaaagggtatcataaaatcaaaaaagccatagaaaagactgacggcaacagcaaatgggagcaaatcaaaaacgactgcgataaactcgacacaatagcagaggcattgacttattgtaaaagtgataagacaagaacagattatctgcggaaaaacggtatatcagacgaaggcatcatcgaagccgtgctgactatcaatatgaagcagcttgccacatactccaaggaggcgttaagcaatttgttaaaacatatggagacaggtgcattgcataatgatgcaaaagaaaaaagcggatatggcaaaatcgaccacaagaagcagacgatacttgagccttacagcggtttctttgaaaaaaatcctgttgttgcaagggtaatatcgcagacaagaaaactgataaatgcaatcctgcgaaaatataaggacaggtatccagtagaccagatacatatcgaggtcgctaccgaactggcgaacagcgaagaaagaaaaaaggatattgcgtgggggcagaaaaggtaccaagaggacaaaaagcgggcagaagaaagatgcaaagagtttaggttagaccctgaagaagggcagaatcttttgatgtttcggcttgcagaacagcagaataacaaatgtccctataccggaaaggcgataactttctaccaaaccagtgcaaataatgaagtttatatacaagactgtgagatagaccatataataccgatgagccggtcatttaacgatagtttgaacaacaaggttttatgcacgcagaaggcgaaccaggacaagagggataggataccttttgagtggttcgaggaaatttacggcaaggacagtgagcaatggagggagtttgaaaataccgtaaaaaagatgtacggcgtgccttatcccaaaagaaagaacctattgcggaaaagctggacggacaaggacaaagaaaaatttttgagcagagacctcaatgatacccgttatgcagcaagacacattgcggattacctgcggaagtattttgatttttcggtatccgaaagggacgatattaaaagcgtcagcagggtaaaggtccgcagcggcggcataacagcctttttaaggtatatgtgggggttaaacaaggacagggaagcaaacgaccttcatcacgcactcgatgctcttgtggtggcctgttcgacagacggccatgtttatttggtgtcgaatcttgccaaagaagtagagagaaaaggcggaaactggtataagcacttcggccgggacaagtttaagccatgggttaatgtaagagaggatattcaaaagaaggttgaaaatatttttatatcgaggatgccaaggcataaggtaagcgcagcggcacataaagatactattttgagttttaaggacgccccaaccaaaaacagggtcgtgaagattaatgacggatatgctgaaatggacgaaatggtccgggcggatatttttacggatgataagggcaagaattatgtcgtccctatttatgccgtcgatattttcagcaagaagcctttgccggataagtatgtgccggatgatgggaaactgccatatgataaatggccgagtgtttttgacaaaaaactgacttttaagttttctctttttaaggatgatttaataagcattaatgataaaatgtactatgtgagtttttttgaggcggccaccgcaaatgttaatgtcaaaaatattgatggttcgattttcccagataagaaagatgcccaagacccttacacaaaaaaaatctgttacaggccaaaaagcaaaacaagaaaatgtattttgaaaaaatattctgttgatatgcttggcaattataaagaagttatggagaaagaacggataggcaacgagggcgtgaaaagaacgaaacgctataaaaaaatggctaaagaatagaattagacaggtaaaaatggcagttttttacgataaaatcaggcgtaactcctttcaacgcaaggggttacgcctgacctattatacccgatgtaaatttgagagcaagttataacaaatattatttgcgacattctatcccccccattatacccgatgtaaatttgagagcaagttataacacagaccttcatcaaggctaaatgtaatcgattatacccgatgtaaatttgagagcaagttataacttctaataaaacctttagtagcggttaggaattatacccgatgtaaatttgagagcaagttataacgaaaatggacagttaaaaatcacaagctcaattatacccgatgtaaatttgagagcaagttataacatcgggacggggggggcaattataataccccccccccgtcattagtagtgcactacgccgcggcaagcgggggtaaagtagaggcgggaaattgacgatgaatgggttgtgattagtggtcagtgattagtgatttgttttaagtaaatcgacaacgaattggggggtaaatgataaagaagattatagaaatatcgcaggcgaagacgcatttggcgattcgatacggccaattgattgtcaagcaggatgataaagaaacaaatatcccctgtgaagatataggcgtgctgcttgtcgaccacagcggggtaacgtatacgcacagtgtatttacggaactgctgcggtgtggggcggcggtggtgctgtgtgccggcgaccatca

SEQ ID NO: 2839 - DNA, 4929 bp, synthetic construct
  source 1..4929: mol_type = other DNA
  misc_feature 1..4929: note = Synthetic
gccaggcctggccaattacgacataaaagccgcgttcgagaaaatcgcaccggaaaacgggcattatgagcatgagaagacctgggatgacgataatggccattcgcacgtccgggcatcgcttttgggtccttcgttgaccgtgcccgtggttgatggccgacttacgctcggcacctggcagcaaattatcctcgtcgatttcgacaccaggccgagaaaaagaacagtcatctgccaaataatgggcgaataaagcctctctaatccctaatcactcttgtgcccttatgacttgtgctctaaaaaaagaaggagcgaggtgataactcgctccttagtagttataatatgaggagataccaaaaatggttactccgcatcttcttattcctaagaagatttattataacttgctctcaaagtaaaatactaatctgattgacttaaaatgtcaagaaaaaattttaaagaggcagataaaaaaatgagtaatgaaaaggttgtcttggggcttgacatcggcatcggttctgttgggtggggtctggttaaacttagagaagaaaaatatactgatgaaaaaccggatgggacaatagaagaaaaatataagatatctgatgggaaaataattgatacagggattagggcatttcagcctccccaggacagacaaaagaaaagcctggcactacaaaggggttctgcaagaagaaaccgcaggaccacaagacgaaaagtccaaaggttaaaacggcttatcgggcttgccaaagaatttaatctaattactgatggtttcaatcgagacggcatactcaaacccaaaaaaggcgacaaggaagacaagtgggatatctggcttataagaaaacaagcccttgagagaaaacttaccgataccgaattactcagggtgctttatcatattgcaaaacatcggggcttttatttccatgcgaaatcagaatttctgccggaagaagatgaaaagaaactaaataaagataaaaaacaggaggctgaaaaaaacgaaaaagagaaagagagcggaaaagttaaacaaggacttcgaagaattaagaagatgttaaaagatggaggataccaaactgtaggcgagatgttctatgaaaagttcaaacaaacaaatccagatagcaaaagaaaaagaaacgccgcagataaatacgcaaactcgatatatcgcccattattacgggatgaaatatcaaagatttttgagtgccagcaaaagtttcgcgattcaaaggctaaggatgaacttaaacgcagatatatagacgaaatactgatgtatgaagaaaaaattgatgaagacaaacttcgaaagatgatgagccggtgcgaatttaccggcggtttgtgtgcaccaaaagaaagctacactgctgaaagattcatcttgtttagcaggcttagtactttggagttgattgatacacaaaataaagataaacattcgcagcttgataaagaccagagagacacgataattgccctcgcttataaaaatgccggcggggtaacatttgctcagataaggacggagttagggctggaggacaatttgcatataagatttaatctttgttcataccgcgaaaaaaatccagaatacaataaaaaacttgaatgcaaaattaaaaacggtcagttggaatttgacgagaagcataaaattcccatcgttgaggtcgatacaggcgaggtaaaggtacttgatgacgaaataaaaaagatattcaagggcaaaaaactttggggtaacagacaaaagatgcacatttattattcagatattagacaacaatcgaacctttcagagaatttcagatttgcgaatttgaaaggatacacaaaatcggcagcggaattaggtagtgacacggaatatattaagcagttcgaaaaagatgatacctttgttgagcttaaagggtatcataaaatcaaaaaagccgttgaggaaaatggcggcacagagaaatgggaggaactcagcaaggacactaccaaacttgacacaatagcagagaccttgacatactgtaaaagagacgagacgagaacggaatatttgcatcagcataatattaccgacaaggaagtaatcgacgctgtattgactatcaatatgaaacagcttgccaatttttcaaaggaagccttaaccagtattttaaggtatatggatagtgaaaaccgtatgcgttttaacgaggcaaagaaagaatgcggatacggtaaaatcgaccataagaagcaggtaatacttgatccttatagaggtttctttgaaaagaaccctgttgttgcaagggtaatatcgcagacaagaaaactgataaatgcaatcttgcgaaagtataatgataaataccctatcgaccagatacatatcgagattgctaccgagctggcaaacagtgagaaacgaaaaaatgagattgcgcagggacagagaagatacaaagacgataaaaaagcggcagaggaaagatgcaaagaattcaatttagaccccgaacaagggcagaaccttttgatgttcagactggcggaacagcaaaataataaatgtgcctataccggcaaggcaataactttctatcaaacgagcgcagataatgaagtttatataaaagactctgaaatcgaccacataataccgatgagccggtcattcaatgacagtctgaacaataaagttttatgcacacagaaggcaaaccaggacaaaagggacaggataccttttgagtggtttgaggatacttacggcaaagatagtcagcagtgggcagagtttgaaaatactgtaaaaaagatgtatggaatgccgtatcccaagagaaaaaatctcatcagaaaaagctggactgaaaaagacaaagaaaagtttataagcagaaaccttaatgatactcgctatgctgcaagacacattgcggattacctgcgcaagtattttgatttctcgatatctgaaagggacgatattaaagatgtcagcagggtaaaggtccgcaccgggggcgtaacagcctttttaaggtatatgtgggggctaaacaaggacaggaaaggaagcgacctgcatcatgctctcgacgcccttgtagttgcctgttcaactgatggccatgtttatttggtatcgaatcttgccaaggaaatagagagaaaagggaaaagctggtatagacatttcgacttcataagggacaaatttaagccctgggataatatcagagaagatattcaaaaaactgttgcaaatgtttttatatccagaatgccgagacataaagcaaccgcaccggctcacaaagatactatatttagttttaagaagaccccaaccaaaaacagggtcatagagattaacgccggatatgccgaaatggacgaaatggttcgggcggatgtctttacagacgataagggcaaaaattatgttgtcccgatttacgcagtcgatattttccaaaataaacctttgccggataaatatctgcataaaaacgacgcaccttacgacgagtggccaagtgctgcggcagacaatcttaaattcaaattttccttatttaaagatgacttgataagcattgatggcaagatgtattatgtcgattatgtccgagcaaccagaaccaaaataagcgtaaaggaacctgacggttcattcatagataaaacaaaagaagaaaaaactaaagagataggttataaaaacgtagaattaaaaaaatactcagtcgatatgcttggcaattgtaaagaggtcaaacaggaaaaaaggcaagcgaacaggtttgaaaaaaacgagaagcggatttctgaccaaggttagtattttatctgtcatttttgataaaaaacggccaaagaatagaattacccagaaaaaaatggcaaaatcaggcgcaaccccaatcaaaacaaggggttacgatcgaccaattatagcagatatgaatttgagagcaagttataactgcccgggctgagactgctcaagcggcacaattatagcagatatgaatttgagagcaagttataactgggcacgaagaagggaatacccaaaactcattatagcagatatgaatttgagagcaagttataactaaaaatcgctggttattcgatcattgaaaattatagcagatatgaatttgagagcaagttataacagaataattgaggccaatccattacttgtaattatagcagatatgaatttgagagcaagttataactcaaaggaacagtagtattcctgctgtaccattatagcagatatgaatttgagagcaagttataacgctaaacgtgctagccttttatctgttccttattatagcagatatgaatttgagagcaagttataacacaatcaaactggagctacgacagctaaggattatagcagatatgaatttgagagcaagttataaccaaggtctatgtatttaggttgttgtttcaattatagcagatatgaatttgagagcaagttataacgcacgttccacagcatcggttcatttgtgcattatagcagatatgaatttgagagcaagttataactccttttctccgttgccgttaccactcgtattatagcagatatgaatttgagagcaagttataaccaaatctggctgatggccagcaggtcaagattatagcagatatgaatttgagagcaagttataactagttggcgggtggcagggtcaaggccacaggcctccgggatggttgttcaacgtcattagaaaaactggccaaaccttgatttcatccactcaaggacctcctgggccgcttgtcttgcttcagcggcattttcaatcgtcaaagtcaattcatccccaggatagcgaacctcta

SEQ ID NO: 2840 - DNA, 14688 bp, synthetic construct
  misc_feature 1..14688: note = Synthetic
  source 1..14688: mol_type = other DNA
gctcaaactcgttttgccactgcgtacacatcgtgaccatgccggtgtcgtgcggcctggggctgacctcgctgaaccagacctcgtcgcccttgacaaacagctcgacaccaaacaatccgaggccgcccggctggccgtcgtggccgatgccgaggttgtcggtcacggccttgcagatgtcgcggcttttttgcagcgcggccggggccatgggctgcggctgccagctctcgacgtaatcgccgctgacctgcacatgacctatgggttcgcagaaatgagtttcgatttgcccatcggcacccatggcgcgcacagtcagctgggtgatctcgtagtcaaagtcgatgaaaccttcgacgatgacacggccgtggctgacgcggccaccggccatggcatagtcccaggctttgtgcacgtcgtcggggctgctgatcttgctctggcccttgccggaagaactcatgaccggtttgaccacgcaggggtagccgacttttttatcaatcgccgcctgaagctcggccagcgaatcgcaaaaaacataggggctggtgggcaagcccagcgtttcggcagccaggcggcgaatgccctcgcggtccatggtcaggcgcgcggcgcgtgccgtgggtaccacacgcaccacaccggcggcttccagttcttccagcatgggcgtggcaatcgcctcgatttccggcaccaccaagtgcggccggtctttttcgatcaaggccttgagctgggccggatcactcatggtgatggtgcgcgcatggtgggccacctgctggccgggtgcgttgtcgtagcggtcggtcgcagtggtttccacgccaagacgttgcaaggcgatcaacacctccttgccgagctcgccggagcccagcagcataactttggtggcatggggagacaggggtgtaccgaaggtggtcatgggatgtagagaaataggaagtggaaggaaaccggctggcgacgccagcagaaccgggtcaccggccgcgtcactgcgactgtacttgacgggaaagaagtgccgccccgcagggccttcggtccttttacccccatagacgcaaagctcatcgctttcagataacaatggttcgcattaagcaactgccaaccgggacatttttttgaccactacccattcccttccagcaagccccaaccccgaagcccctgcgcgcaagcgccgcccgccgcgccgggtagaagtcagtcgcgttgaagtcctgagcctcgccatgcgccgcatcacactcaaaggcgcggagctggaaggttttccgccggtggggcccgccagttatatcaagctgatcttcccggaacccgggcagaccgagcccgtacggccgctgcccgacggcccgcgtgcggtgtccatgcggacctacacgccgctggccgtgcgccccgaagcgctggaggtcgatgttgattttgtgctccacggggaaggaccggcctcgacctgggcggcacaggccagcgtcggccaggtcttgtacctgatgggtcccggtcctggctaccagccggacacagcctgcactgagcaccttctcctcgctgatgacagtgcactgcctgcggtcgaaaccattttggctaccctgccggcatccgcccgtgcccgggtgttgctggaagtgatcagcgatgccgagcagcgcccgttgcacagcgcggcaaagcttgaagtcagctggctggcacgcggcaccaaccaccgggccgcaggccagccattggccgcagccctgcgcacgctggcgccgccggggcctgacacgcgcatctacctggcctgcgaagcagcggccatgcgccgtatccgccagcagctggtggacgagctgggcgtgagccgcagccagatcgtgggccggggctactggaaactcgatgtggtgaaccaccccgaccacgattacggtgacgacgcctgagccagacacaggcgatgcccggcgcgtatgggcaacaatagccgcatgagcgattgccttcttcagatccgcggcttgcgcaaacactatggcagtgccgtggtggtggatgatttgtccttcgagattgcgccgggcgaatgcctgggcgtgatcggccctaacggtgccggcaaaaccaccaccatacgcatgtgcctgggtctgaccgcacccgacgcaggcgagatcagctacgccctgaacggcgccgagcgcggcttgcgcatgccgcaggatgccctggccatcaaagccagactcggcgtggtcagccagtttgacaccttggaccctgacttcagctgcgcagaaaacctgcaggtttatggccgctatttcggcatcagcgcagccgaggttcgtgcgcgtgttccgggcctgctggagtttgcctccctgacaggcaaggcgtccagcaagcccggcgagctgtcgggtggcatgaggcggcggctgagcctggcccgcgcgctggtcaatgaccccagcctgctgctgcttgacgagcccaccaccggactggacccgcaagcacgccacctgatgtgggagcgcctgcaattgctgctgcaacagggcaagtccatactgctgaccacccacttcatggacgaggcagagcgcctgtgttcacgcctgctggtgctggaccacggcaaaaaaattgcagaaggcaagccgcgcgaactgattgcgcagcacctggaacccgacgtggtcgaggtgtacggcacgggcgcgctggcgctggcgcaatctcccgagcacgcgagtttgcgcgcgctggccgcacgcgtggaagtcagcggtgaaaccgtgtttttctacacccaggatgcccgcccggtgctggaccggctggcctcacatgccagcctgcgcaccctgcaccggcctgccaacctggaggacctgtttctgaaattgacaggccggcagattcgggaggacgcatgatgaatcagtcgatcttccgagcacccgatctgtctgctcgctggtggcccgtcttcatgcgcaacctgctggtctggcgcaagctcgccatccccagcctggtgggcaacatcgccgagccactgatgtggctggtggcctttggttacggcatgggtgcactggtgggcgaaatcaccgtcggcggcacccccgtgccctacatcctgtttctggccagcgggtctatctgcatgagcgccatgaatgcggcgagttttgaggcgctgtactccgcgttttcgcgcatgcatgtgcaaaaaacctgggacggcatcatgaacgcaccggtcagcctggacaacgtgctgctggcggagatgttgtgggcggctttcaaggcactctttaccgtgaccgccatattaggtgtgatgctggccctgggcatcagccacagccccaagctgctgctggcctggcccatcttgctgctggtgggcatgatgttttcgtgcatggcgctgatcttcaacgcgctggccaagggctacgacttcttcacctactacttcacgctggtgctgacgccgatgatgtttctcagcggcatctttttcccgcgcgagcagttgccagacctggtgcgcatcatctccgactggctgcccctgaccaacgcggtggaaatcatccgcccgctgttcatggaccagtggccgtcagccccctggcggcacggcctggtgctggtcgggtacaccgtggccgggttctgggtggcgctggcgctgacgcgcaggcgattcagggcttgagttcccggtttgcaggggaaaagtaaggaccgccaaaagacctcattgacgttcttgtttgtacggcatacatttatgccatgcctcacaccttgccgccagagaccgaagccgacgcccgcgccatgcgcgagccgggccggcgcatgcgttcgcatctgctggacatagcagttgaactgttcaagtcccgcgggctgagcggcgtgtcggtcgcggagattgcgcaggccgcagacgcttttcccagccaggtgacctattactttcgcaccaaggaagcgctgtttgtcgaggccgcctgccgcgaaattctctacacgggcgagcaggctgagcatgcggccgcacaggccggcacgctggcgctttacacacgtgcgctggctgaaagcgtggtggcttcaccgggcctggcgctgtttatcgaggcgctgacgctggcacggcgtcggcaagacctggcgccgctgatcgaacgcactttcgagcgcctgcacaacgaaggcgaccgcgcctatgccgccattcgcgacctgcgtcactggccgcacgacgacgacccggccctgcgtgcccgccggttctgggcactggcgctgggctcggtgctgcgcggcgctgcaaccggcgtgggcaccgaagtcagcgcgcgggacatgctggcgctgctgagtgatgacacggcgccgcaagaccctccggccaacgcccgcccgcaacttcaggtggtcaaatccgccgcaaaggacaaacatgcccgccgccgcacgcgttcaagctgacaccttcttcagccctggggaatggcaggcgctgaccgcgcgatcctcctggaaaggcatcgcgctcgtggcgcactgctggctggtgacaggcgcggccatggcagtgggggtgatctggccgctgagcattcccctcatggtggtgatcatcggcaaccgccagctgggcctgtttatcctgatgcacgacgccgcgcacgggctgctgcatgtcaaccgcgccgtcaacgaccgactggcactgtggttctgcggtcatgagctcaacatctaccgtccctaccatttgcagcaccatcgcttcgtccagcaaagcgaagaccctgacctggtgttgtcagcgcccttccccatcacgcccggctctttgcggcgcaagatcatccgcgacctgagcgggcaaacattcgtcaagcagcgctttggcggattgctaaaaaaactgaaaacccgggccagcggagaagctgcctggccgctgatcgctgcagagctccggcagcagcgcatcttcctgatcagcaacggcgtgggcctggttttgttcagtgcagccggcctgtggtgggcctgggtcttgatgtggctgctgcccatggctacctggttgccgctggtcagccgcctgcgcaatattgccgagcatgcgttgattgagcaaaacggcaccgacccgctgcgccacgcgcgcaccacccacgccaacctgctggagcgcctgttcatcgcaccctactgggtcaactaccactgcgagcaccacatgttcacgcaaatcccctgctggaacctgccacgcgcgcaccgcctgctggcagcccgcggcttcaccgccgacatggaggttcaggccggttatgccaccgtgctcaggctggcctcagcgcgctgaggcaaaacgtgctgtcagctcacgcagattgagctccgtcagcacctgctgcaaccgggtttgtgcggcgcgtgtgttgccctcgctgggcttgggcggccgactcgccaaaatgagctcgtttttcatcgaatgctcccagcccaccagctcggtaaccgtcacctggtaaccatgggcttcgagctgcagacagcgcagcacattggtgatctggctaccaaactcacgcgtgtgcagggggtggcgccagagttccgccagcggacttttcgacaggctcagcgccttgtttttgcgcagcacgccggcaacctcggcctggcagcacggcaccagcaccatgtggcgcgcctgtttatgcaggccaaaggcaatcgcatcgtcggtggcggtgtcgcaggcatgcagggctgtgacgatgtccacctgggctggcaattccgctgaacttgtggcctgttgcaccgacacattcagaaatgccatgttggcaaaacccagacgctgcgcgagttcacgcgatttgtccaccagttcggcgcgcgtctcgatgccataaatttttcccactggcgtcttgccggcatgcgccacattaaaaaacaggtcgtacaggatgaagcccaggtaggacttgccggcgccatggtcggccagcgtgaagggtttgccatccgctgcgacttcttccagcaacggcgcgatgaactggtacaggtggtagacctgcttgagtttgcgccgcgtgtcctgattgagctttccttcgcgcgtcaggatgtgcagctccttgagcagctccatcgactggcccggtcggatttcttcaatcacctgtgccggtttgcccggcgcagccggacgcgcaggctggctggcgcgggagggggtgtttttgggcatgtccctgaagtctagcgttgggggccatctccagacatggagagcgtaggattttttatattgcacacaatttaattgcgagctaaaatacaaccatgtccaacaaatccgatgccatgctcaagctggacaaccagctgtgttttgcgctgtactccacctctttagccatgaccaagctgtacaagcccctgcttgaggagctgggcctgacctatccgcagtacctggccatgttggtgctgtgggagcaagacggcctgatggtgtcggagatcggcgcgcgcctttaccttgattcaggcacgctgacgccgctgctcaaacgtctcgaagcctccggcctgattgcgcgcatacgcgccgtcgaggacgaacgccgtgtccacatcaccctgacggctgccggccgcaagctcaaaagccgcgctgcaaaaatccccggctgcattctggaagccagccactgctccattcccgaattgaccgcattgaccctgcagatgcaggccctgcgcctgcggttggtcgcataaatccgctttctcacgcttttcaatccgcttcatcccgaagcaaacttcaaaggaaccaccatgaccacactcgaaaaagtcctctacaccgccaaagcccacaccaccggtggccgtgacggcaagtccaaaaccgacgacggccggctggaagtcacgctgagctcgcccggcaccgccggcaccggcaccaaccctgagcagctgtttgctgcgggctacgctgcctgcttcatcggcgcgatgaaggcagtcggcggcatgaagaagatcactgtcccggatgacgtgtcaatcgactccagcgttgatcttggcaaaatcccggcaggctacggcatcgccgtgcgcctggacgtaacgctgccaggcatggaccgtgccgctgcacaggccctggttgacgctgcccaccaggtctgcccctactcgaacgccacccgcggcaatatcgacgtgaccatcactctggtctgatttcgcactgtcgccaaagcggcccgcctgtgttgagccggtgggctttttcgcttatgtttgctcgcatgagccgccgggccgttcccaaggcgaccaccgcagcctgaaaggcgaaagttatccagatgtccaccaccactctcctcgttcgcaaaacccatcttgccgaaacccgcctccacgtcgccgaggccagcccgctggccgacggagagatccgggtgcatgtcgattccttcgcgctgacgtccaacaacatcacctatgccgcctttggcgacgccatgaactactggcagttttttccgaccagcgaggatgactggggcatcatcccggtctggggtttcggcacagtggtgcaatcgctacatccgggcgtggccgtcggtgaaaagatctacggctactacccgatggcgaccgaagccgtgctgagccctgcgcggctggacagcaacggcttttacgacgccgcagcgcaccggcgcgagctgcacccggtgtacaaccagtacctgcgctgcaacaccgacccgttctacacctcatccaccgaagcgctgcaggcgctgctgcggccgctgttcatcacctccttcctgatcgacgacttcctcgccgacaacgattttttcggtgcttccggcgtcgccatgctgctgtccagtgcatcgagcaaaacggcttacggcacggccttccagctggcccagcgcccgggcatcgaagtcatcggattaacctcgcccggcaacgtggccttctgcgaaagcctcggttgttacagccgggtgctgagctacgaccacctggagagcatccccgccgatcgcgccaccatctacatcgactttgccggcaacgccaaactgcgccatgccatccacagccgctttaccaatctaaagtacagctgcgccatcggcggcacccacgtcagcgagctcggcggtggcaaggacctgcccggcccccgcgccacgctgttttttgcgccagcgcagatcaagaagcgcagtgcagactggggcaaggaaggtctgggccagcgtctggtcgaggcctggcaggccttcagcacacgcgtcgcgcaagatcccacgccctggttgcaggtccagcgccaccagggcgacggcgccgtggccgctgcctaccagcaggtgctggccggtcagggcgacccgcgcaccggacacatccttgccttttgatttgccgcaaagatgctattattttaatagctgcttgcgcatgactgacgggggctggaggcacttttgactcacaaaccgtgtgagcaacgacaatagaggcatgattgacgagcctctgaccgacctgcccccaaccgccatgccgcccgaggcactgcacgcctacgaaaagctcacgcccgacgtggtgctcgatgcgctggccagcctgggcctgctgggcgatggccgcctgatggcgctgtcgagttacgaaaaccgggtctaccaggtgcacctcgaaaccccggcgggcacaggcgatgctgccggcgacatcgtggtcgccaagttttaccggcccggccgctggagcgacgagcagatcgccgaagaacatgcgttcgcggccgaactgatggcggccgaaattccggtggtcggtgcgctgacgattgacggccgcaccctgcaccacttcaatggcttcagcttcagcgtctcaccacgccgaggcggccgccggcccgagttggaagacttcagcgtgctcgaatggataggccgcttcctcgggcgcatccacaccgtcggcagtgcgcagcccttccaacaccggcccgcgctggacctgcagaccttcgggcacgccagccgcgacctgctgctggccggcaactacttgccgctggacatggcctcgcgctggctcaaggccttcgaacaagccatgagtgttgcgcaggcggtgtttgaaagcgtgggcaacatccgcagcctgcgcctgcacggcgactgccacccgggcaacattctctggacgccggaaggtctggagggcgcgggtccgcactttgtcgatctggacgatgcgcgcagcgggccggcggttcaggatttgtggatgctgctgtcaggcgatcgcccgcaatgcctgctgcagctcggtgcgctggtcgatggctacgaggagttccgcgaattcccccggggcgagctggccctgatcgagccgctgcgcaccctgcgcctggtgcactacagcgcctggctggcgcagcgctggcatgacccgatcttcccgatcaacttcccgtggttcggttccagcgactactggaagggccagatcgacatgctggaagagcaaaccgaagccatgcaggaggcgccactggtggcgtgagcgccacaattacacccaaactcggtctgaaccccctgaaacaagccataacggacgccagccaaatgctgtgacaaagtaccaaggaaaacgggcaccgaagtgcccgtttcttatttgtgtcttcgggagcaagctccttagacttgttgccgacagtccccaccaccgcaacgctcgatagggttgtgagtatgccaatgtttcgttaggcttgcaacaaattgtttacgaaagatttgttatggcatatcgcctcgcgcttgatgtgggtacggcttcacttggcctggttgccttggctctcgatgaccagaaacagccagttgatgtcgcccactttgctgttcacattttctccgagcccttgctgccagcaaaatctgggggcataggagaacccaaaaaggccgctcgccggctggctcgccagcaacgacggttgacagaacgccgggcgcgcaggttgcgccgcattgcgcatctcgcacccttgatcgggttgaaggccagcaaggtcgcccctgatgacggacaacacatccacgccttgcgagcagacgcgatcaaccaacgtatcgagttgcctgatctgctgaatgtttttctcaaactcgcaaagcggcgtggctacgcgggtggcttcaaagttaagaaggatagtgaagaggccgggcaagtacaaggcggcattgaagatctccaggcgctgcttgcagacaacgcctgcacaacattgggcgagttactcagcaaacgctttggcgatacagagcatgccggacggggacctcgggaatcgctgaagctcaaggcacttgggctctacgctcaccgagagatgctggaagaagagtttgaactcatatggagtgaacaagccaaacatcatccgattctcaatgtcgaggccacagcctactcggtcagaggattgtcggaaacgctgccaatcaagcagcatttcaaagaagcgattttttaccaacgtccgttgaaatctgttgcaggcatggtgggccaatgctcgctggagccgacgctagcccgcgcgcccgcggcacaacctgccgcacaggccttcaggattgagaaacaattggccgacctgcgctggggcatggggcgtatgcaacgcgtgctgagcaaggagcaacgccatcacattcgcgcaatgttgctcgaccccgagcaactgaacaaggacggtgcgcttaccttcggaaaaatctacaaatcgttggaaaaatccggtttacggcaggaatttcccggtcagttcaatacggaccgcttcagccgggaaacgcttttaggagatcggacaacaaaagccatgagtgggctcggcatgttgagtcattggatcgccctcgacgccatcacgcagttgcgcgtcatcaacttcatcgccaatcttggctccccggagtccgtggattcaaccaactggcacaagcggatggagcctccgccaaagccggaagttgtcgctttcatcaaccagtggcttgagtcacggacatttgatcgcctgagcaagatgggctttgacacgggtcgcgcggcttacagcatcaagactatgaagcaactcaccgcgaagatgcaggatggcgaaggctacgacgaacacgccgcacgggaaacggtttataagtctcaaccccctaccggcgaactattgatgcatttgccgcaacccgcacccaccggcaacgtggtggttgacgttgcgctacgcgtagtccgtcatgcggtcaaccaatgcctgcaagccatgggccagcccccggcacaggtcatcgtggagctatcgcgcgacatggcattgggcttgaaagcacgtggcgaaaaagaaaaaggtatcgacaaacacaggcgagcacgcctgtatgccaaaagtcagatcgagggcaatcaggctggccgcacggccacaaacaatgacatcttccgttatctgcttgcgcaagaacaggactttcactgcccgtattgcagcaagcgcatggaacttgccgaggctctggacggcaacgcgaccaatgtggatcacatcctgccccgctcgctgactcaggtaaaacgcgaacgctcccatgtggtcatcgcacatcggacttgcaacgcagaaaaagcaaatagcgtaccgcttgaggcttttaagggtgacgctgatcgaattagcgccatcgaaaattgcgccaatattctgaagcgcaaacgcagttaccgcaaagccaactatttgatgacggaaagttatgaagccgaaaaactgaacgacaaatctctcgaagactttaccgcaaggcagtttgtagaaagctcctggattgccaaactcaccggccagtggatgaaagatatttgccaagatgtaagcgtctcacgaggcgagctgacagcccagctacgccgagcttggaagttggaaaccgttattccacaagtcaggctagaaaccaaggtcgatcccaaaagtgaaaaaccggacaaccatttgcccctgcttgatgatgacaagccgccgaagccgattacccgcgaagaatttgaacgcttccgtgcctgctgggaaaaccatcatggcccggaggtggaacgaaccgaccgccggatggacaaacgaatcgatcatcgacaccacttggtcgatgcgctggtcattggcttgactgaccgcagcctctacatggacatggccaaaggctacaaggagcgcatggaacaacgtgctgctggcttgcgcggtatcaaaccatggcaaacgcccgaaccaccagttcggaatatcagggaggtggcgctgcgattggtgcgcgatgtgaaagtgaagcacaagactgatcgatatgcagctggggcgtttttcgacaagatggcctacgcaaagtcttatacagacgatggaaaagtccgagttgtgagatcggtcgaccttctgaatttggccgacaagacttttgcgctggacaaaacgcgtactggcattgccaacatcgtgagcacggagactcgacacatagtgctatccgagtttgagcgcagagtctcaaccggacaagatgtaaaaaccgctttgtcgtcatactttgtagatccgcgatacggaaccatgatccaacgagttcgcgtatatcagcgcgatggtcgtggctttgtgaacggcgaggatgccgtcaagatcaatttggaagggcggccctatggcgagagcgcctttggggaaaaacactacctcagcgacggctacgcttacgttgcacttatttcagatgacgtcggattgatcaatgatgctgtgtcagttcgctctgcagatgctccaatcttcgaccagtcacgtgtccgcaagcgaatttttcggagcgacacggtcgttgacgagcacggaaatcgccatctcgtccatcaaatacttgctggcggggtaattcgtaccgcacctttgattgaatcacgcagttggagtcagcttggctccgaagccggcgcgaagcggtttagcaaaacggacgttatgcggctccaagttgaagcatgagcgcggaccgaattctcctcatcgaaagcccatgcgaattgaacatcgacatcggcagagtccggattcgtcgcgccgacaaggccgactcctatgtggcccctgcggacgtggcagtactggtgttgcaccatcacaccattttgctgagtgtgggaactttgcgagagctggcattagcaggcgcctccatcatggcgaccgacgcgcaacacatgccctgtgcgttgatgcttcccacccaagccaaccgcgcagcggcttcccgcttacgcaggcaaatcaaacatttggatgacgcactgtcccaagccctttggcaggaaattgtgcgatcccgcattcgtactcaggcggcaaacctgcgccactttgaattaactggggcattgcgcctagaacgcatggtcgatgaggttgagacagccgataggacgcatcgcgaaggccaagcggcacgccactactggcagcacttgtggcaagacgcggaaccaggcttcaggcgcgagaaacaaggcgcagaagactccgtcaatgctcgattgaattttggctatgcggtgttgcgcagcctggtggcgcgcgaactggttgcggccggcttgtcacccgagttgggcgtcggacaccacagcacggaaaacccattcaaccttgcggacgacttcatggagccttaccgctttgtcgtcgaacgagtggcccgccccagcgccgccgatggcgaattcgatgcggtggcgcgcgtggccatgtcacgcatcgtcgagcaggccgttcggattggaaaaaaggactatcggctactacctggagttcgggaaacaattgcaagctatgttcgcgtgttggaatccagcaagggcgaactagccctgcctcatgagtaaacgaccatggccgtcaacggatggcgcgtaatgtgggtactggcagtgttcgacgtgcccgtgcaaactacggaagaaaggcgggcttataccagtttcagaaagatgcttctgaaggacaatttcatccagcatcaatactccgtctacctgaaacatttcccaaccatggcctcggcgcaggcagaaattgaccgcttaaagccatcagttcccgaagacggtcacgtggcattcttcatgttgacggacaaacagtatggaatgacccgagaattctttggaaagaacgctacaaaaagagccccagatgagcctgatcagattgaacttttctagaaaaaatcccgccaaatcaatgacttagcgggattcagagtctatcaagcgttccggtggtggggtgtcggaaccaacgtggtcattgcccagctgcgggcacggagtctatcaagcgttccggtggtggggtgtcggaaccagaggcat

SEQ ID NO: 2841 - DNA, 23180 bp, synthetic construct
  source 1..23180: mol_type = other DNA
  misc_feature 1..23180: note = Synthetic
tcagaagattcgccaagagaatgaccatggtccctcgatactctatattcttgatggtggaagcggcaaggatgtgcctttggatgattacgagacaagggtgctagagcggctcatagaggagcgcgtgggagagggggattggcagggggcgagtgagcgatttattgccttgatcacctttcaaattgaggagacaaatgtctatctagataggacaaaagagacgctagagcaatacgccgactttctcaaaaagagcccgctctccccaagggatgagcttgcaaggcttcgcgaggagatcaagaatctcaggcgtcctgatagttatgagagaaaaatcaaggcgcaagagaggcatataaagagggtgggggagctaatcgaatcgttctagaatggactaagaggagcgagaatcctaaaagagaactctttgggataataggagagctgatggccagagtgcttaagaagggctcgacttaagaggagaagagaggatcgaagaggtaaggattcgcctccaagagagggggagggatggagtttaacctgaatttggaggaggtttgactggagtttaagctcccagatcaaagattctcccccattggcttgatgaagaaggaggagggagagggcaaagagggctttttgaaaatcatgctttaatccaaagagctccaatgattccccctgttggacacaagagacgatccccttggctttcaaatctccctctaggagttggaggattttggagatttcggcatgaggtcgaaaaagggagggatgggtgtcgttttgggctaggtcgcaaaatcgagcgatctgttggcttatgagatcaacctcttttagaatcgctttttgcaaggattgaatcctcgtaagagaggggagctttccttctgggtcgtctaggttttcggctaggcaggtgataagctgtagagattctctccactcattggcgatccttgtcgcggcttgactgacaaggtgggcttcgccttcaagaagcagggagtgtcgcaaggggaattgagtcataattcgcctttgggggttgttctagcttgaaaatagtagatatttaaaagaaaataatccctaattctatcttataaaaaggtaaatattactgaatttatataaactttatggaaatgttcctttgttgtggcctcatgatggaatgagtaaattttgcccaaaaagggggcaagcatgactcaacgagatatggctggatacttgggggtggacacgaagacactctataattggcgtaaggagaagcctaacctctataaaacgattctcttgggatttaaattcatggaggcagtggaggaatcaagaaagagttacgagaaactcaagcgcttaggtgaggagcttggagctaaaagctccaagccctgaggttacattcgctcaatcatgacttgggcaaattcggagcatttcacctctttggcgccctccatcaagcgggcaaagtcgtaagtgacatttttggattcgatcgcctttttcatggaggagacgacgaggtcggccgcctcgatccagcccatgtggcgcagcatcatctctgcacttaggataagagagccggggttgaccttgtcaagtccagcgtatttgggcgcggttccatgagtcgcctcaaacatcgccacgctatcattgaggttggcaccaggagcgatcccgattcctccaaccatcgcagcgagcgcgtcagagatatagtcgccattgagattcatggtggcaatgacatcatattcagcagggcgcaagagaatctgctgcaagaaggcatcagcaatgacgtctttgatgatgatctctttgcctgtttttgggtttttcatggagcaccaaggacctccatcgatctcggtcgcgccaaattctcgtttgagcagctcataaccccacttcatgaatccgccctcggtgaatttcatgatgttgcctttgtgaacaaaggtgagggaggcgcggtcgttgtcgatagcgtattggatggcttttctgatgagacgctcactcccctctttgctcacgggcttgattccgatggcgcttgttttggggaatcgaatctttttcacctccatttcgttttggaggaattggatcactttgttggcctctttgctctcggcggcaaactcgattcccgcgtagatatcctcactattttcgcgatagatcaccatatcgaccttgtgaggctctttgacagggctggggctgccataccagcgcacagggcggaggcagacatagagatccatcatctggcgcaaggcaacattcaggctgcgaaatccttcgcccacgggcgtggttagagggcctttgatggagaccttgaagtagttgattgcatcaatcgtatcagggaggagccactgatccatcggagagaggctcttttcatttttaaacttttcatagcacttctcgcccgtgtagacctcataccatgcgatttttcttttgcctccataggccttgttcaccgcagcgtccacaacacttttcatcgctggcgtgatatccatgccaatgccatcgccctcaatgtaggggataatggggtgatcagggacctggaggattccctcaggggtgagggtgattgcctcgccttcggtgggcaaggggagaaatcggggattgtagccttcaaaattagccatgcgcgctccttgtggtttgaaacttttgcctcaaagtgtatcaagaactccaatatttttttcttacgctcgcgccattcagcaaattcttgaaaaagtttaaatatacttaaactcatagagggttcagtttggtatcgaattgaattgactttttaccgaggagaatcttgcatgggcacagtcactttcacgaataacgaaacgggcgaaaaatttgaatttgaaattctcaaccccacgcgaggtccgcagttggtcgatttttcgaagttttatgagacaacaggaatgttcacctttgaccctggctatggttcgaccgccaactgtaaatcagagatcagttttgtggatggaaaaaagggtgagctggtctactatggacaccctatcgaagagctggtggagaagtataagtttgttgatgtcattaaactgctcattggaaatggctatatctttcccaccaaagaggaatcggatcaatttgagcgtgagctagtgcgccgctcctacatccacgaggggctccgaaagattatcgatgcttttcctgatggcgctcatccgatggcgaatctctcctcatccgtttccgcgctctcgactttctactacgatcatatcgacatggagtatgaggcagagtatcagacgatggcacgaagaatcatcgccaaaacccccacgctagcagcctttgcctatcgaagctctgtgggatcaccttttgtctatcctgatgcagaccgcggctatgtggaaaacttcctttatatgcttagagcctatcctcatggaaagcttaaagaggagatttcacccattgaagtgagtgcgcttgatacgatctttatgcttcatgctgaccatggtcaaaacgcctctacggccacagtgcgcaatgttgctagtacgggagtccacccctatgcggctctatcagcgggcttgagcgcactttggggcaaggctcatggaggggcgaacgaatcggttatggatcagcttgagatgattggcgatgttaaaaatgttgatcgctacattgccaaagccaaagacaaaaacgactcctttagattgatgggctttggccatcgagtctataagagctatgatccaagggctagaattctcagaaaactcaaagacgatctagaccaaaaaggggtcaagatgaatcagcgcctcgtggagattgccgagaagatcgaagaggtggcgacgcaagatgaatattttctctccaggagtctctaccccaatgttgatttctactcaggaatcatcctcacagcgcttaagattccaaagagcatgttcacgcccattttcgccatcggaaggatgcctgggtggtgtgggcaagttttagagctgcttcaagagcccaatgtcaaaatcacgcgtccccgacagatgtatgtcggaaaataacgaaacaattttggagtgaatcaatcaatgcaaaacgagtggaatccgcaaagctggagagagaagcctatccgccagcaaccaacctataaagatagagagcatctaaagaatattgagcgcgagcttaagcagtatccccctttggtcttcgctggagaggctagatcgctcaaaaagcgacttgctgatgtgacggaggggcgagcgtttttgctccaagggggtgattgcgcggagagtttttcggagttcaatgcgatcaacatccgcgatatgttcaaagtgattttgcaaatggcggtggttttgacctttgcggggagctgcccgatcgtcaaagtggggcgcttggcggggcagtttgccaagccaaggtcaagtgatgaagaggtgatggatggcgtgagcttacccagctatcgcggagatattatcaatagcatagagttcactcctgaggcgcgtgagcccaatcccaagcgaatgctcaaggcctacaaccaatctgcggctaccctgaatctcattcgtgcctttgcccaagggggattggcagatttgcacgaggtgcatcgctggaatctaggctttattgagagctcgtttggagagaggtatcaagccctctgcgatcgcatcacagagacgctctcttttatggaggcgtgcggaatcacctcagccaccactcccatgctccatgagacggagttttatacttctcacgaagcccttttgctcaactacgaagaggcactcacgagaaaagatagtcttacaggcgactggtatgactgctcggcgcatatgctttggattggagagcgcactagagagctagagggcgcgcacatggagtttttacgaggggttaacaatcctgtgggcgtgaaggttgggcctggcgcaaccaaagaggagcttcttggaatctgtgacattctcaatcccctcaatgaggcagggcgattgaatttcatcgtgaggatgggcgctgaaaagatcggtgaaaagcttcctgcactccttagaatcatcaaagaggaaggacgcaaggtgctgtggagtattgaccccatgcatggcaacacggtcaaagccagcagtggctacaagactagagccttcaatcaagtcctctctgaagtgcgctcgttctttgatattcacaaggcagaaggcacctatgcggggggaattcacctagagatgacgggtcaggatgtaacagagtgcatcggtggaagccaaaagatcaccgaagagggtctagcgtgcaattacaacacgcagtgcgacccaagattgaatgcgactcaggcgcttgaacttgcctttttgatcgcggagattttgaaaaaacgctaagaatcgaaaaggattcttagctttgggctttgccaatggcgcaggagatgaagctcttggccttggtgaagaatccgttctcatcacctaccacgggatagccaagctctttgagcttttttttcagtgcctcttcttgggcgtcttcgatctctagggtgagactcttttgctccacatccacttcgacttctccaaactcctctttcagcgcttctttgacgcgattggcgcaacctccgcacttcacattcatcacttcaaaactcttcttcatgagaatctctcctgttttttggattactttagcgtgaaatggttaagaatctcctaacacttgagaggcagccgccaaaacctcttgaggggcgaggagggtcatgcagtgatgatgcccaagggggcagatgcgctttttgcatggggcgcagggaaggtgcttggagaggagcagggtctcgctcatgggcttccatggtgaagtctctttggaatcagtgggtccaaagagggcgatgaggggaatcccaagtgcgcaagctagatgcatggggccactatcgttggtgatgaagagatcaagcgtgccaatcacatcgataagttggctaaggtcagtctgggcggtgaggtctagaagcaggggggagggctcaagagatcgcaagatgcgctcattcccctctctctcgccctcacctccgaaaagcatcactccatagccctcttggaggagcgaagagatgaggtgagcaaaatgcgcctctggccatcgctttgcacttccataggcggctccagggttgattccgataagtttgggaacagggaggggcttggggcggggctggtgggtgatattgagggagggaatctcgctaagagcgccgatgagtggctcaagaagtttggcgtagcgctccacctgatgaagcgaagagggggtctggagggaatcgctcagcaaaaaagagcgccactctttagcataaccaaggcgccttggggtgcgggtgagaaagaggagcagggcggagaggaagttgttttgaaaagtgagggcgatatcatgtctgccagcgcgtctggcgatatgaagaatccctttgagacggcttttggcctttttgctatcatcgacaatgaggcgcgatactctagaatctcgctcaaaaagagcgcacgagacaggggagccgatgtaggtgaattgggcgtgagggaagcgatcatgcaggagctccaaggctggggtcgccatcacggcatctccaagccaggtgggaagcctaaccaaaatcttcatggatgaccttcgtgtgtttgccaaattatacaatttttacctttagggcgctaaaataggggatttcaaacccattggagagacatgaaagagcaggcattgatcaccccaagaacgctgagtggctttaaagatcgacttccccaagaggcaatggcgaaaagtcggcttttgcgcacagtgagcgaagtttttgaagggtttgggttcgtgcccatcgagacgccccatctagagtatgcagagatacttgtgaagcaggggagtgatgaaattcaaaaagagctctatcgatttttcgatcatggcggaagggatgtagcacttagatttgatcagaccgtgcctttggctcgtttcatctctcagcatcgcaatgcgctaggacttccctttaagcgctatgctattgggaatgttttccgtggagaacgagcgcagaggggtcgctatcgtgaattcactcaatgtgactttgactttatcgggagcgaatccattggaagcgatgcagagattatccaggtgatctatgcctctctcaaggctcttggtattgagcgtttcactatctcgatgaataatcgcaaaatcctcaatggaatctgcgactattttggggtcaaagagcaaacgagtgatgttttgcgtattatcgataagctcgataagattggcgaagagagcgtgatcaaggagcttgttgaggagcttgggttgagtcaagagagcgctagaggaatcttgggattcacctctttgaagcaagagaggagtagcgaggagttttttgccaaggtggcttcttatgaggggctcagcgattcgctccgagagggaatgggcgaaatgagagcgctctatgcgatcttggatacgctagagatggacagggcatgctacaagatcaacttttctatcgctagagggcttggatactacacaggaatcgtctatgagacgacgctagatgcactccctagtattggtagcgtctgctcagggggaagatacgataatctcacgcagagcttctccaaagagcgcatgagtggcgtgggagcctctattggcgtggatagactgctcgctgcgcttgaggagctggggttgcttgaggggcgggggacttcggcgcaggttttggtggcgtgcatggaggaatcgcagctcgcctatagttacaaggtggcggagaggctacgcactcttggaatcaagagcgaggtctaccctgaggcggtgaagccaaagaggtcgctggcctatgccaatagcaagggacacccctatgtcgcggtgatcggtgaggatgagctcaagcaaggggtggtcacactcaaagatatgcaatggggcgatcaaaagccctgcatctcaatcgaggcggcggcggagatccttttaggctaaatcaaaggattcttcgctacaatttcgcctcttttatatcttccatgcgctcgtagctcagctggatagagcaacaggttgcggtcctgtaggtcggggattcgaattcctccgagcgcaccacttataaaacttccgaatcgtactgtgatcagacaattcaacccttgtgataggctttcgcctgtgcgattgagtcttcttcccaccatgtcggcctgctttaattggaaaaacaagaaaaggacattcccgaagacgaaagatgtgaacgatctatggggaggtgagaaactcgcccgttttgatcggagcgagggcttgagcacttttgaccaccgtgcgggcgatgttctccaaaagtgatttcaatagtgccccctcttctgagcttctgtgagcgtcttttgaatgaattttagtgcatctatccatgtgccagtgaatcgaactccgctttgtgggtgggtgaattcgcacacctcaagaaagcgtgaatccattttggattcctcaatttgggcgttggacacgtcgcaactaaaaagatagagaattctctctttattggtgcgccaaatcccatagttgcccagtggctcatcgcccccttcgtattctggaggctcgccactttcgctgatgtcccagttgtagcagtcgttttcaatgattagagtcctagccatttttgaatccttgttaagagacttaagcggtgttcgactttgtcgaagtaggtgtgagccgtccacttgtcgtagtatttcgtgctatctgtgtcaggcggaaaggcggtgatgattttgccatcacgactgagcacgacgagcacaccgttgctgcccaagatagtgcgcctatcaccatgttcatggtgaaccccctcgcggctgatgtttcccatcgtttcgcgcaaaagctcatcgacacttctgtatctcgtctttttgagatgtttgttgagaatttttttatcaatctcatctcccacctcgtattctctcccaaactcatcgagtttcatctgtttgacttgaatgtcgctcatttggcgcaatatcgtcctgcatccgaaatgatagggagggattccgagattggcggggagcttgtggctccacgcccctgcacgctcaagagagaggttggtggttgttttggcttcatcgacgcttttggcttggatgattgaattatactgttttttgagatgagagagggggatgacacggaggtgcatggagcggcaaatgttggtcgtgcgctcatcgatcttggctacgacttgcaggtagtcgtcctcttgctcaatcgccctggagactacgcctagattgcgcccttgacgcaggtgaaaatcaatcgctgccttgctttttcttggtttcaaactccatctgggcgtaaagaaacacacattgtaatacaaaaatggctaagaaatttaaagtatagctaagtatcatgtatataatataatcgtatagctaaacgaatagtttccctgctgcctaataaaatgaataacttgagcgagggatgatcctagggaggggagatgggagaaatggaggttaggtaagaaataccatttagaagatactccgtagagtagaacttcgcaggatgcctccacaccccttattatagccgctgcctactcagccatttcgcgcagcgacgacgattatatgttagatttttttaaaaaatactaaaatttggagcgaagcttatgattgaacggattttaggggtagacttggggattagctcattaggatgggcgattgttgagtatgacaaagacgatgaagcggcaaatcgtatcattgattgtggagtgagactttttaccgctgcagaaacccccaaaaaaaaagagagccccaacaaagcacggcgtgaggcgcgtggcattcgtcgcgtcctcaatcgccgtcgcgtgcgaatgaatatgatcaaaaaactttttttgagggcaggactgattcaagatgttgatttggatggcgagggcggaatgttttatagcaaagccaacagggccgatgtgtgggagttgcgccatgacgggctttaccgtcttttgaaaggggatgagttggcgcgggtgttgattcatatcgccaagcatcgcgggtataaatttatcggggacgatgaagccgatgaagagagcggtaaagtcaaaaaagcaggtgttgtcttgcggcaaaactttgaagcggcagggtgtcgtacggtcggcgaatggctctggcgagagcgaggagcaaacggcaaaaaacgcaataagcatggagactacgaaatctccattcatcgtgacttgcttgttgaagaagttgaagcgatttttgtagcacagcaggagatgagaagcactatagcgaccgatgcacttaaagctgcctatcgggagatcgctttttttgtgcgtccgatgcagagaatcgaaaagatggtggggcattgcacctatttcccggaagagaggcgtgcgcccaagtctgcaccgacggcagagaagtttatcgcgataagcaagttcttttcaacggttatcatcgacaacgagggctgggagcaaaaaatcatcgaacgcaagacgcttgaagagttgcttgattttgcggttagcagagaaaaggtcgagtttaggcatttacggaagtttttggatttaagcgacaatgaaattttcaaagggttgcattacaaaggcaaacccaaaacagccaaaaaaagagaagcgacgctttttgatcctaatgaacccacagagttggagtttgacaaagtcgaagccgaaaaaaaggcatggataagtctcaggggagctgctaaactaagggaggctctaggcaatgagttttatggtcgatttgtcgcattaggcaagcatgctgacgaagcgaccaagatactgacctattacaaagacgaaggacaaaagcgtcgcgaacttacaaaattgccgcttgaggccgagatggtggaacggttagttaaaatcggctttagtgattttttgaagctttcgcttaaggctatccgagatatcttgcccgcgatggaaagtggtgcccgctatgatgaagcagtgctgatgcttggcgtgcctcataaggaaaaatcggcaattttgccgccgctcaataagacggatattgacatactcaaccctacggttatccgcgcatttgcgcagtttcgcaaagtcgccaatgcgcttgtgcgcaaatatggagcttttgatagggtgcatttcgaactggcgcgcgaaatcaataccaagggcgaaatcgaagatatcaaagagagtcagcgcaaaaatgaaaaagagcgcaaagaggctgcggactggattgccgaaactagttttcaagtgcccctcacgcgcaaaaatatcctcaaaaaacgactctatattcaacaggatggtcggtgtgcttatacgggtgatgtgatcgaattagagaggctgtttgacgaggggtattgcgagattgatcatattttgccacgcagtcgaagtgcggatgacagttttgccaacaaagtcctctgtttggccagggccaatcagcagaagacagaccggacgccctatgagtggtttgggcatgatgcggcgcgatggaatgcttttgagacaaggaccagcgccccgtcaaatcgtgtgcgtacgggcaaggggaaaattgatcgcttgctgaaaaaaaactttgatgaaaatagtgaaatggccttcaaggatcgtaatctcaacgatactcgctatatggcgcgcgcgatcaaaacctactgtgagcagtattgggtttttaaaaattcccacactaaagcccctgtgcaagtacgcagtggcaagctgacaagcgttttgcgctatcaatgggggctagagagcaaggatcgcgaaagccatacgcatcacgccgtcgatgcaatcatcatcgcgtttagtacgcagggaatggtccaaaaactctcagagtactatcgcttcaaggagacgcaccgcgaaaaggagcgaccgaagcttgccgttccgctggcaaacttccgcgacgcggtagaagaggcaacgcgcatagagaacacggagacggtcaaagagggcgtcgaagtcaaacgactgctgatcagccgcccgccgcgtgccagagtgaccgggcaggctcatgagcagaccgccaagccctatccgaggatcaaacaagtcaaaaacaagaaaaagtggagattggctcctattgatgaggagaaatttgaatcattcaaggcagatcgcgttgcaagtgccaatcaaaaaaatttctacgaaacgagtacaattccgcgagtcgatgtctatcataaaaaaggaaaatttcatctagtgccgatctatcttcatgaaatggttttgaatgaattgccaaatctttctcttggtacaaatcctgaagccatggatgaaaattttttcaagttttctatttttaaagatgatttaatttctatacaaacacaagggacgccaaaaaaacctgcaaaaatcatcatggggtattttaaaaatatgcatggtgccaatatggttttgtcatcaatcaataacagtccatgtgagggctttacatgcactccagtcagtatggataaaaagcacaaggacaaatgtaagctgtgtcctgaagagaatcgaattgcggggcgatgtcttcaagggtttttggactattggagtcaggagggcctaagacctcctcgaaaagagtttgagtgtgatcaaggagtaaaatttgcgttagatgttaaaaaataccagattgatcccttgggttattattacgaagtcaagcaggaaaagcgcttggggacaattccacagatgcgttcagctaaaaaattggtcaagaagtagcaagtcatggcggcatggcggacggtggtgatcgcgacttcttgtcacttgcgcgtgcgtgatcggcagttggttatcgagtcgagagagggggagaggacgcagttgccgcttgccgatataggtgtggtgatcgtcgaaaaccctcaagtgacactatcggcagcactcctttcggcactggcacaggaggggacggcgctcatgtcttgtgacagctcccatcttcctgatggtgtgttcgctccttttgggacgcacagccgtcatacgcgtgccgcgcgggtgcaggcagtatggagtgagccgttcaaaaagcgctgctggcaaaagatcgtccgtgccaaggtttcctctcaggcggaggtgctgcgtcgggttggggcggaggatgctgcccgtaggctggaaaatctcgtcggcaaagtcacttctggagatactactggggtagaggcacaggcggcgcaggtctattggcgctcactttttgtcaatttcaagcgatgggatggtggactggatgcacgaaatggcggcctcaattacggctatgccgtgttgcgcggagcattggggcgcgctattgctggagctgggttgatcccggcatttggattgcatcacgctggagagctaaacagttttaatcttgcggatgatctgatagaaccgtttcgtccttttgtcgacttgctcgtatgggggctctttctcgagcgcacgggcgatgacccgctgacgcgagaagagcgtatgcggatcgcacagatactaggcgagagctgtatcatgactgagcgatatgagacgcttttgtcggcgacacagattattgcacggtctttggtgagtgcaggagaacagaaggagagcaggcggctgattttgccatggatgggtgaagatgatgtacaaggtgaagtttatgaggctgatggtgatgtttgacctgccgacggggacaaaaaaggagcgcaaagcctacacactctttcgaaagtttctaatcaaggagggctttgagatgatgcagttttcggtctatgtgaggatatgccgtggggcagatatggcgctggcttatgaggatcgcatccgccgaaacatcccaccaaaaggccatgtgcgtagccttgtgttgacaaatagtcaatatgaacggatgcatatcctccttggagggccaaaatcccaagaaaaaatcggggcaaaacagcttgtattgttctgaatttgagcagttttttgttgagagaaagagtcaaaaagcccttattatagggctttttgaggagaactattatagcgaggaatggctgagtaggcggctataactctttgtcgtctgctctgagcatactgatgattatagcgaggaatggctgagtaggcggctataaccatcagcttctatttccttgcccctgaaatattatagcgaggaatggctgagtaggcggctataactatacttcctccctcaggcatgattgcttggattatagcgaggaatggctgagtaggcggctataacgtgttagcgtacttcttgtaccattcttttattatagcgaggaatggctgagtaggcggctataactatttcgactcagttgcaggctatgtagctattatagcgaggaatggctgagtaggcggctataacttgtgagggtatatgtaccatcctcaagctattatagcgaggaatggctgagtaggcggctataactgttatggtgctagccgtgtcgatgtattcattatagcgaggaatggctgagtaggcggctataacccttgttgcaatgaaaacaagatcaaccttattatagcgaggaatggctgagtaggcggctataacgctcaattagattggtaacttctttggcgaattatagcgaggaatggctgagtaggcggctataacgggtttatcgtcaaattttatcgaatgcgatcaatctcctcttccaaagaggcgatctctttggcgaggcgctccagcgtggcaaatcgctttgaggaatcatgctcaaaacttgcgggtagggcgagctctaggagattctcaggagtgatgatgcttgctgcgcttgattcgtagagtccagagacgagcttttgcccctccttggagaagagatagaggtagagtgcgatcgctttctctttttgagggaggcgaatcacgatgattcccgcgttggcgatggcgagcttgtcgcggtagccctcacccaagagggtcactttgggcgagcttccccgaagaggcaggaggatatcatagggtttgagtgcataacggaggattttttctctatcgccgctgcttcgcaaggtaccccgatggtcggtgaagcagtagggggcgaagtcttggattccgatatcaaggtattcaagtggcacatccttgctgccgccatagacgcgctgtcctcgaaagatgagaggcttgagcgaggcgagcgagagggttttttgaggtttgagcgcacagaatcgaagatagttttgcgcccttagatcgtgaatatcgatctcttcgatgggggtgagtttagagtattcgctttcgcgtttttgcctatagagggcgagaatctcttcgattcctatgaggcgattgtatttgccatctttttgccaaaagcgctccgaagtggcatcgatatgaagaatcgaatcgctatgcgccgcgaggacaaggatggagaagtcatgactctgatgggggaaaatatttttagggagttcaatgatcgcctcaatcacccgatcctcaaccattctttcgcgtagtttttcttcgagaaaagatttttgaagtgtctgattgcgcacgataaagacccctctttgtttgaggtgcatgagggcatgagttagaaaaacaagctctggagagctcttagcgaggattccatagcgggagaatcgctcatcatttttgaggtattcgattcctaagtgtgctgagaaggggggattgcagacgattttgtcaaactgcctaaaccccttttcgtttttgaatacgggtttcttgaggatgtcattgacaaagaggtgcatctcttggattccccctacgcgtgccatgagtttggcgattttggcgagtcttccatcgagctcttcgccaaagagccggattgttttggagcgtttactgagactcaaaaagagcgttcccatgccataacaggggttatagacttcatctttgggcgcaatatcgagcagagaaatgatgagctcattcacctcttgcggggtggaatagacatagagcttattgagcgtgcgcttgatggtgatggtgtggatgaattgttcgatgatttcaggggtgagaggcgtttcggcgatggttttgagaatcttgccgacattgagattggggtcggccctagtgtagagctcctcgcccatgagctctttgaggtcgtattcatagagagggcgaaactctttgcgccgatggtgaagtgacacaaactctaggagtgcctctttttgctctagtttaaagatgaaaaactgcaaggcgagggcgagactctcaaagatatcggagtgatagcgcttgatgtagtcaaacatttggagcagttcccgcacaaaatcccctttggcttttttagaaaactttaaagattttagccctttttttataaatacaagctgttttttaattttttgtgtgaaagcgtaacaccccatggcgaatcgacataaaatctaaaatacatattgtatttctagttatttatgataaaatcccccaaaaatctaaaaaatggcacaaaaactatgattgaaaccctcattcacaagctccaaaaagatcactttttgacccttgaggtggcgcctcacgcctccccgaccctcactccattgatccactctatccagagtgtaggcctggagaagcgtgtggatggctttgtctgcaccgattcgcctttggctaagcttcgtcactcttcgattctagcgacgatcaaacttcagcaatcgcttcaaaaacccgtgatttgcacgctcagcatgagggatcgcaactctttggcgcttcagggggaactcatgggggccaatgaatttgatgtgagggcgattttggcactcacgggcgatgcgattcgcttgggggatcagcctcaggccaagggagtgtttgagggcaagagcacgcttttgttggagatcattcaaagcttcaatcgcggaatcgatcttcagggtcagccactcaaaagcccccttcgcccgctctatcccttggcggtgatcaactcctactcacaaagtcccgaatcgctcaaaaagcgtcttcgacaaaagattgaggcgggagccataggcattgtgactcaacccatctatgatctggaggtggctaaaacacttttgggctgggtgcacgagattaatcaagagctaggaacctttagtgagcttgttttgggctattttcctgtggtgagttataggacagcccattttctctactccaagctccctggggtctatatcccaaatgagtggttaagccagttagaggcagcctcaaaaatcaacccagaagaggagagaagggtggggcttgaactcagtcgcaatatatggttagggctatgggattttcatccaaagattcactttatgagtgcgaacaataccaagcttgcttcagagattcttcctccccctcccacctaactaagaatttattaagcctctttcgctatacttccactcccgattgacaacgaccccaacggactttcaacctccttggatcttcaatcacttagggccttttcatctaggataagatgagtgtttgttctttaaaccaataactgttttgttatctcaaagcacttatcggttacgatctttgacaactaagcaagatagcggttatctcttcttgttcttccacttgtcttctttatagaagcttgatggacctttatacctctttgtctatcacggacaagagtctaaaagaacatgaatttttcgccatccttttttaaaggtggcaattatagcttatagctagagataacctcttatgttaattatatctattacgtcatttctttgtcgtttttttgattgattagctaagggttatcctctcctaataactaaactattatggagagtttgatcctggctcagagtgaacgctggcggcgtgcctaatacatgcaagtcgaacggtaacagggtgtagcttgctatactgctgacgagtggcgcacgggtgagtaatgcataggttatgtgccccatagtctggaatagccactggaaacggtgattaataccggatattcccgagaggggaaagtttttcgctatgggatcagcctatgtcctatcagcttgttggtgaggtaatggctcaccaaggctatgacgggtatccggcctgagagggtgatcggacacactggaactgagacacggtccagactcctacgggaggcagcagtagggaatattgctcaatgggcgaaagcctgaagcagcaacgccgcgtggaggatgaaggtcttcggattgtaaactccttttctaagagaagattatgacggtatcttaggaataagcaccggctaactccgtgccagcagccgcggtaatacggagggtgcaagcgttactcggaatcactgggcgtaaagagcacgtaggcggccttgcaagtcagatgtgaaatccaacggcttaaccgttgaactgcatttgaaactgcaaggctagagtatgggagaggtaggtggaattctcggtgtaggggtaaaatccgtagagatcgagaggaatactcattgcgaaggcgacctgctggaacattactgacgctgaggtgcgaaagcgtggggagcaaacaggattagataccctggtagtccacgccctaaacgatgaatgctagttgttgccctgcttgtcagggcagtaatgcagttaacacattaagcattccgcctggggagtacggtcgcaagattaaaactcaaaggaatagacggggacccgcacaagcggtggagcatgtggtttaattcgaagatacgcgaagaaccttacctgggcttgacattgatagaatcctatagagatatgggagtgccagtttactggagcttgaaaacaggtgctgcacggctgtcgtcagctcgtgtcgtgagatgttgggttaagtcccgcaacgagcgcaaccctcgtcactagttgctaacggttcggccgagcactctagtgagactgccttcgcaaggaggaggaaggtgaggacgacgtcaagtcatcatggcccttacgcccagggctacacacgtgctacaatggtgtgtacaaagagaagcaataccgcgaggtggagcaaatctttaaaacacatctcagttcggattgtagtctgcaactcgactacatgaagctggaatcgctagtaatcgtagatcagcaatgctacggtgaatacgttcccgggtcttgtactcaccgcccgtcacaccatgggagttgtattcgccttaagccgggacgctaaactggctaccgtccacggcggatgcagcgactggggtgaagtcgtaacaaggtaaccgtaggtgaacctgcggttggatcacctcctttctagagagaggccggagtcattcgtttggctctggcgggacaagaagataatcgctacttgcttagttttcagagattgtcacccgatacgcacgcttcaaagatataggggcttatagctcaggtggttagagcgcacccctgataagggtgaggtcagaggttcaactcctcttaagcccaccattggggaattagctcagctgggagagcgcctgctttgcacgcaggaggtcagcggttcgatcccgctattctccaccaaagcctttagaagaagagtcgtatcgagagataagacaaagtcaaagagataaaagaatagaaattaacaccgcttagaatcccttaggtctaatgcaagctcttttttaaagagggttggcattagacttcactcttgagttgatcaagagagatctctaaatgttatttaacaattaattgtcaatagcctaaaatagtaaaaactacaatcacgcaactatcttgttgtaacggagacgttcagcaaggcagtggcgccaaagaataactcattggaatagaagtagaaataagcttttaagggcagatggtggatgccttgggtagtagaggcgatgaaggacgtactaggctgcgataagcttcggggagttgccaagagactttgatccgaagatttccgaatggggcaacccaatacatagagatatgtattacctttaatggagcgaacctagtgaagtgaaacatctcagtagctagaggaaaagaaatcaaatgagattccgctagtagcggcgagcgaacgcggaacagggcaaaccagtagcttgctactggggttgaggactgcaacatccacttggaacatctagtagaatcttttggaaagaagagccatagagggtgatagccccgtagattaaagatgtttcataggtagcagtatccagagtaggccaggacacgagaaatccgggctgaagcaggggagaccactctccaaccctaaatactcctactacaccgatagcgaaccagtaccgtgagggaaaggtgaaaagaactgaagcgatcagagtgaaatagaacctgaaaccatctgcctacaatcattcggagccctatggtttatccagggtgacggactgccttttgcataatgatcctgcgagttgtggtatctggcgaggttaagcgaacgcgtagccgtagcgaaagcgagtcttaatagggcgctttagtcagatgctgcagacccgaagctaagtgatctatccatggccaggttgaaagtgaggtaacactcaccggaggaccgaactcgtgcccattgaaacgggctgggatgagctgtggataggggtgaaaggccaatcaaacttagtgatagctggttctcttcgaaatatatttaggtatagcctcaagtgatagtaataaggggtagagctctgattgggctagggctgctcaccgcggtaccaaaccctgtcaaacttcgaatacttattaccgtatcttgggagtcaggcggtgggtgataaaatcaatcgtcaaaaggggaacaacccagactaccaaataaggtcccaaagtcatacctgagtggaaaaagatgtggagttactcagacaaccaggaggttggcttagaagcagccatcctttaaagaaagcgtaacagctcactggtctagtgattctgcgctgaaaatataacggggctaaggtatgcaccgaatttgtagattgtgctgatgcacagtggtagaagagcgttctagtcagcgttgaaggtataccggcaaggagtgctggagcggctagaagtgagcatgcaggaatgagtagcgataaaagtggtgagaatccacttcgccgtaaatccaaggtttcctacgctatgctcgtcatcgtagggttagtcgggtcctaagtcgagtccgaaaggggtagacgatggcaaatcggttaatattccgataccgaccgtggtgtgcgacggggggacgcatagggttaaacgagccaactgacggaatagttggtcgaagggcgtaggttgggggataggcaaatccacccctgtatccgaaacctcacaggctctttgaagtcttcggatggataggagaatcgttgataccgtcgtgccaagaaaagcctctaagtttagccacggtcgcccgtaccgtaaaccgacacaggtggatgagatgagtattctaaggcgcgtgaaagaactctggttaaggaactctgcaaactaacaccgtaagttcgcgataaggtgtgccccgcaagggggtctcagcaaagagtccctcccgactgtttaccaaaaacacagcactttgccaactcgtaagaggaagtataaggtgtgacgcctgcccggtgctcgaaggttaagaggatctgtcagccgcaaggcgaagctttgaattgaagcccgagtaaacggcggccgtaactataacggtcctaaggtagcgaaattccttgtcggttaaataccgacctgcatgaatggcgtaacgagatgggagctgtctcaaccagggattcagtgaaattgtagtggaggtgaaaattcctcctacccgcggcaagacggaaagaccccgtggacctttactacagcttggcactgccgatgggagcattatgcgcaggataggtgggaggctttgaaatcttcactctggtggagatggagccaccgttgagataccacccttaatgtttctgtctgctaactggcttgagttatcctcaagcaggacaatgcctggtgggtagtttgactggggcggtcgcctcctaaaaagtaacggaggcttgcaaaggttggctcagaatggttggaaatcattcgttgagtgtaatggcataagccagcctgactgcgagacaaacaagtcgagcagagtcgaaagacggtcatagtgatccggtggttctgtgtggaagggccatcgctcaaaggataaaaggtaccccggggataacaggctgatctcccccaagagctcacatcgacggggaggtttggcacctcgatgtcggctcatcgcatcctggggctggagcaggtcccaagggtatggctgttcgccatttaaagcggtacgcgagctgggttcagaacgtcgtgagacagttcggtccctatctgccgtgggcgtaggaaagttgaggagagctgtccctagtacgagaggaccgggatggacatgccactagtgtaccagttgttctgccaagagcaccgctgggtagctacgcatggtcgtgataaccgctgaaagcatctaagcgggaag

SEQ ID NO: 2842 - DNA, 23147 bp, synthetic construct
  misc_feature 1..23147: note = Synthetic
  source 1..23147: mol_type = other DNA
actactcgcgcgttgccttacgctcttcgtttgatcgttccacaaaagcgattgactttgacaagatggaagagatcgggtttaaactgattaccgatgaggcgctcaaacaaaaaattctcgaacgcccacgtccacccaaaccttttccgataaaacgcatggaagagcggtttcattttatgatcgattcggtgccataccgtatgcacatttatacgattttactctcacgtgacgcgcctcccatcgtctttgaaacgcctttaaaaaaagagatgatgccccgcctcatcttgcctcttatcagccttgcgtttgtcatctttttatacattggcattattcgaagcattttgccacttaaaaccctcagagagaagatcaaacactttgccaatggggattatgacattacatgtaaaagcagtaaaaaagacgaaatcgccgcccttgccaatgaatttgacagtgccgttttcaagatcaagtcgcttcgagactccagacagctctttttgcgcaacatcatgcacgagctcaaaacgcccattaccaaagggaaactcgccgctgaaatgatcgaagataccgcttatgcgaggatcttgcaaaatgtcttcaaccgtcaagaagcgcttttggaagagttttcgcgcattgaaaaactgagtgccgatgaactcaagttggaaatcaatcgttatcatattgaagacgtggtggactttgcgcttgacatcttagatgacaaacgcgaaagcattacatgtaaactgatgccgatggaattggaggtggattttgagctttttggtgtggcactgaaaaaccttttggacaatggcatcaactactcggacgaccaccacgtcaccctttgcaatgatcttaaaaccattaccatttccaaccatgcgcctgcgttagagtttcccattgatcgctacgccgagccctactttcttgagggcaaaaagcaaaaaagctcacgcggtcttgggtttggactctttatcacctggcacgtcattcgcctacatggcatgcgacttgattacaaacacgaagcaggcatgaactgttttacgatttacatgtaaaggaaatttgatggcatattcagtggggatttttatctttgacaatgtggaagtgcttgattttgctgggccctatgaagtttttacaaccgcgtcacgcgtctttaataaaacggcttcatctctcgcccatccgccttttgaggtcttcaccatcggcaaaacgaaacaatccatttacgctagagccggacttaaactccatcctgattattcgatgacatcgcatcccacgcccgatcttttgctcattccgggtggcgtggtcaccaaagagatggaagataacgatgtgatcgcatggatcaaaagtacttcaacgttcaccaccatcactgcgtccatctgcacgggggcttttttgctcgcaaaagcaggactgttagaaggtaaatcttcgacaacgcactgggaagacattgacgatcttcgtaccctgtttccaaccttacatgtaaaagaaaaaatgcgctgggtcgatgaaaattccatcgtcacctccgcaggcatttcggctggcatcgacatgagtttacatctggtggagcgtctgatggggcgagaacttgcacttcaaactgccaaacaaatggagtttgactggacgcaaaacagtggataaacaccaaaccacttccaaaccttaatattgttttaatctaattccactataatgaccacaatttcagaacttcattaaaaaagaacttcacctaaaacctaccagatttgagaaatcctcagtgagtatgtaggtttttgcatacgatattgacgggtttattccccattaaaatttttatgtacatgagttttgtgccgagcgcacgttagtattgttttgaaaaaatcaaacacatggaaaacacatggaaaacaacacaatcacatttgaaacatttggcttacacccagagatccttaaagccgtcgtagaagctggctttacagaaccaagtcccgtccaagcagaatcaatccctttagttttagccggtaacgacatcgttgcacaagcacaaacaggtacgggtaaaacggctgcatttggtctttctaccatgagtatgatcgacccacaccaaaacaaagtacaacttttagtcattacacccacacgtgaacttgcaacccaagtcagcgatgagctttactcactcggtcgttttcgtggtgttaaaaccgtaacgatttacggtggtagctcttattcacgtcaaattggcttgatcgaaaaaggtgcgagcgttatcgttgcaactccgggtcgtatgcttgatcttcttaaaaacggcagacttccaggcttttcacctaaaatggttgttttggacgaagccgatgagatgctagatatgggcttcttagaagacatcgaagagatctttacttaccttcccaaagagcgtcaaaccctccttttctcagcaacaatgccagatcccatcaaacgtcttgcaagcaaaattttaaatgatccaaaatttgtcagtgtcacgccaaaagatcacacgacgaatgatgacatcgaacaactttactacgtcatcaacgaatacgagagagacgatgcgatgattcgtcttttggacgcgcttgagcctgagaaatccatcgtcttctgccgtactaaaaaagaggttgacagactttctactcaactgatggcagtcggttacgcagcaaaaggtttgcacggcgatatggagcaaaatcaacgtgagagcgttattaaagcgttccgtagttcacaaatcgaaatccttgtagcaacggatgttgcagcacgtggtctaaacgttgctgacatcagccatgttttcaactaccatatgccatttgatccagagagttatgttcaccgtattggtagaacaggacgtgcgggtaaaaaagggactgcgattacattggtaacgcctatcgaatttcactcaatgcaaagaatcggtaaaaaagtgggttctaaaatcgagcaccgaattgttccaagtttacgagacgtcaaagagaacaaactgatcaaaattgctgaagatattaaaaatgcagagctcaatgaaaatgctacaaaattgcttgctattttagaagaagagatggatatgtcgcaaatcgcactgaaacttctctctaaccttttaaaagagaatactccagtcggtccagataaaatcggtttagataaaaaaacattggaaaatgttgttaaaaatatcgaagagcgtgataacagccgtggcggacgtggcggttacagaggtggctcacgtgatggtagaagcagtggcggcggttatagaggaaactctggcggttcacgtgaaggtggcggatacagaggcaactctagcagcggctcacgagatggcggcggatacaaaggttcaaacccacgtgatggcggaagcagagatgcacgtcctccaagaggcgacggcgttcctagaagtgatagcagaggcgagcgtagcccttttgcaaaagagggaagcagttcagctccacgtgaaggtggcggatacaaaggtacccgtgacagtggagacagcagaccgccacgcgctccaagagccgacagaccagccgctccacgcagtgacgcaggtcgcgctccaaaagccgctcctcgtaacgcttacaaaaaagactaatttttaagagggtggcgtgagatactcacgccatctcaccccttttatttttctcgctcaatcatcgctttaagtgcttcaacaccttccgcatactccactttttcgacctgtttattcttgagtgtcaccaccgtaatgccatccacttttgccccatttttcaaagacgctgcgattgttccatccaaaatgagattgacactgtagggctgtgttttaagatcgggaagtgcaaaggtattgcgtatcaccaccggcatcggactgatgtccgctacaaacgccacatgatgaacgttcaaataatccgcactttgcattccaagatacgctttaacgacatgtcctgtatctttcgcaaagaccaaaatgagcgtatgaatcgaatcatccaacgtatgcgatttaccaaattgatcaaaaagcgtgtaagtgatcgttgagccaacattcagcccatccgtaagtgacgcagaggagatattgctctcatacgtatctttacctttcaaaaaaaacagcactcccgcagcagcgacaagaagaaccaataaacccagtaatatcttcttcatataaagccttgtatggtaaatttacggagtattgtaccgtaacctacgccctatccaacgctaacttaagacctaaagcacccagtacacttcctgcaattttatcgatgtactttttagaacgcaaataaaccttttgggctttttgtgtcgataacagccctacaacgcacgagtaccatgaaacatcgatgataaatgcgatgaggcagactaaaagtgttccaaaaggcggtatctcttggggaagaagtgctgcaaaaatacttccgatgatgatggcagtttttggattgctcatctgtgttgctaaaccgagtaaaatcgccttggtaaaactctttggtttttgctccaaatttagcttggtatctaaaggtgtatcggcatatttccacattttataggctaaatagacaaggtacatgcctcctactatttttaaaaagccgtacaaaaaaggcaccgttttcaaaatagcatagagcccaaaaatggctaaaagcgaaaagacaacagcacccaatcctaaaccaatagcgaccccaaaaccctctttgcgagactttgaaacagccgttttggcggttaaaataaaactaggtcccggactcatcgtccccaatataaacaccgtcactatccctaaaagaaaagagtattcacccatgatttgcctttacatgtaaagaagattgaacgctgcatccacttcattcacttgagtatttttggataatgcaattttagcatgcaaacgtgcacaaggacataagaaaagtatgagaggtaattttaaagaatttttttgctaagctttccttaaattctttacttgtaaagagaaaatagagatagaggagaaggcacaacgtgaatttattctctcaaaaaattaatgtttaccaatcaataaatgagcccataagaaataaacctgatttcgataaacgatggaatggcgacgataaagggttaataattgcgtgggaacttggaagagaacttgcaattaacaatcctgaattagcaaataaagctaaaaatggtgaactccctcctcttggttttaaaggtgggtacgaacgtagactaaaaaatataaagcctaagcatggtgcaatagtttatcttgcaaaacttcaaggacttaaaggtaaagacttagatattgatgagttaagagatgaaggtaaaaccattacatgtagcgcgacaggcatgacaactatcttcactttcgaccaaaataaatataagaatgaagcatgaaaaaagacgaccaaaatcaattagcttctagggctataagagctaaagatacaagcgatagaaaagtagacgagcttataggcatttgccgtggaattatggctgatggtaatataaacaaaaaagaagccgaataccttctctcatgggttgaatcaaatagagaattttcacaatcatatccatttaacatcatttatgatcgagtatctattatgctcagtgatgatgtgttcgacgatgaagaaaagcaagaacttttagaaataatggtcaaacttacaggcggtgagattataggcgatgatacagaaagcatgagtagtacgttgcctttatgtgtaccatttccaactattgtttttagtggatcatcttttgtatttacgggagtatttacaactggtgcaagaaaaatccttgaagaacttgtaaaagagttaggaggtattattcatgacattgttaaaaaagataccgactatcttgtcataggtgatattggaagtaaagactgggcacattcaagctatggacgaaaaattgaaaaagccgtagaatatcgtgataataaagagactggtatctctatagtatgtgagagccattgggctaaatttttatgagataaagggtacggactattttaaataagcttttaatttttcgttgcccaattcaataaaaattagcctgttctttcaaacgatgacgagacacaaccacaccctcatatcccgtcgttttcaccgcttctaaaaacgccttatcgtcaatgccatctttggcaatgacgaccgctaatttcgtctctaacgtcactttagatgactcaacaccttcaacgcttttgagtgcttttttgaccaccgttgtacataatggacagtgcattcgtgctacttttatgaccacttcttcttttgcgaacagcatcaacggtaaaaggagtatcaaccattttttcattctgcatcctcaataaaaaaatttgcccattcaggatagagcaatatcacgacaatcaaccctagaataatcgagtaaaaccacacatagtactttttcttttgaggattacatgtaaaggtgtgatgcgcgtaagagcgccatgaaagccacaaaacaaaaagcgataaaagggagagcggtatgcgaaacggggtgaggagttctaaaaaacttaaaaatccaaaagagattccaaagagtaaaaacagcagtggaggcagacaacatgccgtggcggcaaaggctgagagcagtgctgtgagtaaacttagaatctcttttttcatacgttaaagtttttcttgagagacaaagctataactgaaagctgctggagcgtaatagtctagcacttcatctttgacttcgccgtacggataaccaaacatattgagtggtttttgcgctggcgttggggaaagcacaaaatcacgcgctgtgttgtaacccatccagttcatctcccagttgccgaagaaatactcacgtacccctttcacaagtggatcattcagcgtcattttttcggttaagatgacttttgccacatcggcaggatcgcatggaacccagcccgcgccatccaaataaaactcagcacgacaatgctcgcctcccgtgatttttgccaaccctttttcatcgctgcttccgcatgctttggagtagcgagaactgcctaaacggataccgaagatctcacgcgcaggcacgccgacacttcgtaaaagagcaacaaaaacagagctaatgtcggtgcatttgccacccataatgttttgctctatcgccttgcccgcatcacccacaccacacccgatgaccgcatcgtcacggtacatattttcagtgacccatgcgtaaatcgctttggctttatcgaggggtgttttgctgttttctgtgattttaagcgccaactctttcacttttccactcgttgggatatgtgcggttggtttgagatagtgggcaacgtctttagggtatttggtggaagcggtagcttttgagagatcagcattgcgctcattcgtcgtaatcgtataggttacttcgaggagtttttcgccgccatttttccactcagcgtaaagcgttctggctttgtagctgtttttgtcggtgacatacgcattggtggcatttgagctaaatttaaaatcgctcactttttggtaactggtctcttgtggaagtggaacccaaagtttggtcaagccatttttattttcgtgtttgagattgtaacggtttatgacgtaaaaaatacgtgttttaccctttggctcactcgcttccaaaatcgaaacctgagggaggatgacagaactagctccaagggcgatgcaccctttcataaacgctcttctttgcataaaaaatccttacatgtaaagtggcacgaagaggaaaaaacataaaagtagtgacaaaagaagttgttacgattatgtttgtctaagccttagacgtcgtgcattagagggattgtacagtgagtttgcttaagatagtctctaaaaaatcttataaaataagagcattttgacgttttttctctacattttttcaagaatataaagatactcgcttaatgcttttttattttcctgattgcgataccctttaaaacgctgatgggacatctgaaacgacgcgcacctgccatagcgctccaacatgttggatagcgaagaaagatcaataatcccctcatcgttatagcttaaaatgatccacgaaaagcgcgctttttggataacatcttccaatgccaaaagcgctgttcgactcttacaatacgccgaactttcatacgccctcacccctgtttttcccttgggcgtaaacgcatcataccgcgctatcgtgtttaagatgtggtaattcgctccgtattgacgacggttgtacggcggatcgaggtagagaatatcgcctgtaagcgtggaaataagcccattggcatcttcgcaaaaaacctgatgattagcgtgcgatgcacgtgtgggaaacgcatgcagatgcagtttttcgcacgccaaaggcttgagatgtttgagatacgcactgtaaatagaagcggtgttcgcaactttgtcagcgctgtgcagcagtgaggctaagaggtaaatatacagtggctcatcacgcttatacgcttcaatgccttggcgcaccgcatcgattttttgagcattttcagcgctaaaatagttccgtccactgccactttccaaacagtagtgctcatacatcagccctttgcgtaaaggcagtgcatttaaggcgtcaatgatgggagtgatggcagataattcgggcggttttagcagcgcatagttgagcacataactgtaaaattccacgtcattgctaagaatgctccaccctttgtgagcaaaatagctcccaaccgaaccgctccctgcaaaaagatcgcaaaaaattttaagggctacatcttcttttaaaagagacgataggtgctcatcgataaaagagagcagttttactttcgagccgatgtagttcacctgcattccccaaaattttcaatataatatcaaaactagaacgctttttgcttaagcattagagacgaatttttaaaaggacgagatatgcattttttagttgttgacgatagctcaactatgcgcagaattctgtgcaataccatcaacagtataggccacacaaccaccgcagccgaagatgggttagatgcacttgaaaaaatcaaagaacaaaaatttgatgtgattatgacagactggaatatgccacgcatggacggtctgcatttggtaagagcactgcgcgctatggaagcgtataaaacaacaccgattattatggtgacaaccgaaggtggcaaacaagaggtcattaccgcgatcaaagagggtgtgagcaattacatcgtcaaaccgttcaccgcgtttcttttaagagaaaaactcaaagagatcgtcagctaaaactccttctcttttgcctctaaaagcaaaagagaacgctcactctgaatctttacatgtaagataatttcgccatacgccaagcttccttcccctagcaaaactgtgcaatatgatctagctacatttatgtacagaattagcaaaagtctttttaagagtggcaacaaatctccgaaaaaatcgaagcagcaaatcagaaataggctttacatgtaaaaaataatgtatggaagttgaagaaaaaaggaaaagctttttagaagatactccgtagagtagcgcttcacgggagaagcttagaaacccttattatagcccttagatctcactcggttgtgctataaatgtgatactatatgaacattgcttaattcacgatgaaaaggtacgtcatggttgagaaaattttaggaatcgatttagggattagctcacttggttgggcagtggttgagtacgacaaagataacgatgaaaacaacaaaattattgattgcggtgtaagattatttactgctgctgaaactcccaaagaaaaagaaagccccaataaagctaggcgagacgcaagagggcttcgccgtgtgattaaacgacggcgtgttcgaatgaatactatcaaaaatcttcttataacgtataaactcattgataaaacgctcttagatgaagaaatgggcatgtttcactcccaaagtaaccgtgtcgatgtttggaaactccgccatgatgcactctatcatcttttaagtggcgacgaactggctcgtgtgctgattcacatcgcaaagcatcggggatataaatttttaggcgatgatgaaagcgacgaagagagcggaaaagtcaaaaaagcaggtgctgaactcaagaaaaaatttcttgaagcaggatgccaaagtgtgggtgaatggctttggaaagaaagaggcttgcaaggtaaaaagcgcaataaaagcggtgattacgagatttcaattcctagagactttttggttgaagagattcaacgcatttttgaaacacaacaaaaatttggctctacttttgccacttctgaacttcaaaaagcctataccgacatcgctttttatgtcaaaccgatgcaaagtatcgaagatatggttggttactgcactttttatccaaaaatcaaaagcaaaaatcaagatggagaaaaaagagcacctaaagcttctccatcagccgaacagtttgtaatactaagtaaaattttttcaaccattgttattgatgaaaataaacaagaaaaaaagctaattgaattaaaaagtattgaacaacttattcaaatagctagaagtaaagaaacactcaaatataagcaactgcgaaaagagttaaatcttgcaaaagatatatcgttcaaaagtataagcgatgaggaaaaaacatggataaatcttgtagggaatgcaaaatttaaaaaaattcttggtttgaactatgaaacttttttaaaaaatacagaaatttcagacgagatagcaaaaattttaacctacgataaaacatttgaacaaaaagaaacaaagcttaaaaacttacttgtcaatattgactggatagataacaatcatattgccgaattggctaaattatcttttagtcaattcaaccagctttcacttaaagcaataaaaattatttctaaaatcatgatagaaggctatgcaaggtatgatgaagcagttcaatatgcattcgaaaataacttattgccaaaaccttctcatgaaaaatccatccttttaccacctctcaaagagacaaacatcgccatcttaaacccaaccgtcatccgagcatttgcacaatttcgccaagttgccaatgctttagtctcaaaatatggcagtttcgataaagtgcattttgaacttgcgagagaagtcaatacaaaagaagatagaaagcgctgggaaaaagacagagacaaaaacgaaaaaatgcatcgtcaaattactgaaaaactcgtagaagaaggtgtgaagccaagctacaaaaatatcttaaaatctaaattacgaagtgaacaaaaagacacttgtccttactgtcaaaaaaatttacattaccccatgatttttgaagatggctatgctgaaatagaccatatactccctcttagtcaaagccaagacgacagctatgtcaataaagttcttgttcacagtgcatgcaatcaaaacaaaaagaaccgaacaccgtttgagtggtttcaagatgaaaaaaaagattgggatacctttaaaagctatatcttaatggaatctactttaggggagaaaaaaagaaattacctcataaaagaaaattttagtgacccacaaagtcgaaaagagtttatttcacgcaacctcaacgatactcgttatatgtcaaaagccattaagacttattgcgaaaatcactggaaactctcacacgatgatgacaagcttcgtattcaagtgcgtagtggaaagctaacctcaacacttcgtcatcaatggggattagataataaaaatcgtgaaacgcatacgcatcatgcgatggatgccatcatgatagcgtttagtacgcaaggtatggttaaaaaactcagcgattattttgccaaaaaagaagcaaaagtcgaaaaagataaacccgttctaataactccaataaaacagtttaaagaagctgttgagcaagcaacaacgcttgaacgccaagagagtatccaaacaaaagcgggagataccattacactcaaccgccttcttatcagccgaccacctcgtgctagcgtaacgggagctgcacatgaacaaaccgctaaaccttatccaagaatcaagccaataaaaaataaatacaaaagaaggcggattcctatagacgaagataaatttgagctttttagaaatgataaagtcgctagcggaaatgataaaaatttttacaactcaagcacaattccaagagttgatatatacaagaaagatgataagtatcatgtagttcctatctatctttcagatatgacaaaagcagaagtccccaataaatctttaggtacaaatcctgagggaatggatgaaaaatatttttgctttagtgtattcaaaaatgacctcattgaattagagacaaaagcaacacctaaaaaacctagtaaaaaactcttagggtatttcaaacagcttaatggtgcaaattttatattaaactccatacataatggcataatagatggatttgtatgctctcccataacactttttaaacaacaaaaagacatgtgtaaaaaatgtttaccagaagatagagctatcggtaattgctcgcaagaaactttagagttttgggaagctgaaaatattaaagtacccaaaaaagatttcgagtgcgatcaaggcattaaatttgctattgcggtacgaaaatacaccatcgacccactcggttattaccacgaggtcaaaggagaaaaactcttaggcaccataccacaaggagccaaaaaacacccaaaacgccaaaaataataaaataagccgatttactctcatccttgattttaggagggagtaaatgggatggcgcacgctttttattacccaacctgccaaattgagccttttgcacaactcacttgtgttgaacaatggtgaagagtacaccattcctttaaacgaccttgcttgtgtcgtggttgaaacaaggcatgtgacattgacttcaccactcattgatgcacttgcaaacagcagtgcggtggtttatatttgcgatgaaaaacatctgccctctagtgtcattttgccgtttcatgcgcactcaaggcaagcgggagttgctagacttcaagtgctttggagtgagccttttaaaaagcgatgctggcaaaaaatcattcacgctaaaatcaccaaccaatccgaagtcctagacccaagtgcaagggatgatataacttacctatgctcccttcgaggtcgcattacctcaggagatgccacaaacatcgaagcacaagcggcaagggcgtattggagtatgctttttcaaaattttacccgccatatcgatgagcaagacatacgaaactctgctcttaattatggctatgccatcttgcgtggcatggtcgcaagggcaatagttggtgtgggatttttacctgcttttggtttgcatcattgcaatgaactcaatgcgcttaatcttgccgatgacatcatcgaaccctttcgaccttttgtcgatgcactaacacgagagttactcgatgaagatggcgaagaacttcctttaagtcttcccatgcactataaaacaagactgcttgaacttccctcactaccctgtcgtattggaaaaatggagacgactttgtcttatgcctgtgaactgtgtgcggagtctttgcttcgagcgactaaagcaaaagatgccacactgattgagactgtgagttttgtatgacggaggctagatttatgcgactgcttgttttttttgacctaccaacggcgaccaaaaaagagcgaaaagactacacgatctttcgcagatttcttctcaaaagtggctatgacatgcttcagttttcggtgtattgccgtatatgcaaaggacaagatacagccgagcgatacatgtcacatttggaaacaaatctaccgccaaaaggcaacatcagagcgatgagcgttaccaatacacagtatgaacgcatgaaattattgataggaatggataaaaaagaagagaaaataggtaaaaaccaactacttttattctagttttaaaatgaaaaatcccaacaaaacccctaatttcaggggttctatcgaggtctattatagcaaaaccgagtgagatggggggctataacttaaaaggaatatggagcgaagcacctgcaattatagcaaaaccgagtgagatggggggctataacgcaacggctcgtaatcttgtcaacgtctttattatagcaaaaccgagtgagatggggggctataactgtcaccttggcacgttccataaaatttttattatagcaaaaccgagtgagatggggggctataacccgtatgaaattcgttaagcttatcagcaaattatagcaaaaccgagtgagatggggggctataacgtagattttaacaatagaagtattgcaacaattatagcaaaaccgagtgagatggggggctataacaatacatgtaaacctttaaaaaattgtcctattatagcaaaaccgagtgagatggggggctataacttaacgatattgtcaacggttgtcatcgccattatagcaaaaccgagtgagatggggggctataacaaaaactaaggaaaaaactatgacaaaaagattatagcaaaaccgagtgagatggggggctataacaaaagaccactcgcataaagcgtttgatttattatagcaaaaccgagtgagatggggggctataacttcctttggatattgctgtatcttctgtatattatagcaaaaccgagtgagatggggggctataacataccactggacgtaccgactctttcctttattatagcaaaaccgagtgagatggggggggctataacatcatcatcaaaagaaagcattgcccctatattatagcaaaaccgagtgagatggggggctataacaacaaggatatacaaattgttgatagtagaattatagcaaaaccgagtgagatggggggctataacacatggaagagccacacggctatcgccgtaattatagcaaaaccgagtgagatggggggctataacaacctctgtggcggaaacatcgccaacactattatagcaaaaccgagtgagatggggggctataacacacttgatggttggttacatgctcttcacattatagcaaaaccgagtgagatggggggctataacttgactgcgagatacatttgctcgatgaagattatagcaaaaccaagtgagtatctgagcctattttagtttacatgtaaagcatggggtgagaaatgaatcgtaaagtagttttgtccttctacatgtaaataactcaaacgaaagccgtgtttttcaacaatggcgttggcgatgtaaagcccgagtcctagtccactgcttgagccctctaccgttcggttaaaggcgcgtgaaaagtcgagtcgctcttggggaattttctctccaaaactgctaatgctgatgctattactgcacatatcgacttctacgccatccgttgagtgtttgagcgcattgtccagtacgtttttaagggcggtggcaaagagttcaaagtcaacgatcaccagtggtgccatctcttggggcggaatatgaatgcgtttggtatcgcttaaaagcagtaagtccatcgcatggtctaacacatcgaccaagcggtactctttggcttcgagtatccactcgttggagctcagtttttcgactttgaccatttctccaagcaacgtttcaaggcgctcgaaaatgcgctctagttggggttgttgtttgatattctcaagagaattggagagaattttccctttcataattggcgttttgagctcatgcaaaatgttgcgtaaaaagagcgttcgagcctctttgagcaggtgaatcttctgcatcgctacgttaaattctgaggcaatttcacccaattcatcttcgctgtcgacctcgatcacttgaaattttttggtatcgccgaaggtgcgaatcgcgcttttgaggctgcgaagacgcaacagtttacgaagcacgatgccaaagaaaagcagcaaaagcgcgttaatcacaccgcctaaaatccaaagacggtacagcgaaatctcctcaatattttccaaaacggtcggcatttctcccattgcatcgttatgaatatcaaagggtggtggtggaaacctatcgtctcgcatcatcggcatgatcatgggtggaggtgggttttgatgaacaaaatagagtttatcgtggtactgaatcatctcagaaaaaggatcctccagaagtttttcacccttgttgagcaacgtatctttatcttgattgctgatgcgaatacccagctttaaaaacgttccttcttggtcagagtcgttatgcagcatcgtttttgtcgccatgataaaacgctgaaaggtaaaaaagtgtagatcactcatttgccttttgtattcaaaggcaaaggcaagattgatgaccaccaacgtgagggcaaaaaagatagaaacgagtgttacaatcgatgttttacgcattaacaaatttatacccaacccctcgtaccgagagaataaatcgaggttttttaggatcatcaccaattttttggcgaatgcgccctataatcacatcgatactttttagactgctctcatacttgatagagccgatgttcatcaaaagctcttcgcgtgagatcacaaaaccctcttttttgagcatatacgagacgatgtcatactctgccattgtcagccttagttcatgtttaccacgcttgatgatgtgtcgctcttcatcaatgctaaaggtaaaagcggtaggctcattaagcgtattgccacgtcttaaaatcgctcgaagtctgaaagccagctctcttggatcgtacggttttggcaaaaaatcatccgctccacgctcaaatcccatcactttatcgcccatatcagaacgtgctgaggagataataatcggaagggttggaatcgattcatgcacaatgcgacaaatctccaagccatcaatttgaggcagtgaaagatctaaaacaagggcatcaaaggtgtcatgttggagggctgttaaaccatccaaaggcgtaaacgccagtacgatttcgatgtcctcttttaaaagagattcttgaaggagttgtgcgagttcaacgtcatcttcgatcattaaaattttaatcatattttgattataacgaagatcaagtaaatgaaaagtaacataaaaccacgccttgcttagagcgtggttttatgcttaggcactaaagctgacagatgtcccagcaagagtattttgagaagcataattcgagatgatttgcgctaaaagcgtttgcatcaagtcttcactactggttgtactctcttctgttgtatccgttgtaccagaactttctgcttgcgcagagtcttggtaggctcgtgcttcagtggcgcttactgtaccatctttgttggtatcagcggcatcaaaattctcagccaatgtttcaaagagcgcagaaagggcactatccgttgatgaagtctcactcgccttagcggtaagctcatccacagtgtaacccgtatcgtcctcatcctcagaagaagatgatgtcgctgacggcgggggcgtgcctccagctgcagatactgtactcatctctgttgcatcggttgtctctaatgatgattgttgataaaccattgcttcagctgaagttaccttaccatcaccatcggtatcagctgcctcgaaattctccgaaatagctgaaagcaaagtcgaaagattcgtatcggttgaagcagtctcttccgccatagcggtaagctcttcagcggtataacccgtatcttcttcacttgatgatgatgtagatggcggaggtgggggcatacctgacgctatcgtctcagattcttcactggtaaacaatgaacttagttcatcctcactgatcgttccatctccatcactgtctaacgatgaaaaaacactactaatagtactttcgtcactgtttgacaatgctagagctgcactgctaaactcagcactgtcaatagcaccactcgaatcagaatccatagatgtaagcaacgcatctacgaaatctgaagtactcgaactggtactactgctagtactgctgccatacgaaccgtacaaagacgtttcatagagagaatttgaactgaccgtcatcatctcctcctttgtttggcttgggaatttcccaatagcaatcctatcaccgatgcagtaaacagtgggtaacaatgaaaaaagttttacatgtaaaggtatttttatccaaaccgatagccaacccctgaaatcgtgatgagcaatgtgggtcgattggggtcggtttcgatttttttgcgaagttgattaacaaacacacgcagtattttggtgtcgttttgatagcccacaccccagacatttttgaggatttgtgcatgggttagagccttgccactgttttgcatgaaaaattttaaaaggctaaattcgagtggggtgagatgcaacgcatcatcgttcagtttaaattctcgtttttcaagatcaagttccaacgtgcccactttaagcaatggcgtgctctcttttttgagcgcatgcctgagagcagagttgatgcgcgcaacgagctctcctgtaaaaaagggtttcactacataatcatccgctcctaaattgagtgaatccacgatctcttgttcgctattgcgtgccgagacaataataatggggatgttgctaaactcgcgtattttttgcacaaaaagccttccattgccatcgggaagccctaaatctagcaaaatcagatcaggattaaactgaaccatatgcgacatgccctctttttgagtgccacatactttgagtaaaaaagcgtgctcttcaaggctcacttcaagaagcttttggatctgtttatcatcttcaatgatcaaaattttgtatttgagttgggacactattcctcctcgttggggatactaaactcaaaaatcacactgttttccaaatttctcgcccaaatccttccctcgtgcgcttcaacgatttttttgcagataaaaagccctaagccactgccattaatgtcatcgctaatgcctttgattctgaaaaacttttcaaacaccattttaaggtcttcttcactgatgtgactgtcttcatttaaaacaaaaattttacaccacgttccctctttttgaaaccctaaggtaatggcacttccgtgttgtgagtatttaatcgcattttccaaaagattgacgacgacgcgctctattaaaacacaatcggctttaaaaatgcccgattcctcttcaattttgatgttaaaattgcgctcttttaaagtatcttcaaactccctcgccgcttgagagaagatgtctgctacatcgcaccaatcttttttaagaaccactttatggctttcaaaccgtgccgaatcaagcagattattcatcaaacgttccatcttttttgcgctaaaaataacttgagaaatgataacgcgtttcttctcatccaaccacgtttcatccgttttcagcatcgaaaccatgcctaaaatagaagcaagcggtgttcgtaagtcatgggaaatcgagccatacagtgcatttttaagctcttcacgtgctaatgtaatcgcatttttactgtttttttctgaaagcgaaatacgctcaaaagagaccgccatgacactggtgaccgagtctaaaaacatcttaaactccgtgttcatctcatcttgtttgattttaatcccaagggctccataaacgacctcgcggcttttaatgggaatatagagcatatccgaagccaaaaaagtatcggttccagcccctgcgattttgccattgtccaaacaccaatcaaggacggctttttcactcgaagagataaaaatagcctctaatttttcaaacatcgcatcgtattttttactcgatagcggacttttaggatcataatgcgcatagagttttggtatctcatccacatgcttgcgtaagaaaaagaaggtctctttgccgagtgattcagcgattaaaggcatcgctatcttaatcacctgttttatttcagaaacagcagtgacacgacggcttagtttatacagtcgccttaccctcttctcacgttcgcggatcacctcaccaatgagtttcaattttttcgcttgtgatgagatgagataagcaacaataaaaaagatgaaaaaactccacagatgcgagatgtcactcaccacaaaggtataaacaggcggcacaaaatagtagttaaaaagcccgacaccgacaaaagtaatcaccatcgaggttttcatatcgcctctggaagcaacaatcagtacaggaatgagaatcagcagtgcgacattgagaagttccaaatgatttctaaaaacgatacagccaaatgttatcacacccagtaagcctagtccaaagagagagtgccacaacggagcttcctcttgtttggcttcatcaagggtatacgcttctaatttttgctctttggttttgttgatatacgaaataatgcaaaactcatcgcctgcatttaaaagctcatcggcaatatccatacgccagaactttcctataaagttttttttgcgctttgccacaacaatgtgcgttacaaaccgcgtcctcgcatgttttaaaatctcttcgccgacatcttgacccgaaacggtgttgacctcagcgcctaactcttcggctaaacggatatttttagccaatttttcacgattattggttgaaaaatcatcgacgtaaagcgcgatccactccgcattcatctgcgaggagagccgtttggcatagcgaatcagattggcagaaaattcactgccatcgatgcacaccatgaccttttcaaccgcttcccagcgctcaactttattctctttatagagttctgaaacgtctttactgacacgtcctgcagcttgtttgagcgcaatttcccttagggcattgatgttaccaagcttgaaaaagttcatcagcgctttttcaacgctttggagtttatagattttcccctctttgagccgctcgaccaatttttcaggagggatgtcgatgatttggattttatcaacgcgttctaaaatgctatcaggaacggtttcagtgaccttcacacccgtaatctgtagcaccaaatcgttaagactttcaagatgttggacattcattgtgctgtaaacatcaatgccattgtccaagatctctaaaacatcttggtaacgcttttggtgtcttgaagtgggcgcattgctgtgagctaactcatcaatgagcaccacatcgggcttcgcttccaaaatagcatcgatgtcaagttcataaagcgtacttccacggtacacgatctttttaggggcaatggagggaatgccttgggttaaacgctctgtttcagccctaccgtgcatctcaacatagccaatgagcacacgctttccactttgaagtaactctttggcgttacgaagcatggtgtaggttttgcccacaccggctaaagcgccaaagaaaagtgttagctctcccgtttcgcgtctgtttttgatctcttgaagtaccagatcacttgtttctaagacatcttcattcatgttgaggatttaaaactccaaagtgtttatctaacgcacgatttaaaagaaggacattcaccctctcctcgcctataaaacccaaaaactttttttcaatgtgctgattgacaagctcaagcatttgaacttcatcgacatggcgctctttggcgatggttttcacctgataaagggctgctaatttggagatatgcgggtcaagtccactgcctgaggtcatgaccaaatcactaggaatttcaccctcaccaaaccttacatgtaaagcttctttacggacttctattctatccaacaaaagcttgtttgtcggtgctaaattgctcccacttgaggagagtgcatcgtaaccatcctcccctgcagccgagggtcgagcaataaaataacccacttttgaaaaattttgtccgatcagttctgagcctataaccgttccatgttctttcagtaaaagccccgaactctgtgttggaaaaacccatgcccctaaattggtaaccgccagaggataaacacctccaagtaaaaatgtcatgactaaaagtaatttaatcgattgaaatagtgttttcatacgcttccttttacaaaagatgcaatgttgcaagcaacatatccagcagttttatccctacaaaaggaacgataataccgccaagtccatagataactaagttttttcctagcaccacgtccgcgcccaaggctttatacccaacccctgaaattgccagaggaatcagtgcgatgataatcaacgcattaaaaataaccgccgataaaatagcactctgaggtgatgagaggtgcatgatgttaagcacttccatctgcggaaacgctaccacaaagagagctgggatgatcgcaaagtatttagcaatgtcattggctaaactaaaagtcgttagcgcacctctggtcatcaaaagctctttacccgtctcaaccacttcaatcagtttggtaggtgaactgtccatatccaccatattcgccgcctctttagctgcttgggttccactattcatcgccagtcccacatccgcttgcgcaagagcaggcgcgtcgttggt

SEQ ID NO: 2843 - DNA, 22370 bp, synthetic construct
  source 1..22370: mol_type = other DNA
  misc_feature 1..22370: note = Synthetic
tgacattagaagaaatcgacaagcagtttgtactgcaaacatacggacggaattataccaatttcactcacggcataggatcaacactgtatagtgagagcggtaaagattatatagattttgccagcggtataggagtcaattcggtagggcacgggaataaaaaactagtcaatgcaatttgcgatcaagctagcaagatcattcatatatcaaatctgcaagttatagagtctcaagccaaattggcacaaaaaatttcaagactttacggacaagaggtggcaacattttttgccaactcaggcgccgaagccaatgaaggcgctattaagcttgcacgcaaatatggcgaagttaaatttgatagtaaaaaatataaaattataactttggaaaattcatttcatggaagaacattggcaacagtaaaagctacaggtcaagacagttttcatccgtcatgttttgctccctatatagaagggtttatgcgtgttgccactgttcatgatgctattgatgccattgatgatgttactgtagcggttatgctggaactcgtgcaaggcgaaggcggagtagaagctttttcaaaagaagagatacaatatctagcaagtgcactaaaagaaaaaaatgtattgcttatagtggacgaagtgcaaacagggatctatcgtaccggagagtttttagcttcgcaagtttatggtattgctcctgatatcataactctcgcaaaaggtttgggaggaggtgtgccgatcggtgcagtagtaactccgcataaagatatatttagtgccggcgatcacggcagtacattcggaggtaattatctaagcacatctgcggggttggccgttttggatattttggaagatcttcaaaactcaaacaaattagcagatactatagaatattttagtgctaaacttgaaagcatcgcagctgcatatcctcaatattttgaaaaaagctcaggcatagggcttatgcgaggacttcgagcaaaaaatgcagatatccagggcaagatcatcaaacaaagcatggccgaagggcttattgtgttaaaagcaggtcgaaatacagttcgattccttccgagcttaactatcacaaagaatgaaatagatgaaggctttgcgagatttgaaaaagcattgggttcgatcgcgtaatgaactttaactcatatatgacagattggctttatggggatggcggatattataccaactttaaagccataggcaaaagcggggatttttatactgctgtaagtacaagtgcttttttcggtgcgagtatcgctaattatcttgtaaaattattagatgaagatagcagcaaatcagatggatggctagtagagataggagctcatcaaggctaccttctttgtgatatgatacagtggatatataccgtgcgcccaaaactgcttcaaactatgcagtttggcatagtagaaaagcatccaaaaattcgagaggcacagttgtcttatattaatgaaagatttggcaatgaagtaaaagtgcatcacttctcttcaatttttgagctaaaagcaagctatgcatttgtagtctcaaacgagatttttgatgcatttccttgtgagctgctaaaagatggcaaaatagcaaaagtggataatcacaccatatcttgggaagatgctgcgccaaatatgctggagtgggcagataaacatcggcttagagtcggtgaagttgcagtaggatatgaggattttgccaaagaagttgcaactttgcctaggtgtgattttgtctcttttgattacggcgaagagtatgtgagaaatgatttttctatacgcatatacgaagaacatcaaacttttccgctctttgatgaaaaagtaaatttagaaaattcttttaaaaaagcagatattacgtatgatgttaattttgcacacgtcatagaatcttttgaagctgcaggattttctaaaaaacattacgagacacaagccagagcactggttagatttggcatcattgatatactcggagagtttgcaaagcaaacgacccaaaagatatataccaaagaagcagacaagataaaaactcttttagctcctacaatgatgggtgatagatttaagatggtgcatttggttaaataatcaagccaattttcggccggcaaaataatttatcttccattcttcattttcttttgaaaaatgaagctgttttttttgaccatcttcgtggtaatgaacgcttttcctgtctacgccattttcttcggtaacaacgatctctatttttggcgataattgtctagccgctaaatctttagagagcatggattctacttgctttaaagatgaagtatcatcttttatcttttccaatagatccttgaaaatcgcatctcttattgcaaggctcaagccaaaagattctagcgttataaaataagacgaccgtgtcattattttactaaggtttgccaaatcgccgctatatagcagcttataatatgacaaaacaagatcgcaaggcttgatatctttgtatatcaagaaagtcttctgatcgcagtttggaatgcttcaaggtgattatagcttccttcttcaaggttactatatacattaacaacatctgttggcatacctactgaggcttcttgcaagtcttttatgtctgtaatttcaattaattcgcctatttttacagcatttaattgtgattttttaccttcatatatacaagtattataaagttcttgaagaggcggcaatatgaattggccaactacgctttcatcgattcctgtgatattcacgccatacttgatgcacaaatttctagcggcattcatgtgtctttgttctgaaagttgaatattggcaaatgtattttcagacggatatatttttccaagagtaatatatacatctctagctactttctcttcttgataaataaaaagcaaatggtctttttgttcactcgttaaagtggcagtacctcctgagccgcccccgtttcttcttccagcttctcctgatgacactaagcctacaacacccgcaccgacaattaaaaattttgagataaaatttctacgatcttgattttgattgttcaacattgcttgcctcattaaataaaatataatgattataacataacaaaaattaactataacaaaaatttttagatattttaaggaataaagtgttttttttattatttttttatgagaattaaataaatcaaatcaattacttgtattccaggattgcaatttcaaagatattatgttatatttaaataaaaataggtttttaaatgaaaaaaagattgataattttatttttgccgttgttggcagttggagataatattaatggctggacatctttgcatgaagctatctatgcaggtgatacaaaaaaaatagacatagaaataaataagcgccaaaatatagaaaaatcttctcgtgccggtatcgctccgttgcatcttgccgtgaagatgagacaaatggataccgttgaaaaactgttaaataaaggtgctgatattgatatacaggacaataacggcctaacgccgctgcattatgctataggacaaaagcagacaaaaattgcaagactcctcattactaaagaagccgatatggatataccaaacaaatacggcatgacctctcttcatcaagcagcatttagaggtgatacggatatgatacaatttatgatagataatggagctgctgttgatctgaaaaacaaacaaggagctacgccttgccagctggcttatgcaaaaaaaaatataggtgcgacttcgttgttgcaacattatagcaaactaccctgcgggatgaaaaatttgcctaaaaaggagtaaaaaatgaatgaaatagtcacatctttggctagaaatgctatcatggctgctttgggactcaagagcagctttgaccttgacgatgctcttaaaaaatatcccgagcttggacaaaaaggtgcatcatttgtcactctaaatactactccctctatgcagcttagaggttgcatagggtccatccaagcttatcgcccattatacgaagatattatactcaatgccaaatcggctgctttgcatgatccgagatttatgccgcttacttctgatgatctaaaaagtatcaaagtagaagtctccatcctctctgaaccaaaagaggttttgtataaagatattgatgatctaaaaacaaagatcacaccgttcaaagacggtgtcgtacttcgatatggagggcgcggagcgacgtatttgcctcaagtatgggagcaattacctgattttgatctatttttcggtaatttatgcctcaaggcaaatatggatcaaaattgcctatcaagacatccggaaatactcacttaccaagtagaaaaatacgaagaagaatgatattgaaatatttcatatgattttcacgctctttgtgatatagtaaaaataaaaaataggatttttaaaaatgatgataatcgtaaatggagaatccaaagaaatagcgcagagcacaactataaccaagctcatagattctcttggagtaaaggtgcaggttatggcagcagcagtaaatatggagattgtcaaaaaagataaatgggatacgcatatattaaatgaaaatgacaaagtcgagctgctgcactttgtaggcgggggatgagaacctttaaaaaatagtgaactgcttcactattttaggttcgaaaccaaaggcgatgtttcaaagaaaccgtatctttattattttctttttactaccctttataaaagtagcacaaaaatcgtcattatcgcgaatcgcacacactcgcttttgtactactgccacaagcatggctttcaaggagcgctaaatgagattattttatatatgaaacgccattcctgcaatcaatcactaacaaccaacaactaatcactaataaccacaacagctatagcaaatcctccgtcatggctgatggaaagtgagcttgtatggtggggaaatttgagagccgctttttggcttagcgtaaaacatggcgcgcctttggcattttttgagataatgatatcatgaaagccaagctcgcttcctattccgcagccaaatgctttactgatggcctctttggctgcccaaaatccagctatcgaagcagcccttttggtgagttttatctcatcttcgcataaaaatctctctttgaagctgtctccgaatttttcgagagctttttctatcctgttgatggctatgatatctgttcctattttcataagtgtaagtttatcatatgttttggatataaacggtaaaaatttatttgcattagtaggaaggaataataaaatgcctccgtttattcaaccaagaagtttgccatcatggcatgatcttcgtgttcaagtatatggcaatgatacacaaagagtcccggcattgtaaaatgcattataatacgaactgtttcaaatggcataaccattaccgtatctttccatcctatgtctgttgggaattccacttttccatctctatcaagcacctgaaaatggacaccgtgaatatgaaatgggtgtgccatttgtatagaattcttaagctcccagatctcggtcgtgcccagttttactttttgatctatgcgctgcatatcataaggttttttatctaacgtccaggcgtcacctataatttccatagttattgtgcgggtttttacggagtcttcgacttttaatctttggatgggcataagtttttttgggatcgtgctagtatcatcaattttttgagttactcgaaactgcatgatatccatcttggcatcaaaacctggataattgggatttaagatcagcttgcttgcttctttgaagccaagagtcttgagtgttataatatcaccgatctctttgcctttaaagtctacgacgatatcaatgcgctctgccacgcttaaaattacgctatttacgctcaagggctcttcaagcagccccgcatctgtaccgattagataaaatttttcgatattgtcaaatgccagcttgtaagttctgacgcttgatccattaagaattctgagacgatattttccggttttgacctcatgataaggaaagggcacggtattgacgagtattacattacccattactccattattgtcttgcaaaaccttttcatctttataaaataattgatacttgtcgttaaatcttctatcctggatcatcaaaggcagttcaaattctccttttgggagattgagttttgtctctttttcgtcttcaatgatataaaatcctgacaatccgtaatagatctcttttccggttctgccatgcggatgagtatggtaccagaatgtgcccgcattttggttaactgtgtaatgataatgttttatatggtcggtatcaatagcatctttggggtgcccatccatttcttcaggtacaattactccatgccaatgcaggatcgtttgatccggcagtttgttggtaagatctagatcgaagatatcgcctttatcgatacggatcgttggatttggcagatcaccttgaaatgtcaatacatctgtgtgttttccaggaaagatttctgcttggcttttttgcgctataaacattgctttatcgatctgagtaaagtttgcttcatccgggatctttagcttttgcgcaaatggtacaatatttttcagtacctttccttctgtatccagaggcttcttcgcagttgataccatgggtgattcgtttttttgttcttcgcatcctgcaaataaatacactgcggcaatagtcgaacagtataaaaaatatcttctttccattttttattcctttacgcagattatatgaattatatcattattataaatgaaattaaatttattttataataatgacttattagggagaaaagaatctgagacaaatgggtttggcaataatgacatctcacttgacttcgcgtagagtacgaagtgacaaagaaaaatatgtggataccgaatcaagttcggtatgacgacgatgccttgggcctatcgaaggccaaaggccatcctatggttaatgtttttgtatagtgcgtttttttaatgcactctactcaaacatccattcgactacttttgcgacatcttcagctataaagcactttatagctgattcttccagaggtttggccgggatgatggctttgttaaatccttgagtttgcatctcttttagtcttaaagacagattgctcacatctcgtatctcgcctgttaggcttacttctcccaaaaatacggttttagagctaagctcccggttgcgataactgctcaaaatagctgcaatgacagctagatcggcactcggttcatttatcttgataccaccgctgacattgatatatacatcataagttcctagcggcaggtcgagtttcttttctaaaagagctaagagcatagataggcggttgttgtcgaatcctgtagaacttcgtctagcccctccgtaactctcagcgacaagagcttgtatctctacaactatcggccggctaccttcgagtaaaattgtcagcgcagagcctgcttggagcttggacttgttgtagaatttgctcccaattgtcttggcatcatttaagccgtttttgttcatttcaaatataccgacctcgtttgtagagccaaaacgatttttaaatcctcttagaagcctaagttcgctattgctgtctccttcaaaataaagcactgtatctaccatatgctccagcaccctagggccggcaatggagccgtcttttgtgatgtggccgatgataaatataggtatatcatgactctttgctatacgcataagctcaaaagtgacacttctcacttgcgccacagatccagggcttgagggcagctcatcgctatatagagtttgaatggagtctatgactataaagccatattctttttggatgatttcacttagtatgtttgataagtttatctcactaagcaaaaataggtttggactgtttgcatcaagcctatcggctcttagttttatctgacctagagactcttcacctgaaacatatagcacatcttttttgcttttggcgatattgcctgctattttgagaagcagggtggatttgccgatccctggacttccgccgatcagggttagtgagccttgcacgatgcccccaccaaggacaagatcaagctcgctgctcccgcttgcaaatctatgaaactcatcttggattatgtctgtaatgggcatagctttggtactatatgatgatgagcttgatatctcttttagtatttcgatctgagcagagctaagctccatcatagagtcccatgtaccgcagtttgtgcatttgccgatccatcttgggctttgaaatccgcatgattgacattcaaatagagtttttttctttgccataaccactccttgttatgataaattataggataaaaaattgtgtgtgatttaaaaatatgtcaaaatgtaatactttttttattgttttgaatattgcaataaaataacaaagacactaacccaagctgattgatattgcgaaatagaaagaaacttataaatgagaggtgatttatggcaaagataagtgtattaaaaaacgaaatagcgacattaaaatttaatgaaaacgattatatatctataacagatattgcaaaatacaaagattcaaaagatgctaatgatattattcgaaattggcttcgaaatcgtaatacaatagagtttttaggtatttgggaacaattaaataatccagattttaaacccgtcgaattcgacaggtttaaaaaagaagcaggacttaatagttttacaatgagtccaacaaaatggatagataatacaaagcttgattgacattcaaatagagtttttttctttgccataattttgcctcgttaaataataagcaagtatagcatgtaagacaatatggtattaaaaatattgcaaattgttatatttttgtgattggacttaagatagagacgaagcttttaaagatattccgtagaatagagctttacgaggagcttctaacctcttattatagccctgtaagtatccagcttcgttgtgctacaatatgttattataataaaataagactaaattttttattaaatgataaaaaatggttgaaagaattttggggattgatttaggcattagttcgcttggctgggctgttgtagaatatgacaaacaagatgacaaaaataataaaatagtagattgtggggtaagactttttactgctgctgaaactccaaaagaaaaagaatctccaaataaagcaagacgagacgcaagaggaatcaggagggtgattaaacgtcgtcgtacaagaatgaatgagatcaaaaatttactaatatccaaaggtttgcttttaaagagtgatttagatatagaaaatggaatgtttaattctgctaaaaatagagttgatgtatggcagttgagatctgatgctttaaaaagagttcttgataataatgaactttcaagagttttagttcatatagcaaaacatcggggatttaagtttattggagatgaagaaaacgacgaggagagcggcaaagtcaaaaaagccggagcagaattaagaaataaatttcaaaatgcaggatataggacggttggcgaatggctatggagtgagcgcggattaaatcaaaaaaaaacgaaataaaagtggtgattatgagatctcgattccacgtgattttttagttcaagaggttgatactatttttgaaacacaaaaaatactgggaagtacaatagcgaccgaagagttaaaaaaatcatataaaaatattgcattttatgttagaccgatgcaaggtatagaacatatggttggaaactgtacttattttgtgaacgaaaaaagagctcctaaatgttctataagcgcagaaagatttgttgccatcggtaaattttttagtacggtagttattgataattttggcaatgaacaaaaaattgtagaactcaaagatattggtgaacttatggattttgctacaacaaaagaaaagttagaatataagcatttacgaaaaattttagggttaaatgaaaatcaaatatttaaaggcttaacatataaaagtaaaccaaaaaaatctaaaaataataatgaaaatagtattgaagagtgggaatttgataaaactgaggcagagaaaaaacaatggataagcctaaaggggcacgcaaggctaaaagatgctcttttggatggctttgatacatttatatctgatattgataaagcagatgaagttgtaaagatattgacataccataaagatcaaatgcaaaaaaaagataaattgtcaaaaattatagataatgatctagttgagaagctatctattatatcttttcaagattttaataatctctctataaaagccataagaactatatatgatctaatgagagaaaatacgattcgatatgatgaggcattgagatatgcacttgaaaatggtttattgccaaagtcaacaaacgaaaaaagtgaacttttgcctccattaaaagatacagatattgccatactcaacccaacagttattagggcatttgcagagtttcgcaaagttgccaatgcccttgtgcgcaaatatggctcatttgacaaagtccattttgaacttgcaagagaagttaacacaaaagatcaaataaaaagaataaaagatagccaatataaaaatgaaaaagaacgcaaagcggttgctgattggctggatgaaaattttggtggacaaaatattgccccaaataaaaaaaatattctcaaaaaaagattatatgatgatcaagatggcagatgtgtttatacaggcgagccgataagcttagagagactttttgacgatggttattgtgaaatagaccatatattgcctcgcagtaaaagtgccgatgatagttatgcaaacaaagttctttgtctggcaagtgcaaatcaaaataaaaccaaccaaacaccgtttgagtggcttggcagagatgagctggtttggcaaaaattcaaacaaaggattgatacaagtataaaccgtgccaagctcggcaataccaaggtcaccaggcttttaaaagagaattttgatgaaaattcccaaaaagagtttttgacaagaaacctaaatgatacgagatatatggcaaaagccattaaaacttactgtgagaattattggaaattagccaatgatgatgatagactgagggtgcaagtaaggagtggaaagcttacaagcgagcttaggggtagatggatagaaggattcatgaaagatagaagtttgcactatcatcatgctatagatgctatcgtgatcgctttttctactccaagtatggttcaaaaactttcaaatttttataatcaaaaagagttaaagcactcaaaagaaaaattggtatttaaacccccaatgcagaattttagaattgctgtggaatctgccattgttttagataaaaaagagatacttaaaaattcaaaagaggtcaataggcttttgattagccgtccaccgcgcgcaagtgtgacaggtgcagcacacaaagagacgattcagagtccaaaaaagtacaaaggaaaaggtgtaagtatcaatgacggcaaaggaatgtgcgacaatggcgatatgccgcgtgtagatgtctttacaaaagatggcaaatactaccttgttccaatatatgtcgcagattttgccaaagatgaattgccaaatagagcgattgttgcattaaaatcatatcaagaatgggatgagatagatgattcatttgaatttttattttctattcacaaagaagatatagttgaaattaaaactaaacaaacgccatcacgaccatcgatagttataaaagggtatttgtcacaagttgttagttccacggctcaaattgttttggaaaatgttgataattcagaaaatgagattttttcgcgtgataaaaataaagatggtacaccaaaaggggatagtattgctagatatggttcaaaaactttagtatatatcaaaaaatatactattgatccattgggctattatcatgaagtcaaaggtgaaaaacggctaggaacaattccgcaagaagccaaaagaaacggcgtgcttgagagacgaaagaaaaagaggagtgagaaaagacaagttaaataaagtgagttgatatgagttggaaaactatcatcatctcaaacccttgcaggttaagctcaaggaataacaatctaattctacaaagaaaagatcaagaagatgtccaaatacccattagcgaccttgcatctttgatcattgaaactacgcaatgcacactaacatcatcgcttttaacaaaactatcaagcgagagcgtagtcgtatatgtatgcgacgaaactcacactccaaatggactactcatgccgtttggaacacactcaagacatagtaaaaccgttaggtatcaagtagcttggagtgagcctttcaagaagcgaatatggcaatcgatcatcaaagcaaagatatacaatcaggcaaaagtacttgagcttgcaggcgcagataagagtacaatgcagctaagagccatcgcttcagctgtgacgagcggcgatgtcggcaaccgtgaagcacaggcagcttgtatctactggaaaggactttttgaggattttgtaagaggcgggctatgcaagagaaatagtgcgctaaattacggctatgctatcatgagaggagcagttgccagaagcataagtgcgagcggatttataccagcgcttggtatctttcatgacaatcaactaaatgcctttaatctggcagatgacatcatagagccgtttcgtccatttgtggatatgctgatttgggatctttttaaagaggaaaaagagcctgatatgttgacaaaagacgataaaacagaaatagtttcacttctttatagttggtgttttatcggagataggaatgaaactcttataaatgcgtgcgaggtggtatcgagttctttaatgtcttgttcttttacaaaagaagccaaaggattgctcttgccaagctggagtgaaaaatgaatagcagttatgaggtgagatttatgagattgatggtgtttttcgatttgcccacagctaccaaaaaagatagaaaagagtattcgctctttcgtaagtttctgataaagaatggttttatgatgatgcagttttctgtatatgtgcgcatatgcaaaggtgtggatatggtacaaaaatatgaaaaatatgtagaaaataatttaccaaaaaaaggtaatattagaactttgacagtcacaaattcacaatatgagaggatgaatatacttttgggtaatgaaaaaattgaagaaaaatcggttcaaaacagttattattattctaaatttgattgttttttttcttaaaaaattgcctctaaagcccagctggtgggcaatagttggaaacgtattatagcaaaacgaagctggataggggggcaacaaaacggatacttgtcatccgttttgttgcccacatttttataataaagggattgttgctttagtagatctttctactttttgatataaattgcttgtaagttttttgatttggttgcggaagcaggatttgaacctgcgaccttcgggttatgagcccgacgagctgacctggctgctctattccgcgataaaaaaatgtatttcgaactttaaattgtagatattagaaaaatgtaagtctagatttggttgcgggagccagatttgaactgacgacctctgggttatgagcccaacgagctaccggactgctctatcccgcggtaaaatatttacgatttttgtggatggggtaaagggattcgaacccctgaatgactggaccaaaaccagttgccttaccgcttggctataccccaacaattaactaaaagctcattgctaatgtggatggcattatagcccaaaactaataaaatgtcaatacctttttgtgaacttttttaaaaatattaaaaattgaagcgagaaaaggtataatgataactatgaattacctataattaaatagaataagaggaatatataaatgagagaatctatcaagagggtagaagatgcaataaatgccatcaagcacgggaaaatggtcgtcatgatggatgacgaagaccgtgaaaatgagggggatttggtatatgcggcaacttttagcactcctgagcttgtaaactttatggccaaagaagccagagggcttatctgtactccgctaactgcagatatagcttcacatctagaattattgcctatggtacaaaataatgattctaatcatgaaacggcatttaccgtgtctatagatctggcgagtgcaagtacggggatctctgcattggagagaagtgactgtatacaaagattggttcacccgatggcaaataaaaatgattttgtgcgtccgggacatatatttcccctgatcgcaaaagatggcggtgtgcttgtacgcacaggccacacagaaggctctgtggatctttgcaagctttcaggtgttgcacctgttggggttatttgtgaagttatcaaagatgacggtactatggcgcgaaaagatgacctagaaatatttgcaaaaaaacacaatttgccgatcatatatatatcagatatagtagagtatcgtctggccaatgagcaattggtgcatcgtatatcagaagaagaagcacatatcaacggagcaaaagtaacattgatacactatgaagaccatttgggcagaaaacataaagtggtgcaattttataagatccatacactttcaaatgtcaaattccataatataggacttgacagtgatcttttattgtctccaaaacgctttgaggtattgatgcacgggattgattatctcaaagccaatggcggggtgcttatctttttggataccaagacgatatctcacgaacaagcaaaagagtttggcataggcgctcagatactaaaagaccttggcatatctcagatccgccttttggcaacaaatgctgaaactgaatttgtgggcttgagcggttttggtctcgatgttgtacaaaaagtcatattgacgtaaaacagaaaatgttcaaaaataaaacaattacttctacatacatatggggattaattgtaatgtttttattggttttgttgtttgtggtgcttttgatctatgaagaatataatgattttgatagagaagcaaaggtattgcgcagcaactatataacagcgctgcaacatgaacaaaatattagcatcaatgaaaaaacagacattgaatcagagatagctcaaagaaaacaagctctaaaaaccagattgataaaactaatgatggagattttatctctaggcgttataatatttggttttgcacttatctgggcttgggtagtacactatatcatcaccaaacaagtaagcacctttcaagacttctttgccagggctgccaaagagcatatattgatcgatgaaaatgagatgatgctcagcgaatttaaaagcatggtcggcaatgtaaatagtatggtcgatgagatccacaaacgaaaaaacaaacttcaagacataaatgtattgttggagcaaaaagtcaaacaaaaaacaaaagacctatccgaaaaaaatatattgctagaacaagccaaaagttatagcgaatctttggtaaaagctcaagatagttttatcaaacactccatccatgagataaatacgcctttggcggttattttgatgcatttagatatatataaaatgaaatatgacgaaaatgaatatatatcaaaagtagaagcagccacaaaaatgatagctactatatatgacgacctgacatatatggtaaaaagagatcgtatggagtataaaaaagagtggcttgatatgagtgattttttataccagcgtatcgattttttcagcgagatagcaaaagcgaataaccatgcgatttggtcaaatattcaaaatgacgtgatgatatattttaatccgcttgaattgcaacggcttatagacaataatctctcaaatgccatcaaatacgctaaaaaagagagtgatatcaaggtggcgttatatcaagatcaagaaaatatcattcttgaattcataacagtttcacaaaaaaagatagaagatgtagaaaagatcttttatccttttcatcgcgaagaaagcagcgaactaggacttggccttggcttggagatcgttcgtctgatatgtgataaagaatctatcaagatagtagtagattcaacagaaattgtcaccaggtttgcttactatttttcgctaacaaaggaagatgtatgagagtgctgctgctagaagatgagccgatgctgcaaagtgccataacagagtatctgcaagagactggatatgacgtggaggcatttgaagatgggctagaagcatataaacacatcgtgcctcatcgctatgatctgtttatctttgatatcaatacaccatctatagacggactagagttgcttcaaaagcttcaaaatgataaaatttttgtacctactatttttataagtgcaattacccaaatagagcagatatcccaagcgtatgaattgggatgttatgattatctcaaaaaaccttttcatctcaaagaattgacccttcatatcgaaaggcttataaaaagaggtgaaatatgcacaaaacatcacgtcaatattagtaaaatgtatacttatgatcttgataacaaacgattgctttttgacggtgaagagcaagttctcacccaaaaacaagcacagatcatggaattgttggcattaaaccatcataaaattgttgattttgatcaattgcgctatagggtgtgggatcgcagtgatatcgataacgctaccatcagagcagagatgcaccgtgtcagagaagttttaaaagaagatattatcgaaactatcaaaggtgttggatatcgcctaaaaagtatatttcacgcataaaatgtcactaaaggttacacttaaaatatttttttaatttttttcattaaaaaaactccatgctatgttaatgctatgatgctcattcataattatcctgtgaaactttataaaaaaggaaggaggaagatgaaaatgtacaaaattcatttgagtttgctaaccgcactgttgcttgctaacaacacagcaatcggtgatactatcggtgaagcatttgacaacggtaaattttctgggcagtttaggactttttatatcgatcgtacctttagtgggactttggagaataatcgtaattcattggcaattggggggcatttgggttacgagacggctgcttggaacggccttagtctgggtgcaagagtatatagtaccaactttatggaaattcatggggatgatccgcatacggcaagtagttatgatccgtcattgtttggtgataattttgattcttatacttttatgggcgagctatatgctaactataaacttaataatacaaatatcaaaataggccgtcaaaaacttgatacgccattagcaggtgctgacgatgctagaatgctggccagcctttttgaggcggtagttgttagtaataccgatctcaaggatactacgctaatcgcagctcatgtaaccaaagaaagcgtcgggacttttggaaatgcatatgctcctgcaggccctttgggtttgcaaagcggctatggactgggttttgccgatgcaaccagcggcaggtttcgtgatatgggcaatgtggcccttggcggagatgtaaacacggacggcgtgagcgtggcagctgttgtatatagcggtatgcctggactaaagcttcaagcatgggattactatgcatatgatattttaaatgccctatatcttcaggctgattatggatggaatgctacagaatcgcttaagctaaacgcttctgcgcaatatatcaatgagtctgatgtaggcgatagtcttgccggaaatgtggacagtaacttctgggctgccaagctcggtgctaattatggcgatatgggcatctatgcagcttattcgcaaacaggatcaagcgataacagtcctgcaacaaaaggcggtataattactccatggggcggtatgcctgcattcactcaggcaatggcaaccagacatcaattctttgccgatactgattcgtggaaagtcggagcaagctataatttcaaaaacttagggcttccgcttttggcctctgtatactatactgcatttgatataggtgcaaataacacttataccaatacagcattcaaagcatcagagagcggctttgatatgacttactctcttgcaaaaaatgcggagatcaggttgagggcaaattatccgatagatttcaagcctggtttggactgggatgaatatagggtaatatttaactataatttttaaaaggataagcaatgaaaaaagatacagtagatcagattctttctaatccaaaatatcaagaattggtgtctaagcgaagcaaatttgcatggacactttcaattgtaattttggtagtgtattatgcatttgtattggtgatagcatttgagccggctttattgggggcaaaaataggtgatggcgtaataagcgtggggattcctgtgggaataggcattattgtcctttcgtttatattgacgggtatttatgtaaaaagagccaatggtgaatttgaagttcttactcaagatattaaaaattcactcaaataaaggaaaaatatgaagaagatactttttttatctttggcactcagccttgcggtatttggtgccgaagctctcagtggagaggtgcaaaagcagcctctcaatatttccgcgatcataatgttccttgtttttgtggctggtactcttgggatcacatactgggcggctaaacgcaccaaaacagcaaaggatttttatacagcaggcggagggatcacaggttttcaaaatggtttggcgatcgcaggggattatatgtctgctgcttccttcttgggaatttcggcattggtttatggggcaggatttgatggacttatctattctataggatttttggtaggatggccattgatcttgttcttggtgtctgagaggcttcgcaacctcggtaaatatacatttgccgatgtagtggcataccgcttgcagcaaatacctatccgaacactagctgctgcaggatctatcacaacggttatcatatatctgatagcacaaatggttggagcgggtaaattgatacaattgttatttgggcttccttactcatgggcagtaattatagtcggaacacttatggtgttgtatgttacattcggtggaatgttggcaactacctgggtacagatcatcaaagccgttttgcttcttgcgggggcttcttttatagcacttgcagtattgatgcagtttaattttagttttgaatcattatttgccagtgcagtaagtgttcatccaaaacatgatgcgatcatgagcccaggcggacttgtaccggatactttttcagcgatttcgctcggacttggcttgatgcttggaactgcgggcctgcctcatattttgatgagattttttacggttgcagatgcaaaagaagcgcgtaaatctgtttttgttgccacaggttttatcgggtatttttatatccttactttcattatcggatttggtgctatagtaatggtacttaacaatccgcattatcttgatgttgccaagcaagcagctgaaggcggagctccgatcttgggcggtaataatatggcagctattcatttatcgcacgcagtagggggcaactttttcctaggctttatctcagccgttgcttttgcaactattttggccgttgtgtctggattgacacttgcaggagcatctgcaatttcgcatgatctgtatgcaaatgtctttaagcgtggtaaaatagacgaagcaaatgaaatgaaaatttcaaaaattgctacaattgctttagggatcattgctattttcctaggtattgtttttgaaaaacaaaatattgctttcatggtagggcttgcatttgcaattgctgcatctgcgaatttccctgtacttttcctcgctatgttttggaaaaaactaactactagaggggcagtaataggaggagcgttagggcttattacggctattgttttagttatcttgagcccaatagtttgggtagatgtgtttaaaaatgcagaagctattttcccttcaaaatatcctgcattgatttctgttactgtggcatttgtggctatttggttcttctctatcacagataaaagtgaaacagcagccaaagaaatcgaagcgtatgatgcgcaaaacatccgctctcaaaccggtataggtgctgaaggtgcatcgtctcattaacccaattagccaatgcccaagatgggctttggcataaaggagtcacttttaatgatggaattgttgaaaaacttacaagcatatccgcctttttctttattggatgccggagcaattaaggaatttgagtatgcgggacagatcgcatattatcctttggagacaatactggtagaagcaggccatgcatttgaggtgctgtacataatcataaaaggacgtgtggaggcatatcacgatgatgagcttatcaatgtatatgatacacacgattcttttggggggatcgaacacctcaaacaacatccatccaatgaacgctatattgttagcgaagagttgatctgctatgagataccaaaacatatttttcttgctgtttgcgaaaaaaatcatgcatttagggattattttattgcttcattagtagaacgtgccgatctgttaaaagaaaaacaagaatattcttccatgagcgatctaatggtttcaaggttggaaaaaaatattttgcaagatgtttgtatcgtggaacatacatcagatatcaaaaaggcacttcaaatgatggaatcacaaaaggtgagtgctctgcttgtacgcaatcaaaataatttcggcatagtaacagacacgaatttgcgccattatattttgcataaagacgagcaaggcctaacaacgatcgggcaaatacaaaccagtccaattattagtgcaaaagagggggatctgctttttaatgtgcttttgcttatgacacagcactctatcaagcatcttcctgttttaaatgataagtctgaaccagtaggtatgctcgaactcattgacctggtaagttttttttcaaatcaaacccaccttgtgacggctcaaatcgaaaatgcagctagcctggaagctactatagaggcctcaaaacgcgttattatcatgatagaggccttgcattcaaaaggggttaagagtcgttatatagctaaattggtttcagagataaacaaaaaaacctataccaagctttttgattttataataccaaaggagtggcacgaacattgtgctttgatacttttgggaagcgaaggaagaggtgagcagatcttgcgtactgaccaggataatgcctttgtatttgcagatggatttatacctgatgatgtggagaagatatcgctttcatttatagaagcattggatgatatcggatttccaagatgcgaaggcaatgtgatggtgatcaatcctaagtggagacagcatgttgcagattatgctcaattgtttgacttgtgggtagagaatcccacaccaaattacataatggatatggctatattttttgattcagtttgtatcgccggcaagaaatcgttgcatacagatcttagggaagaattgataaataaagtgcaacaatatcctatattgataagacattttgccaaatctatagaaaattttgattcggcattgggccttttttcgcaatttttgactttgcataaagaacataaaaatgagatagatatcaaaaaaacagctctttttccaatgatacacggtgtaagggcactcgctttggagcaaggtttaggagtaacaaatacatatgagcgcatcaaagaacttaataataatggttttttaagcagggaagatgcacaagctat

SEQ ID NO: 2844 - DNA, 17321 bp, synthetic construct
  source 1..17321: mol_type = other DNA
  misc_feature 1..17321: note = Synthetic
ggacaaatacccttggggtgcaagaaaagttctgcacaatcgcatctctcttttttcctctgaaggcagttggggtttttagaggtgcccttatgttgcattagcccaattttaaaaatcaggcccattatcttttcataggccccgctccccggcttttccttttccccttaccttagatacccctcaattttttcgctaagataggctataatgctgtctaaaacttatacaatggataatttatggaacaaaaaataggaaaattcaaaggcagtatcgccaatcataagcttatcgagcgggtccttgcacaaaacaccatcatcatggcagaagagggctcaggcaagacgcatctggcgaaccttatccgcgaatacgtcatggacaacgctgtcccgacactctatctcgacttttccaatcccgatgtggatgcagtcgagtcgcgttttaagaagagcgggcgtttcttttatatgcgttttgaagagagcgacagctttgacgctgcgcttcaagaagccgcctccagacgagaaaacatctatatggccgtcaatccaagctatttttccaacaaacgtgacattaagagccggctgtcgcgcacttttcagacccctgagctgcttgaaaactactactactttttccacgagatctccttactcaatgccttttatacgaagttcgaggactttatgttctacatactctctctggtcaatctcaaaaaatatggtctgacctttctgacccagccgcatcagatcttcgaggaccataagataaaactgctcttctcttttctgtatctcggaaaatgcaccaactcggagtactataacacggagctcaaaacactcccgccgcacacctttgtctaccagcaccgccaggacagacgcaccctcttgttcaacgtcgtcgagaccgatgttgtcatgatcgaccactgagccccgagctcggctcgacttctctttttcccctcttttttcgcatcattccactatttagatacaatataaattaacttttttaaatattatgaaacaataatgcaaactcccctgctcgatatcaaagtactcgacctcgtgatcaacaaaggcgaggtcaatatcctctttggccccaagggttcaggcaaatcgaccctgctctgaacttctggcagaaaaccttcttcttgagctctcccacgaggccagcgtcggcatgatctccaaagaggagcttgagtatctgatggcctcgggcaggaaggagagggcaaaatcgctgatcatcgaaggcttcctcgatctgcacatcccctccctgcccgaggccctgcagcgccagatcaacgctgtcgtcaaaaagacgaaggcagatgagatgatttaagaaaagaggggatgagtagatgggttcgcttcgcttatggggtagtatggtgtcgatttacacctgcaaattcattccagtgcctgcttcttcttttagaggtgcccaaaagggacagcagttcggaagaagtgggagtatctttgattgagggtcgttttagcggagccgttcggtccggcgataatccatagttggggagttttcataccgcaattttacggacaacatactcattgtaatttttatcaaggctgaccagttccatttttccatccggatactttttgacaatcccctttgggtaggctttgcctttgatgtaaaccggtattcctttgtcaagcataggctgcgtgttgtcaaattcaacaaacaatttttactgattctaatgtttcttgttttaactctttgttcctcagaagcttcagaggctaaaatcctctccaagcccatgtttattacgcacaatttggtataattatgcaaaacaaataaaaggctccgccatctcttcccagcaccctacacttatccaacagtttcgctctttttgctaccagaacaaccccaaagacctcgaagaagcgatcgagtattttgctgtgtttggcgggatgggctggaaggtagacacaagccggccgcttatcgatctgatcgaagagaaggtactgcaaaactacacctacatccacagcgacatcaccaagatgacacgcagcggcaatgtcaaccatgcccttctgacgggcatcgcaatgggcgacagacgtacccactccgccttcaagcgtgcgcgcatctccaaagacgagggtgaagaggccatcgaggacctctgcaaaagcgccatcatcgaggtcgagtattcgctcgaaagcccgccgaaacccgaagacaaggtagcagacagacttctgtttaccgtgccctttatgcgcttctggttcgccttcatctcgccttttttcaaagggatcaaagagggcgactacaccgaggtcaaaacgcgctttgccaaccgcgagcagggtttttccgacctgatcatgcagaggctctttatggcgctgctgaaaaagagcttcaaagaagaccccatcgtagagatcggaagctactgggacagaaacgtggagatcgacattcttgccaagaccaagtcgggcaagatcgttgccggcagctgcaaatacgccgcgtcaaaactcaaaaagagcgaactcaccaagctcaaagagaagtgcgctatagcagaactcagccccgacatctgcgttcttttttctaaaaacagcttctccaacgaactcaagtcgcttaaaagcgaggagctcaaactctactcgcttaaaaatttcaagagcctcatcgaagatctaaacagcgaagacctcctgcaaaacctcggcaaaagatactaaattttcttatgacaccccgacagcaagaagcaataaaagagaaaatcatccaggagctcgcctttctctcgcccaagatcacagtacttcaggagatcagccagcccatctcgcctgagtgcgccctgggagatctggcccgtttcgagctgatgcatgagcaggaggtcagcgacaagagcctgcgtgaggcgcagataaggctcaagaaactccagtatgccctgcgaaaagtcgacggtgcggattacggactctgcatggagtgcgaggaggagatttcctttgaacgtcttctgctcctgcctgagtcaagccactgcatccgttgcgcgtcgaacttatagtaaatatattaagagcttattaacgaaacggtgactacaatcacccccaacgctcttatcaaaaggaaccttttcatgaaaaaaattttactcatcctgcttattgcctgctcgctttttgccgcagagatcgatgactacgccaaagagatgggcttccacagagactacaccctggccctgaacgaagcaaaaaaagccgaaaaaccgctgatgctgcttatcggagcggacaactgcccctggtgcagaaaactcgaacgccgcaccatcgcctccgaggagataaaagcgcgccttggcgaggtcgtcactgtcatcatggaccagaacttcgatgccaaaaaattcccggccgagttttcaagccctagaacgccgagcatcttttttatcgacccaaaaagcggaaagcacttcaacgagagtgtcggctatctcaaaaagaacgagttctctgccctgcttgacatggctaagaaggagttcaaaaaatgagaaaagcctccctgctctttctggcactctgcctctcaagcgcacttagcgcaagcggcttttttacccttagcgaaataaaacctgcccacgtttttgtcatgaacacctcaaacctcctcgacaaagaagacgtcgccgagataaaagagatgctgacggagtttgttgtgagcctgggactaaaacccgaacagcgggacactccgactctgatggtaaagatcagctccatcaccgccgacaagaagcacttcatccatatcaaacttgccgtcggcgaagatgtcatcaccactcgaaaaggcgccgtcaaaagctttgcactgacctatgactctgaggattttatacagagcgaaaaagaccctaaaggcgatattttagacagcatagagtatctgaccgacgagttctcctctcactacagcgaagacaacgagtagtgtgtcagtgatgtttctcaaaagctgtctaagaaaaaaatgattttggaaaaaagtagggaagaaagctttttaaagatactccgtagagtagtgctttacgaggaagcttgaaacctcttattatagcccctgatctcactcggttttgctatgaagtgattttaggctacaatagcttaacttcaactaaaatggtgaacctatgatagaaaagattttaggcatagacttgggaatagcatcacttggatggtccgtcattgaacatgacagcaacaatgacgcaaacaataaaataattgattgtggcgtcagactctttaccgcagccgaaacacccaaagaaaaagaaagcccaaacaaagcgcgccgtgaagcaagaggcatacgccgtgtcatcaaacgacgacggggacggatgaatgcgatcaagaagctctgcatcagcaatgccctgcttcatgaaaacgacctgaacatagaaaacgggatctttaacagccaggaaaaccgaagcgacgtatggcagctgcgacacgatgccctttaccgcgctttaaatgctaatgaacttgcccgcgttcttattcacatcgccaaacaccgcggttacaaatttgtcggtgatgatgaaaccgacgaagagagcggaaaagtaaagacagcgggggcagcactaaaagattctttccaaaaagcaggatgcctgacggtaggtgaatggctatggaaagagcgcggagaacagggtaaaaagcgcaacaaaagcggcgattatgagatctctattccgcgtgacttcttaggaaaagagcttgatgccatttttgaagcgcagcagagactgggtaacacccttgcttccgatgcgctcaaaaaaacttaccttgacatcgctttttttgtccgaccaatgcaaagtatcaaacacatggtcggcaactgcacctactttcccgacgaaaaacgggcaccgaaatcttcccctagtgctgagcagtttgtcgctttaggcaaattttttgccactgtcgttacggacaacgaaggtaacgagcaaaaaatcattgcgctaaaaagtgtcgatgaactcatggattttgccattagcaaagacaaactcgatttcaaacagctaagaaagtttttagcacttggggaacatcagatatttaaaggactgacctacaaaggcaagccgaaaaaacaaaaaaaaggggaagaggacaagcccctagagtgggagtttgacaaggcagaagccgagaaaaaagtctggatcagtctcaagggccacgctaaattcaaagaagtcctgggcgaagagaaatttgccgcgctgcttgacaatatcgatcaagcggacgaggttgccactattctcacctattataaagatgctgaacaaaaacaagcggcactgaaaaaactctctttggaaacagacactatcgagagcctgagcacaattggttttagcgatttcaatcagctctctctcagggcgatcaaagctgtactcccggaaatgagaaacggaaaacgctacgatgaagccatcgccatcctgggtaaacccgccaatgaaaaatcgatcttccttccgccgctcaaagataccgacataaacattttaaatcctaccgtaatccgtgcttttgcccaatttcgcaaagtcgccaacgctttggtcaaaaaatacggcagttttgacaaggtccattttgaactcgcacgagaggtcaacaccaaggctgacataaaagggatgatcgaaggacagcgtaaaaatgaaaaggagcgtgaagcggcaaaaatatggatcgccgaaaatttcggatcgtttatacccgcaacacgcaaaaatatcctcaaaaaacgcctctatgaacagcaagatggcagatgtgcctatacaggagacgccctttcgctcgaaaggctctttgacgagggctattgcgaaatcgaccatatcttgccccgcagccgaagcgcggatgacagttttgccaacaaagtcctgtgcatgacaaaagccaaccaggacaagaccaatcgcaccccctatgaatggttcggtcatgacactgcacgatgggagacctttgaagcccgcatcggctcctcatccagccttgcaaaaatgggcaaaggcaaggtaagccgtttgctcaaaaataactttgacgagaacagcgaaaaagagtttctttcacgcaaccttaacgatacccgctatatgtcaaaagcgatcaagaactattgcgaagagtactggcagcttgcccacgatgatgacaagctccgcatccaggtacgcagcggcaaacttacctcagcccttcgccatcagtgggggcttgacagcaaaaaccgcgatacccatacgcaccatgccgccgatgcgatcatgatcgcttttagcacccaggctatggtaaaacggcttagcgattattatggggccaaagagacgaaccgtgaaaaagagcggccaaagtttaaagcaccgatggaaaacttccgtgaaaacgtcgagacggctctgaccctcgagcgcacagaaaccgtcgtgacaaaagacggacgtgaagtcacgctcaaacgcctcctcataagccgtccaccacgggcaagcgtaacgggtgcggcacacaaagagaccatccaaagccccacagcgtacaaaggacgcggcgttgccgtcaatgagggcaaaggaatgtgcgacaacggtgacatgccccgtgttgatgtctttaccaaagatggaaaatactatcttgttccgatctacattgccgattttgcgaaggcagatttttcagacattactgcttatgggttagacttggcagaagattccaaattcttattcagtatacataaagatgatattgttggaatcaatacaaaagcaacggcaaataaaccagcaaaagaagtaagaggttattttactcaaatgattggaccaagcatcttgctaaatagttttgacaacgacgaagctacttttttcagatatgacaagaacaagaaaaaattcgtgtgtcaactcaatgttttaaatgcaattggtatcaaaaaatacaccatcgacccactaggctactaccatgaagttcgcagtgaaaaacggctcggcacgatacctcaagaatccaagaaacgcaaaaaaataaaaattaaataaaacaagtcgatatctctcccagaccttctaggagaaaacgatgggatggcgaacacttcatatcgcgcagccggcacggctgagcctgcggcacgactcactggtactcgataacggcgaggagtacaccatacctctcagcgacctctcctgcatcgtcatcgagacacgacaggcgacgcttacatccccccttatcgacgcgctcgctgaatgcggagcggtcacctacatctgcgacgaaaaacatcttccctcctcagtgcttctgccttttcatgcccacagccgccaggcaggtgtcgcacgaatgcaggcactctggagcgaaccttttaaaaaacgatgctggcagcgcatcataaaggcaaaagtcgccaaccaggccaaagtcatttcggaacgctccccaaagaccctggagtttctgcgtcgccttggaacgcacatcgcctcgggcgacagcggcaacatagaagcgcaggccgcacgcgcctactggagtgcgctctttgaagattttgcccgcaggacaaacgaaaacgacatccgtaacagcgcgcttaactatggctatgcgatcgtgcgggggatggttgcccgtgccctcgtcggggtcgggtttttacctgcgtttggcctgcaccattgcagtgagctgaatgcctttaatcttgccgatgacctcatcgagccttttcgtccttttgtcgatgcggtggtacgcgaactcctggacgaggatggcgaggagttgccctttcagctcgacatgcgctacaagacccgtcttctcgaactcatcaccatgccctgtcggtttggcaccatagagaccaccctcccttatgcctgcgagctcagcgccgagtcgcttctgcgtgcaagccgtggaaaagacccttctcttatcgagacggtatcttttgcatgagcacggaacgatttatgcggctgctagtcttttttgatcttccgacatctacaaaagcacagcgcaagcactacacgcagtttagaaagtttctactcaaagacgggtacgatatgctccagttttcagtctattgcaggatctgcaaaggacaagacgccgcagaacgctacttgttacatttagaaacaaaccttccgccaaaaggaaatatcagagccatgattgtgaccaacacacagtatgaacggatgaaaatcctgatcggattggataaaaaagaggaaaaaatcggctcaaaacaactcttattgttctgatttttaagtgagattttttgcacgcaaagcccgctgtgcgggctttgcgtagggtggtattatagcgaaaccgagtgagatggggggctataacctcttttagtgtagacatctcatacaaaatattatagcgaaaccgagtgagatggggggctataacaaacccgtttaaatatataggtgctatgatattatagcgaaaccgagtgagatggggggctataacaagtaatagggtctattgaatctctgaagtattatagcgaaaccgagtgagatggggggctataactagatgatgtaaaggcgaacttcaaaaaatattatagcgaaaccgagtgagatggggggctataactctgcatcggtgttgtacttaaagcgcagtattatagcgaaaccgagtgagatggggggctataacaatctaagctatccatgagcctcatgaatgattatagcgaaaccgagtgagatggggggctataactgtatatttaaccgaatcagatctcaaggtattatagcgaaaccgagtgagatggggggctataacattaaatcgtttggttcaagaaatctaaatattatagcgaaaccgagtgagatgggggggctataactcgggtgctttcgtttgagcgcaaggatacattatagcgaaaccgagtgagatggggggctataactagtcactacaaatatgacagttttcaatcattatagcgaaaccgagtgagatggggggctataaccttgtgtaaccaataaaggcaaacacattgattatagcgaaaccgagtgagatgggggggctataacaaatgatatggtgtgggccatcgaattgtgattatagcgaaaccgagtgagatggggggctataacacaaaggactgctgccgtagagatactcgatatttgtcgtgctccactcctctgccgcagctctcgtacagatccccgccagtagccacgccccatataacgctcttttcatctcttccccctctttgtttgaaaaaaacaatacataaaaatagataaataattagatactgctacaattgcgtacttgaatgtaaaagaagccccatgaaaaccttaaccgacctcctgagtgagaaaacaggacttaaaaaagagcatattgacaatattttgaaactcctcgacgagggctctactatcccctttatcgcccgctaccgtaaagagatgacgggcagtgccagtgatgaagtgctgcgtgatttcgaaacattctatgtgagtgcgaaaaaacttctcgagcgaaaatcagagatatcacgcctcatcgaagagcgcggcatcttgagtgcggccatcatgcagagcattgccgacgcgcagaacctgcgaacgcttgaagacatctaccgccccttcaaagagaaaaaaagctcccgcgccgccacggctatagcaaagggactcactccgcttgccgacacgctggagcgtgcgcagctgagtctgggcgaatttacgcagcaggcaaaagcctttgtcaagggcgaggtcgccaatgtagacgaggcgataaaaggcgcgcaggacatcctcgccgagcgctacgccgacgcggtgcgcgagcgggagatgatccacgagagcatgatgcgttttggggttttggaagtcaaaaaaggccgggagttcaacgaaaaagggctctacgccaacttcctcaaccacagcgaaaaagtcgcctatatcccctctcaccgctacctcggcatcatgcgcgcactcaaagagaaggaactctccgtcaagatctctcttgataccgaacgcatagaggagaacatcaaaaaattcaagatcccccgcaatgcctcgagctcgcaggagcttctgcttgaagcctacaaagacggcctcaaacgccttctgcttccctccatagagcgtgcggtccacaccgagctcaaagagaaggccgaccttgccgccatcggggtcttcggcaaaaacctcagccagcttctgatgacgcctccggtgaccaaacggatcattttgggcgttgaccccgccttccgttcgggctgcaaactggcccttatcaacgagaacggccactacctcgaacatgccgtgatctacccgagtgagccgcaaaacgactacgagggcgcgcgcaaaaaagtactggctttggctaaaaagtatgcgatcaaggctgtcgccatcggcaacggcaccgcttcgagagagacgcaggagttcttcgcccgcctcaacacagacgaaggtgccgggcttaactacaccgttgtctccgaagccggggcctcggtctactccgcgtccaagatcgcctcgcaggagtaccctgacctcgatgtcaccatccgcggcgccatctccatcgcccagcgcctgagagaccctatggccgcacttgtcaagatcgacccgaagtctctgggcatcgggcagtaccagcatgacgtcgatcagaagcttctggagaaaaaactcggcgacgtcacccaggatctggtcaaccgcgtgggcgtcgacatcaactctgcctcggcctctctgctctcgtatgtcgcgggcatcgggagcaagatcgcgcagaacatcattacctttagagacgaggcaggaagtttcagttcaaaggcacagctgctaaaagtcaagggtctgggcgcaaaggcctatgagcaggccgcaggcttcatccgcgtcaaagagggaaaaagcccctttgacaacagcggcatccaccccgaatcctacgctatcgccgcgaagcttgtaggcacggatctggaaaaagccgatgtgacgaggctctctgcagagcttggcgtaggaaaagagaccctcaaggacatcatcaaagagctgcaaaaacccggtttcgacccgcgcgaagagctcccgccgattcctttcaaagagggcattactgacatcaagatgctgcgggagggcgcctttgtctccggagtcgtgcgcaatatcgccgactttggtgcctttgtggacatcgggcttaaaaacgacggaatgatccacatctcgaagatgagcacacggcgcattgcccatccgctcgaactcctctctatcaaccagtttttgccgcagatcgaggtgatagctatcgatcaagagaagggaaaagtgggcttgagcctggtcttctaaaaagctcttgcctcatgcgaggtagaggagttttgcggttcttagcagctgagcacttcgatcttgtcttcacctttgggtacaaggcacaaaaaactgtaaacctcgtctccgatcgtctcataacagtgtggcacgcccgcaggaataagcaaaatgtctccttttcccgcttcaaaactctcctcgccgatctgcaccttggcccgtccgctgagcacatactgctcatgttcgaccgtgttggtatgaaggggcatgtagccgcccgcgtcgatcgtgaagttgcgcatggcaaagttcgacgactcctcgggggagagaagcatcttcatcttcaccccctggcccgctttttggctcaccgcttctatcgtctctatctgtttgtgcaggtacattcttcacctcatccgtttaaaaataaaaagtatggaagcataacacagaatcgtttttgatttcgtaatatttcagccaaaaaataacaccgcaatttgttggatttgacagtataatttcgcacaaattttatgccaggagatcgcgtgtatataacgattaaagatattctgaccaacgaacaggtcaagcatttcaagatgagtatcaccgaagatgaccacttcgtcaactacaagatcgatctctctacgctggacgatgcccttcttgaagaactcgtttcgaccttcgaaatcaaaaccgccgcgatcgaaggcaagcagtacattacgctgacacgctcgctcgaagtctaaacctgacggcttcggccgttttgcacaccccctactcccctccgtccaagcagttttacgctaaaatcacacatatttttaaaagagtccctatgcattttcaccgcgtccacatcgaagtgaccaacatctgcggtctcgcctgcagcttctgtccgccaaaactgcacccttcaaagacgatggagcttggtttttttgagcatgtcatttcgcagctgcgtccctacaccaaagagcttgcctttcatgttatgggcgatccgctgacgctctcaaacctgcacgactatcttgacctaacacatcaaaacggctttgaggtgagtctgaccaccagcggctactacctcaaaaacagctcctttgagacgcttttgcaccccggcgtgcgccagatcaacatctcgctcaacagctacaacaaaaacagcctcaacctcagctttgaggagtatatgaacgccgttttggagctctgcgccacaaagcttgcctcttaccccaagcccttcatcaacctccggctctggaattttgatgagagctgcagcgaagcggagttcaacacccttctctttgagcgtctttcgcgtttctttgagatccctctagatacccagacactctacgccgagcgccccaaatcactccgcctcgcctcaaaggtcctcctgcacttcgacagctacttcgaatggccctcgctgaactccgcgcacgagagccaggggagctgctacggtctacgctcgcatatcggcatactcagcgacggcactcttgtcccctgctgccttgacggcgagggggtgatggatcttggcaatctgcatgaaagtacgctcaaagagctgcttgaaggcaaacgcgctacagccatacgcgaaggttttatgcaaggaaaggccgtcgaagagctctgcaaaaaatgcagctacaaagagcgtttcagcgaaaactccgttatagaggaagcataatgcagaccatagcccttgaaagcctcctctatatgctccttcctctgcttattgtcggctatgtctactaccgctggataggcgatgccaaagaggttgcctacgcctccgcgcgcatggtcgttcagctcctgcttatcggctatgccctgagctttatctttgccaatgactcgctctggctgggggcctttatcctgctctttatgatctcactctccagcctcatcgccttgcgcaacttcaaggagaagagcctcaaaagctacgccctgctttttgccgctatagcgcttggcggaagtttcaaccttgctatcgtcatggttcttgttcttgatatggccacgctctaccgtcccgaggtgctcatccccctcgccggcatgatctacgccaacgcgatgaacgccgtcgcgctctgcgccgaacgttttgagagcgagatcctcataaacagttacgtttcggcgcgcaaaacctccttcaaggcgtcgatgatcccgcagatcaatgcccttctggccgtgggactggtctcgcttccggggatgatgacagggcagatcctttccggcgtcgatccgctcatcgccgtgcgctaccagatggtcgtgatggctatggtgctcggaagcgcaggcatctctacgatcctgtttttatactggcagaagccaaagcttcaaggaaaatgatgaaactcaccccgatagatgacctcaacacccccgaaatggaggtctatgcccgtctaagagacaatgccttcgacaaggacaacagcttcatcgccgacagccccaaggtcgtcaatctcctgctgcaaagcggtatcgaggtcaaaagtattctcgccacccgcgcctattacgaggagtttgccgagctgatagaagcaagaaatatccccaccctctatgtcgccgagaaaaaagtgatggagagcatcatcggccaccgcctccaccacaatgtcatgatgcacggcatccgacccgaacagacgccgctagaggggcttggggaccaaatcttgatgcttgacgagatctcctcgagcgaaaacatcggcgctatagcacgcagcgccgccgcactcggcgtcaacagctacctcatccccgaacacggcccccacccctacggcagacgcgcactgcgggtctccatggggcatacgggcatgctcaaaacccactgctacagcgacatcttttccaccctcaaagccctcaaagcccaaggctacaccatatttgccgcggaggtgacccaagaatccatcccccttgcccaggtcaaggtcccgaaaaaatgggtactgctgatgggacacgagggaaaaggactctcgcccgaagtgttgcgcgaatgcgaccacaccgtgcagatcgagatggtcgaaggcataaaaagcttcaacgtcgccatagccgcctcgatcatgatgtaccgttttacttacgggggctagccacataaagcctgacaaaaaacggttcgtctttccgcttttggaagtggagagctttggagaagtcgaaaactgaacaaagggcactcctaaagttatctgatgatgcttttagctaaaatctaagattgcacattttgcgacaactactagcgatggcaaaacatacatggaagttttgaggagattaaggtaatggacaaacgcatacgaaactcaacggcggaatttttgattttcacttctcaaagcggtgaagacagcatcgaagtgaaggtttttgatacgtccgtttggctgacgcaagctatgatagcgcagctttttgatgtacaaagaccggcaatcacaaaacacttgaaaaatatttttgaaactgccgaattggatgaaaattcagttagttccattttggaacatactgccagtgacggcaaaatctacaacacaaaatactacaacttagatgccatcatatccgtaggctacagagtaaactccaaaaaagcgacgcagtttagacagtgggcgacaagtgtacttaaagagtttgccatcaagggctttgtgctcgataaaaaacgacttgaaaacggttcatttttaggcgaaaactattttgataaactccttgaagagatacgagagattcgcctgagcgaacggatgttttatcaaaagataactgacatttatgccacgagcgtagactacaataaagacgatgcaacaaccaaaaagttttttgcaaaggtacaaaacaagcttcactttgcgatccatggacacacggcggcagaactgatctacaacagagccaaagagcacacggcactattggctggaagcgccattatgataattattgaaactcatagggtccaatatctacagtaatgccaacttttcgagagtttccatctaaatctgttgttggtatagtaatcccagtaaaactattagttcctgtatcgattaaatctgaagtagtaatcagatgataatcattaggctggtcaataaaaccaaagttaatatttacgtctaaattactaatagaaacaatatttgttgatgtgactttatttaaatcaagatagctattaattacatttaaattatatgttgcagacgttagaatttctacaaattcgtgattatgagtaaaagcactgttaacaattgtcatattatcaagattacttgcattaatagttccttctgtattgttattatcagcaaacattgaattgattatttttgcatcatcaaacgaagtagccaatgtacttctacctgtattctgtgtgaacaaactattcgttattgttaatgaacgtatggtgcaatcataacacattaggaatagcgcaaagtcatttgcgtgctctttgaatatacagccctctatatcaaaagacaaatcactcacagaatatattcctgttcccaatccattagccccagtaagtttatttcttataaattttgtatttttcattgttagcttctgctgactatcagaagaaaggtataaacctccccccatactaagagcactattattttcaaatacagtatctgtaatactagggctatattggctatccccacctacagcagcataaactgccccaccatccccaccagctatgttatctaaaaaagttgtattatcaatttcaattttagccgtatttattgctccaccgttactcgcggaattattaaagaataaagagttagaaacttttgttgtgactgcaattgtagcacctccattggataatatactttgattatgatgaaaactacaattatctatatgtaaagtcatccatgcatgaatagcacctccaccctttgagctggaagtagctctaccattctgaaatgtaatattcttaatgtataattcatttagataattattcggtgtaacattaagtatctgctgctgatattctccacttagtattacattttcacgactagaaccaataatggtcaagcgataatcttcattatctaagaaggtaaaagtcccgccaccatcatccgtagtcttataggttccatcagccaaaatgattttatcattcataccattttgtgcagcattagttaatgctattctaaattctgctgtagtcgatacatgtgtaactaaattatcagcattaactacaattgtatcggctgtgctgtttacctttccatcattaacaactaattcaattacatagctaccatatttatctgctgtaaatgtaggacttgtagaagatgcctctgaaaatgttgctgtacttccaaatggtttacttaca

SEQ ID NO: 2845 - DNA, 14341 bp, synthetic construct
  misc_feature 1..14341: note = Synthetic
  source 1..14341: mol_type = other DNA
caccattgttaatctgtagcgcatcgcagagaagtttttctgcgatgccgaacctttcaagcctccgagcattcgccttaacggaaagtattaacctcgttttaatctatttttactataatgtctccaattcaagacttcgagaaaaaagaacttcaacaaaaacctaccggatttgggatatcctcagtgagtatgtaggtttttacatacgatattgacgggttgctccccattaaatttttatgtatacgagtttgtgccgcaccgcactttaagtttgttttgaaaaattaatcataacggaaatacattatgcaaacatttgaatctttcggtttacaccaagatattctcaaagccattaccgaggccggttttaaagaaccgagtcccgttcaacaacaagccattcctttggttctccaaggtcacgacatcgtcgcacaagcccaaaccggtacgggtaaaaccgccgcgttcggccttccgaccatgagcatgatcgacgcaaaccttaacaaagtccaacttttagtcattacccctacgcgtgaacttgcgacgcaagtgagcgatgagctttattcgctcggtcgtttttgcggtattaaaaccgtcacgatctacggcggtagctcgtacagtcgtcaaatcggtttgatcgaaaaaggtgctagcgttatcgtcgcgactccgggtcggatgttagacctgcttaaaaacggtaaattacccggttttgctcctaaaatggtcgtccttgacgaagccgacgaaatgctcgatatgggatttttggaagatattgaagagatttttacctaccttcccaaagagcgtcaaacgcttcttttctcggcaacgatgcccgatcctatcaaacgcctcgcaaccaagattttacacgaaccgcaatttgtgagcattacgcctaaagaccacacgacgaatgaagatatcgagcagctctattacgtcatcaacgagtacgaaagagacgacgcgatgattcgtctgctagacgcgctagagcctgaaaaagccatcgtcttttgccgtacgaaaaaagaggtcgatagactttcaacgcaactgatggcagtcggtcacgccgcaaaaggcttacacggcgatatggaacaaaatcaacgcgaaagcgtcattaaaggcttccgtaattcccaaatcgagattttagtcgcaaccgacgtcgccgctcgcggtctaaacgtcgccgacatcactcacgttttcaactaccatatgccttttgatccggaaagttacgttcaccgcatcggacgaaccggacgtgcgggtaaaaaaggaacggcgattaccttggtaacaccgatcgaatttcactcgatgcaacgtatcggcaagaaagtcggctcaaaaatggaacatagaatggttccaagccttcgagacgtcaaagagaacaagctcgtcaaaattgccgatgagatcaaaaatgccgaagtgaacgacagcgcaagcaaacttttagccttgttggaagaagagatggatatgtctcaaatcgcgcttaaactgctctccaatctcttacgagaaaacaatcccgtaggtccggacaaaatcggtttggataaaaaaacgctcgaaaacgtcgttaaaaatatcgaagagcgtgaaaacagtcgcggcagaagcggcggcagacgcgatagcagaagcggcggcggataccgaagttcatcttctcgcgacggcggcggttatcgaggcaatcgtgagggcggttcacgcgatagcggcggatacaaaggctcacgtgaggctggaagcagagatgctcgtcctccaagaggcggcgacgcaccaagaggcgaaagccgtaatccttttgctaaagaaggcggcggatataagggcaatcgcgaaggcggagagaaagcaccgcgcacaccacgaggagacaaaccaagcggcgcaccgcgctctgatgctggtcgtgctcccaaagcagcaccaagaaacgcttacaaaaaagactcataacgtccaacgtttggcttcgcaagaggctagacgctggttttaagaagatggcgtgaaaaactcacgctatctcacttcttttagttttccctctctatttttgtcttcaatgcttcggcactttcaacatattccactttttcgacttgtttatttttcagtgtcaccaccgtaatgccgtccacttttgccccttttttcaaggagctagcaatcgtctcatccaaaatgagattgacgctgtagggctgcgttttcagatcggaaagtgcaaacgtattgcgaatcatcacgggcatcgggctgatgtctgctacaaatgccgcatgatggctcttgagataatccgcactttgcgcgccgagaaacgctttaaccgtatgacccgtattttttgcaaacaccaaaatcaatgtttgaatcgaatcatcgagcgtatgcgcttgaccgaattggtcaaaaagcgtgtacgagatcgtcgagccgacattgagcccatcgctgagcgacgccgaagaggtatgccccgcataggtatctttaccttttagaaaaaacaacactcccgccgcaacgacaagaagcactaacgcacccaacactatctttttcatatcaaaccttgtatgctaaatttacacggagtgtaccgtaacccctttttgcttcttaactcgccctatccaacgccaatttaagacctaacaaccccaacacacttcctgcgattctatcgatgtattttttcgtgcgcaagtaaatcttttgggctttttgcgtcgataaaagccctacgacacacgagtaccacgaagcatcgatggcaaaagcgatcaggcaaataaacagcgttccaaaaggcggtacctctttgggaagcaatgccgcaaaaatacttccgatgatgatcgccgtttttggattgctcatctgtgtggcaaaaccaaataaaacggctttgaaaaaactcttgggtttttgctccaaactaagcttagtctctaaaggcgtatcggcgtatttccacattttataagctaaataaacaaggtacagacctcctgctacttttaaagcgccgtacaaaaaaggcacggtttctaaaatggcatagagtccaaagatggctaacagcgaaaaaacaaccgcacccatccccaaaccaatcgccacaccaaacccctctttgcgagactttgaaacagccgttttggcgatcaagataaaactaggccccggactcatcgtccctaacataaataccgtcgctatcgcaaaaagaaaagcatattcacccatgatgtgcctttacatgtaaaaaattcaaccaaaattttggctagtgaaagtttagcatgcaaatgtggatagggagataagagaggttgtttaaatagttttttgctaaactttcttgatttgtaaaattcttttctaaaagcgagatattcaatgaaaccgacaatatggaaaaacttatctccgttcaccaaaattatagttttattttttatcgcagaaatttcacttttttggataagtttttttattggttatggttatattctatatatggatattgttttacaaaaaactaatatgttaacacaacaggatatatcaagactatattctttttctgaattactatttatcccagaagaatttcgttcggggaaaggatacaaacttaactttttaggggatatttatttcttagcattcgcattttcaaaaatattaattttatttggtctatataaaatttttagtaaaaaatcaattgaacggctatccagcactaatttgcatataaaaaatgatactgtatcgagtatgctgataggtggtttgatattaatgattattcaagatttattcattatctcatatggttattttaatactatttcattactatctgcaagcatattggttacaagtctactctatatcattataaaaattcggcaaatcgaaaaaagcatagtacaacacgaagggtaaaaggagatagactactttaaaccactactcttttaaatgcttacgtgacaccatcacgccctcataccccgtcgttttaacagcatctaaatagattttatcctcaataccatctttcgcaacgactaccgccaactttgtttccaatgttactttggcattttgcacgccatccacacttttgagtgcttttttcacggcggtggtgcacattgggcagtgcattcgtgctactttgatgaccacttcttcgttggcaaaaagcatcagcggtaaaagtaaaaacaatcctattttcattcatcatttcctatcaaaaaatttgcccattcagggtagagcaatatcacgacgatcagtcctaaaacgatcgcgtaaaaccacagcgtgcgttttctcttttgaggattacatgtaaaggtgtgatgcgtgtaactacgccatgaaagccacaaaacaaaaagcgatagcaatgagagcgggatgcgaaaaggagtgaggatttctaagaaacttagaaatccaaatgagattccaaagagtaaaaacagcaaaggcggcaggcagcatgccgtggcggcaagggctgaaagcagtgctgttagtacacctagaatctcttttttcatcgcttagagtttctcttgagagacaaaactgtacgtaaatgccgctggtgcgtaatagtctagcacttcatcttcgacttcgccgtacgggtagccaaacatattgagtggtttttgcgctggtgttggcgctaacacaaagtcacgcgcggtgttgtagcccatccagttcatttcccagttgccaaagaagtattcgcgtacctctttgatgagtggatcattcagtgtcattttttcggtcaagatgacttttgccacatcggcaggatcgcatggaacccagcccgcgccatcaaggtaaaactcggctctacaatgctcgcctcccgtaatcttcgctagcccgttttcatcgctgcttccgcatgctttggagtagcgagaactgcctaaacggataccaaaaatctcacgagcaggtatgcccacacttcgcataagtgctacaaaaacagagctgatgtcggtgcattttccacccatgatgttttgctcgatcgctttgcctgcatcacctacgccacaccccacaacagcgttgtcacggtacatattctccgtcacccatgcgtagatcgctttggctttatcgaggggcgttttagcttcagcggtgattttaagcgctaattctttgactttgccgctcgttggaatgtgcgccgttggtttgaggtaatgcgcaacgtctttggggtatttggtagaagcggttgcttttgaaagatcggcattacgctcattggttgtgatggtgtaagtgacttcaagcactttttcaccgccatttttccactcagcgtaaagtgttcgtgctttataagcatttttgtcggtgacatacgcactcgttgcattggagctaaatttaaaatcgctcactttttgatagcttgtctcttgtggaagcggaacccacagtttggtcaaaccgtttttattttcgtgtttgaggttgtaactgtttttgacgaaaaaaatacgcgttttactctttggctcactcgcttctaaaatagaaacctgagggagaataacggagctagcaccaagggctacacaccctttcataaacgttcttctttgcataaataatccttacatgtaaagtggcacgaagtggagaaaacataaaagaagtcttgaagcaatgatcgcaattatgtttgtctaagccttagacatcgtgcattaaagggattttacagtgagtttgcttaaaaaaaccgattggagtttttctaacaatgaaaactccaatcggtttaatttgcttaagaaacggttgcgcttttatgggttttgacgctctttttctttgccgccgctaaggcttgcttggaagatttttgagttggtttatgggctttgggcgtatttttcgacgctactttagacgctgaatgcgttgcatttttgacgtttttttgaggtgctttatgagctttctctttcaccgtatggtgtttgctttgaaccgtatcgcttgcgtaaacgcctgaacttaacactaaaaggcttacgaaagccgctaagaaacgtttgaacatctcttcttctctccttgctgaaaaataaaatcgcattgtactctgatttcataaacaatgtgtcatttctctatctttcagctcaaatcacaataatctttattcaatctttaataaatatattaaacatagaccaaaaattttatataatacaaaagagtgaacgctttttgcttacaaccgtcaaaactcagtttaaaggatacatcgatgcattttttagttgttgacgatagctcaaccatgcgtagaattttgtgcaataccattaacagtatcggctatacgaccacggccgccgaagacggtatcgatgcactggaaaaagcgaaagatcaaaaattcgacgtgattatgaccgactggaatatgccgcgaatggacggattgcatttggtacgaacgcttcgttctatggaagcgtataaaaaaacgccgattattatggtgacgaccgagggcgggaagcaagaagtgctcgccgcaatcaaagagggcgtcaacaattatatcgtcaaaccttttaccgcgttcgttttaagagaaaaactcaaagacatcgtctaaaaaaagcctcggtcgttcataccgaggcatcaaaatgtatcgtaaaaaagttctgcccttctgcgtaaagataactcaaacgaaacccgtgtttttcgacaatcgcatttgcgatatacaaaccaagccccaagccgctactcgctccttccgtcgtacggttaaacggacgcgaaaaatcgcgactgctctccaaaagagcctcgccgtagctaccgacggttaaggcgtgtgcatcgacgtcgacttcaatcgcctcactcgaatgcttcaacgcattgtcaagcaagtttttaaccgccgtcgcaaagagttcaaaatcgacgcttaacaaaggagcttcctcatgatggcgaacgtgaatacgtttcgtatcgcacaagagtaagtccatcgcatgatcgagcacgtcgaccaaacgatactctttggcttcgagcacccactcgttggagcttaatttttcgatcttgaccatttcgcctaaaagcgtttccaaacgctcgaagatacgctccatctgttcttgtttgtggttattttccaaggtatttgagaggagtttccctttcataatcggcgttttgagctcgtgcaggatattgcgtaaaaaaagcgttcgcgcctcttttaacatgtgaatcttctccatcgccagattaaactcgagcgcgatttcgcctaactcgtcttcgctttcaatcgcgataggatgaaatttcttgcgttcgcccacatgcctgatgtcgcttttgagctgtcgcaaacgaagcagtttttgcagcaccatcgtaaaaaaaagaagcaataacacattaatcacgccgcctaaaatccataaacgatacgacgaatacacttcggtattttccaaaaccctctcttgtgcaaaaggcggtttcatcggtgctccaaagggcatcgtatgctctttcgcaaaaggcggaggcgggggtggagcattgggaacgaaaaagagccgcttttcaaaaagtaccatatgaaaaaacggatcttccaagagtttttcccctacgctatcgagcaagtgcttatcgatcgaagagatacggactccgagttttgcgagtgatgcttcttgatcgtgcggatgatcgtgtaatatcttaaccgccatcacaaaacgctgaaacgtaaaataccgcacatcgctttgctgacgtttgtattcgatgaggagagcaatgttaatcaccgtgaacgttagagcaaaaaagatactaatgagcgttaagatagaagctttacgcattgacgaatttatacccgacccctcttaccgagacgataaaacgaggttttttaggatcgtcgcctattttttggcgaatcctacccataatcacgtcgatactttttaaactactctcgtatttgatcgagccgatattgaggagtaactcttcgcgggagatgacaaatccctctttttttaacatgtacgaaacgatgtcgtactccgccatggtcaagcgaagctcccgatcggctcgcttaatcgtatgacgctcttcgtcgatacaaaacgcttgacatgtcgcctcatgatgtgtcgcattacctcttcgtaaaatcgctctcaaacgaaacgccaactctctaggatcgtaaggtttgggcaaaaagtcgtccgctccccgcgcaaaacccatctctttatcgttcatatccgaacgtgccgaagagatgatgatcgcaagggaaggaaaggtttcgcgaacgatgcgacagatctcaagtccgtcgatttgcggtaatgaaagatcgagcaccaaggcgtcgaagttctcgttttgcaacgcgacaagtccttccaaaggcgtacatgtcaagagcgtttcgatgtgctctttctcaagcgcgttttgaagcagttgtcctaattcgacgtcgtcttcgatcattaaaattttaatcatggtttgattatagcaaagcgcaagtaaatgaagagtaacacgaaaaaccgcgctttgcttggagcgcggttttgagcttaagcgctaaagctaacggatgttcccgatagagtattttgagaggcatagttggaaatgatttgcgctaaaagcgttttcatcaaatcgtcgttaccgcttgtcgtactctcttgcgtagaggctacctcgggagtcttcgtcgtatcgcttgaattttttgaatcctgatacgcacgagcttctgcggcacttaccttaccgtctccgttggcatcggcttcgtcaaagttagaagccaacgtctcaaaaagtgaagacaaagcactgtccgtcgaagaaacgctatctgccatagccgaaagttcgtcttcggtatagcccgtatcctcatcctcggaagaagaaggcggcggtggtggcgggggcgtgcctccggccgcagatacggtactcatctccgtcgtatcggtgttcgattcgctcgatcgttgataactcatcgcttcggcaaatgttactttcccgtctccgtcggcatcggctgcatcaaaattttcaacaaccgaagaaagtaaacttgctagattttcgtccgttgaagagacctcttccaacatggaagtcatctcatcggcactcaatccgacatcattttcacccgaaggcggcggtgggggcatagaacctgccgccgacgaggacatttgcgttagtgcggtattcaactcatcggaactcacagaaccgtctccgtcactgtccaaagcggtaaaagcactgctaatagcactctcgtcgctgatggaaagtgccaaagcggcactactaaactcggcactatcgattgatccgcttgaatcactgtccatagaagtaagcaacgcttctgcgaacgaggattcggatgtagcggaatgtttagtaccgtaaccgtacgatgcgcctaacgacgcctcgtaaagagaatttgaactaagcgtcatcttctcctcctgtgtttggcttgggaatttcccgatagcaatcctaactccaaagcggtaaacagtgggtaacactgaaaaagaagaaattatttttacatgtaaaggtttacggagaaagaaaaaaagctttttagaagatactccgtagagtagtgctttacgaggaagcttcgaaacctcttattatagcccatgatctcactcggttgtgctatgaatgtgatattatatgaaaaaagcttaattcacaatgaaaaggcggcattatgattgagaggattttagggatagatttaggcattagttctttaggttggtcggtcgtagaatacgaccaagataacgagacaaacaacaaaatcatcgattgcggcgtaaggcttttcactgccgccgaaactcccaaagaaaaagaaagccccaacaaggcaagacgtgaagcaagagggattcgacgcatcatcaaacgccgtcgcgtccgtatgaacgaaattaaacgtctatgccaaaaatacgaacttatcgataaaattgacttgctagacaatgagggaatgttccattcgaaccaaaatcgaaccgatgtatgggaactacgtcacgatgcactttatcgcacacttaccggcaaagagcttgcccgcgttttgattcacatcgctaagcaccgagggtataaatttttaggggatgatgaaagcgatgacgagagcggaaaagtcaaacaagccggagccgccctcaaagacaaattttacgttgcacactgccaaagtgtaggcgaatggctttggaaagaaagaggcaaaaacgggaaaaaacgtaacaaaagcggtgattacgaaatttctattcctagagattttttggtcgatgaaattcaaacgattttcgatgcgcaacgtcgttttgggaactgttttgcaacgcaagaacttcaacaagcctataccgacatcgcattttatgttcgaccgatgcaaagcatcgaacatatggtcggcaaatgtacctatttccccgaagaacctcgtgccccaaaagcctcacctacagctgaacaatttgtggctttaggtaaattttacgctacggttgtcatcgataaagaacataaagagcaaaaaataagtgagctaactcccgttaaagagctgatggagtttgcaattagcaaagaaaaactcacttacaaagaattacgcaaatttttagcgctggatgatgaacatatctttaaaggactcgcatataaaggtaagccaaaaaaagctagaaaaggagaggaagacaaacctcaagagtgggagtttgacaaagctgaagctgaaaaaaaagtgtggatcaatctcaaagggcatgcaaaatttaaagaggtccttggagatgagaaatttttagaactgctcaaaacacaagatttagccgatgaagttgctaaagtattaacctatcacaaagatgagcgtgctaaaaaagaggaacttgctaaacttcatttagactctagcaccatcgaaaagctctctaaaatcagttttaccgacttcaatcaactctctttaaaagcgatgaaaaccatattacccgaaatgatgcaagggaaacgctatgacgaagccataagtattttaggcaagccatcttatgaaaagtctatctttttaccgcctcttaaagagacaaatatcgctattttaaacccaaccgtcattcgtgcgtttgcacagtttcgcaaagtcgccaatgccttggttaccaaatacggtgctttcgacaaagtgcattttgaactggcacgtgaagtcaatacgaaaggtgacatagaagagatcaaagaagcgcaacgaaaaaatgaaaaagaacgagaaagcgccaaagtctggatcagtgaaaacttcggtgcaagcattcccgtaacacgtaaaaatattctgaaaaaaaggctttacgaacaacaagacggaagatgtgcctacacgggtgaagtcattgcgcttgagagactctatgacgagggatattgcgaggttgaccatatcttacctcgtagcagaagtgcagacgacagttttgcaaataaagtgctttgtctagcaacagctaatcaaaacaaacgcaatttaactccgtttgaatggttcggaaaggatacggcaaagtggaactattttgaagcacgcatcagttctccctcaaattttgcaaaaatgggcaaaggaaaaatctcacgtcttcttaaaaagaattttgatgaaaactcgcaaaaagagtttttagcacgtaatcttaacgatacccgctacatgtcaaaagcgattaagacctattgcgagaattattggaaactctcaaacgatgacgacaagctacgcattcaagtgcgaagcggcaaacttacctcaacgcttcgccaccaatggggattaggaaacaaagaccgtgatacccatacgcatcacgcaatggatgccattatgatagcttttagcacgcaaagcatggtcaaaaaactcagcgactactttgcgaaaaaagagaaaaaagacgaaaaagacaaacccgttatgcctacaccgatgaatttttttaaagaagaagtcgaaaaagcaactgctcttgaacgccaagaaaggattcaaaccaaagcgggagaaactaaaatcctaaatcgcttgcttatcagccgacctcctcgtgcaagcgtaacagggaaagctcacgatgacacatattacagccctcgtacaagaatagtaaaaaaatcaaatggtaaagttgattatttgagcaataatgaacttagaaaggctatttttaccagatctggacttgcaaaaaatggcgacatgatacgaagagatattttcatcataggcaatcgtatcagcattgttcctctttatattagtgatctatcatctactaatgaattatctaacaaatccttaaatggtacacctatcgacttaaataatgctttgttttattgcagtttatttaatgatgatttgattaaagttggtgtaaaagacaatgagtattttggatatttcaaattttttgaaactgatggacgtattaatattgaatcaatagatggctcacaaaaattaaggtttagtatcaataatgcaaattttattaagaagtacaccatcgatccactcggatattaccatgaagttaaaggagaaaaacgcttaggtactataccgcaagaggcaaaacaacacccaaaacgccaaaaataataaaatttgtcgatttactcccatccttacatgtaggagggagtaaatgggctggcgaacgttattgatcacgcaaccggcaaagttaagccttttgcatcattcactggttctcaacaacggcgaagagtttactattccattaagtgatcttgcttgcgtcgtggtcgagtcgcgtcatgtcacgctgacctcaccgctcatcgatgcactctcctacagcggagcggtcgtttacctttgcgacgaaaagcatctgccctcttccgtcatcttaccttttcatgcacattcacgccaagcaggcgtcgcacgcatgcaagttgcgtggagcgaaccttttaaaaaacggtgctggcagaaaattatccaagcaaaaataaccaatcaagccaaagttagcgaaacactctcgcatgaacagatgcgctatttgttttccctacaaaaccgcgtcacttcaggcgatagcaccaatgttgaagcccaagccgcgaggctttattggagcgtgctttttgaaaattttgtgcgccatacggacgcaaaagacattcgcaatgccgcgctcaattacggttatgccgttttgagaggacttgtcgcacgcgcaattgtcggtgtagggtttttgcctgcttttggactacatcactgtagcgaactcaacgcgttcaacctagccgatgacgttatagagccttttcgaccttttgtcgatgaaacggtcaagcaacttcttgacgaagacaaagaagaactccccttgcatcttgatacccgctacaaaacacgacttttagagctccctttgcttccgtgtcgcatcggcaatgttgaaacgacgctttcatacgcttgcgaactctgcgccgaatcattgctacgagcgaccaaagcaaaagatgcgacattgcttgaaaccgcgagttttatatgacggaggcaagatttatgcgactacttgtttttttcgacctacccacgcaaagcaaaaaagagcgtaaagagtacaccaaatttcgtaagtttctactcaatgacggttacgatatgcttcagttttcagtgtattgccgcatttgtaaagggcaagatacggcggagcgttacatgtcacatctagaaacaaatctaccgccaaaaggcaatattagagcgatgtcagtgaccaatactcagtacgaacgtatgaaaattcttattggaatagataaaaaagaggagaaaatcggtaaaaaacagctgattttattctagttttttttcgatacaacctttttagaacccctaaatataggggttctagcgaggtctattatagcaaaaccgagtgagatggtgggctataac

SEQ ID NO: 2846 - DNA, 7332 bp, synthetic construct
  misc_feature 1..7332: note = Synthetic
  source 1..7332: mol_type = other DNA
  variation 6842..6843: note = note, n is a, c, g, or t
  variation 7140..7141: note = note, n is a, c, g, or t
atcagccgctcatagtcacaagcttttttaaatagattctccgcattgttgatagcgtcatcgacggtaagtattttaaactgctttaaaaagtcacggtgcatctcaaactctatgttccagataggtttatctttttccatgccgttagaatatagatactcttccatgagttctgatttcttggatttttccatctcttttagcttgttatatatacggagtctaaaaggcggcttgccgatatatagcgtctctagcatctgccttctgcatatttcattattgatactgctgacaaatgtttttttggtggcaaacatagagccgcagagtcttgaaaagtcggcttgaacaaatgcgtttacatccattctcgttatatgggtttttccgctagtgatgtttttgactatggagtctacatattcgattaatgactttagacctagcgtatatattcctctggcttgaagtcttatgcgtatgtcgtgaaggtttctttgtttatggctgtctttgaagcctatatatacaaactccatctcatctttaaaatagtggtagccctcaggctgacccgtatagtttaatctaacgccgttaagctctatttgaagcgatgagcttttgccgaaactaaaactacctttttgcttttgaatatctatctcttctagcatatcaagaaagaatgtgccgtactcttttcctgattccatgaaataataaagcgtatctatgccatttatgatgtttggctctattgaagagtccatgaagtgattgataataatattatttttagcaactgatgccatatttttatttccttttgaatgttaataatcaaataggacgaaagaaagtaatagccacccacacgaatacagatataaatgctccataagaacaattaacttgtatttcaaacacctctggcgtttgtgggggcgtattacttatacgcccaaccgaaacattgactacgattcaaaagcttttgaacattccgccattattagcacaacaggcgccaaaggcgctacagtgctaacaagggcggttaagttgttataacgagagggattttaggggtttgagaaaggaaaatcaaaaaaaatatgcgtaggtttttggggagatttttttattgaagaaatgaagccatttctatatttccagcgactggctttaaaagcttgtcgtatagtctttgtttgatgattgattttgcgccattgctatctaattttctttttatactttcttccatcttttgtatatcaattacggcgctcttattttttgaagcgtaagcgtatattggcactccttttatgctggcttttataaatacaatgctcatctttttcggatatacctttatcggtttatcgattgcaaaaaatatatcttctatagcatcagctaggagctttgcatctttaaactctacccctgctttttcatatagcatttcaaagaatttgaatatttttatacctgctgacatataaaccatttttggttgcaagccatacccctcaaagtatgcgcccattcttgcaatttcagatgctagattgtagttttgtataatttttttagcagatgctctatttcttggatttgtgccgactttttttattgctataacttcgggagtagtcaaagttatatactccgaagccgcaccaaacatccgcatggttttattcgggttttcttgaaaagctttgaatacggctttatggagttctaatttttcaaacatctttttatcgccagtggttgtgtatagtttttgactctcttttattctgtctatgtgttggcttgtgtagtgtttgatattcttttttaggagggctatatcttgcatatgcgggtcgtctttatcctccaaatgttttactatctgtttggcggagaagattatttttgtagtttgtagcaatgtcggtatttggctaaaaatttcattgattttatcttcattgaaattatcgtcttcggttaatttgtcaatcattttttggaatagctctttatgctcttctttgaggtttggggtgaagtttattagtttggcgagggataggatggcggggattttgtcattattcagtttcatggttctatttaatgatggaacgggtttgggaagataccccttagggtagagctttacgaggagagcccgtgtcctcttattatagccgtgcttccaatcctactcttctgcgttatggctacagattacattttaaaatcattttgattaatttttgttaaaatctttaaaacttgtcttaaggggcttttgatggttgaaagaattttagggatagacctagggattgcgtctctgggttgggctgttgtggaatacgacaaagacaatgacactaataatcgcatagttgattgcggcgtgcggctctttacggcagcggagacaccaaaagaaaaagagagtccaaacaaagctagacgggatgcgagaggaatacgcagagtgctaaaccgtcgccgtgtacgcatgaatgagataaaaaagctttttattgagaatggactcataaaagaaaaggatttggacgaaaatggtggaatgtattacggcaaggaaagccgcaccgatgcatggaaacttcgatatgaggctctcagacgaaagctgacaggtaatgaacttgcgagagtgcttgtacatatcgcaaaacatagaggctacgactttgaaaccgaagatagtgaggcgggcaaagttaaaagtgcaggcgaagttctaaaagcaaagtttgaatctgcgggatacaagacgattggcgaatggctttgggttacgaaaggcgcaaaaggcaaaaaacgaaataagagcggcgactatgagttttcaatacatagagattttttggtttcagagataaaaacaatctttgaaactcaaaagcattttggttcaaactttgcgagtgatgaactgttgggcgcttattcagatattgcattttttgtcaaagagccgccgagtgttgagaatatggttggcaactgcacatattttccagaagaaaaacgagcgccaaaatgttctattacggcggaaaagtttgtagctttgggtaagttttttaatactgtaatcattgacaatgcaggtaacgaacaaaaaatagttgagcgaaaaagtattgaagagcttttggattttgcgacaagccaagatagattggaatttaggcatgttagaaaatttttaggacttgctgaaaacgagatattcaagggactaacatataaaggtaagccaaaaaaaccaaaaaaaggtgaagagcaaaaagcagacgaatgggaatttgataaagctgatgcggaaaaaaagcagtggataagcctcaagggtcatgcaaagttccgtgaagttttgggtgaaatgtttgatgattttattttcaatacaagtattgccgatgaggtagccaaaatacttacttaccacaaaagcgaaaaccaaaaattaatcgcccttaataagctcttgcctgatggagtgatagcagagaagctatcaaaaatatctttttctgattttttgatgttgtcactaaaagctatcaatgctattttgccagagatgcaaagcggcaaaagatacgatgaggcgataggaatattgggtgctccatcaactgcaaaaagtgagtatttaccgcctctaaaagacacggatattgctatactaaaccctacggttataagggcatttgccgagtttcgcaaggtggcaaatgcccttgtgcgcaaatatggagcgtttgacaaagtgcattttgagcttgcccgtgaagtgaatacgaaagagcaaagaaaagagtgggaaaaagcatcaaacgaaaacgctaaacttaaaaatatacttgccaatgacatacgagaggcaggctataaagacggcataaaaaacatacttaaacttcgactatttagagagcaaggcgaaatgtgcccgtattgccaaagtaaactaaaatatccagatatatttgatgatgggcaccaaatagaccacatacttcctcgtagcaggagcgcagaggatagttatgcaaataaagtattagtgcatagtgactgcaaccaaaacaaacaaaataaaacgccttatgaatggttaaaaaacgatactgagcgtttagagaaattaaaaagttttactaattctgggcttcatcaaatgagtgcaaagaaacgaagatacctattgaaagaaaactttgatgaaaacagcgaaaaagagtttttaagccgaaatctcaacgatacaaggtatatggcaaaagctatcaagacatattgtgaaaaatactggaggctaagacaagacgatgacaaactacgaatccaagtgcgaagcgggaagcttacaagcgaactgcgaggtagatggcttgagggatttaagaaagatagagggtggcatccgcaccacgcacttgatgctattgtgatagcgctttcgactcaaagtatggtaaaaaagcttgccgactactatgccgcaaaagagacaaggtgcgaaaagcaaaaacctgaacttaaaactccaatgtcaaattttagagtcgaagttgaaaaagctttagagctcgcaaaagataaaaacggacacaaaagactacttatcagccgtccgccaagggctagtgtgacgggtgcggcacataaggagacgatacaaagtccaaaagagtataaaggcaaaggattgccaataaataacggtaaaggtgtatgtgataacggcgacatgccaagagtggatgtatttaccaaagacggaaaatattatcttgtgcctatatatgtggctgattttgccaagcatgagttgccaaataaagcaatagtggcaggcaaggataaagagtgggtggaaatgggcgagagttgtcaatttctattttcgtttcacaaagatgatgttgtagaaataaaactgaaaaataaagagtcatttttgggatactttaaacaggctgatagctcaactgcaaatataaagttacagaaaatagactccgatgagcaatttaattttggttcaaaaacagctgagtacatcaaaaaataccaaatagaccctctaggctactatcacgaagtcaaaggtgagaaaagactaagtacgatactgcaagaggcgaaaagaaaaagtaaaaaagacggaaaaagcgttatcgagagacgagccgcaaaaagacgaataaaaacaaaatcaaaaaatacgataatataagccatgcaaaaaagaattgaaaatattgaggttttatcttctatcaaagagcgctatgggctagacaagatagcaattttcggctctatggctagaggcgaggacagagtggatagtgatatagacatagcggcagagtttcataatatagacctttttgagcttgcaggtatcaaagaagagcttgaaaaagcgtttggcagaagagtggatatagtctgcatgagaagcaacatgaacccctatctcaaaaaacgcattgaggcggaggctgtatatgtctgagacgctgagctttgaactaactagccaaatcatagaagcgacgcaaaaggtgttgcgtcggactgaaaatatcaaaagctctagcgattttttgaccgatgatgcaagcatggaaaagctagacgccgtttgtatgcagttaatagccatcggcgaagggctaaaaaaattagacgatataacacatggcgcactgctctcaaaatatgacggtatagaatggcgaaaagctatgggaatgagagatatactctcgcatcattattttgaccttaacgccgaaatagtttttaatacttgcaaaaacaagttaccgccaatgcttgatactttgcagatagtactaaaagagctataggcaaagggcggggcaaaggatgggctggcgcacgatagtcatctcaaacccttgccgccttagcgtcaaaaaccgtcatttggcgatagagcctcgtgatggcgaagtggctatgctcccactttgtgatatatcggttgtgatgctagagacgccacaatgccttatcacctcagcgcttctttcggcgcttgccgatgagggcgtggctctttttgcatgtgatgcatcacacactccaaacggtctttttgctcctttcgcctctcactctcgccacacaaaagccgctttgcttcaagcctcatggagtgagccttttaagaagcgatgttggcaaaaaatcatagaagccaaaattaaaaaccaagcaaaactactaaagcatgtcggtaacgatacggcacataaaaggcttacgaatatagcctcaaaagtactttcggatgacagcacaaactgtgaggcgcaagcggctagcgtatattggcaatcgctttttgacggttttcgcagaggttcgctcgaagaagatgtcagaaattcagccctcaactacggttatgcagtacttaggggtgtgatagctagaagcgtggcggcatctggtctcatccccgcctttgggcttcatcacaaaagtgagttaaacgctttcaacctagcagacgacctgatagagccgtttcgtccgctcgtggatatgctcgtgtgggagatgtacgaaaaagcaggttttgataccaaagccttactagtaaaagatgacaaaatggagcttgtgggactgcttggcgaaaaatgcaaaataaactcccaaaacgaaactatcctaaacgcttgcgacatagcggcgcagtcgctctcgtcgtgtggggcggcaaagtcgcatanntatgagataagatttatgcggctgattgtattttttgatttgccgaccgcaacaaaaaaagacagaaaagcgtatacaaaatttcgcaaatttttggttgataatggctttttgatgatacagttttcagtatatgttcggatatgcaaggggcttgatacagtacaaatgtatgaagattatttggaaaaaaatattccgccaaaaggcaatgtacgcgcactcactatcacaaatgcgcaatacgagagaataaaggtgcttttagggacggaaaaatatgaagaaaaaattggnnacattttgaatataattttgaaagaaatttggtttttgtcggtcgtaaattaaatcaaaaatggacaaaaaaatgagaaaagccacctgctttttgataaaaaataatcgttttttgaaggcaaaaaaagtttgccaaagcctttgtcgtcaggcttcgacggatgggagattatagcgcagaagagtagg

SEQ ID NO: 2847 - DNA, 4785 bp, synthetic construct
  source 1..4785: mol_type = other DNA
  misc_feature 1..4785: note = Synthetic
tgatatcattactcgaagctgtgttgctactgccatagctagaataagccgataccccatacgaagaactagaattgatattcatcgtctcctcctatttcggatttgggagctttcccatccaaaatcttaatacgaaaggggtaaacggtgggtaacattagtttacatgtaaagatttttcataattaaatttaagaagataaaaataaacgaagcaaagctttttaaaagctttttagtagatactccgtagagtagtgctttacgaggaagcttcaaaacctcttattatagcccttggatctcactcggttgtgctataaatgtgatattatatgaaaaaagcttaattcacgatgaaaaggtgcgtcatggttgagagaattttaggaatcgatttaggaattagctcactcggttgggcagtggttgagtacgacaaagacaacgacgagaacaacaaaattattgattgtggtgtacgattatttaccgccgctgaaacacccaaagaaaaagaaagccctaataaggtaagacgtgaagccagagggcttcgccgtgtcatcaagcgacgccgtgttcgcatgaacaagattaaacggttatgtcaaaaataccaccttataaaagagatcgatttgcacgaagatgcaggtatgtttcactcctcaagtaaccgtgttgatgtgtggaaactccgtcatgatgcactttatcgcctcttaaatggcggtgaactggctcgtgtgctcattcacatcgcaaagcatcggggatataaatttttaggcgatgatgaaagtgatgaagagagtggaaaagttaaaaaagctggagccgcacttaaagacaaatttcacgccgcacattgtcaaagtgtaggcgaatggctctggaaagaaagaggcttacaaggcaaaaaacgcaataaaagcggtgattatgagatttcgattcccagagattttttagtcgaagagattcatcgcatttttgaaacacaacgaaaatttggctcttcttttgctccttttgaactccaacaagcctataccgacattgctttttatgttaaacctatgcaaagcatcgagcacatggttggcaagtgtatctattttcccgaagaacctcgtgccccaaaagcctcacctacggcagaacaattcgtagccttaggtaaattttacgctacggttatcatcgacaaagaagataaagagcaaaaaataagtgagctaaaaactgttaaagagctgattgattttgcaataagcaaagaaaaactcacctacaaagagttacgcaaatttttagcccttgacgatgaacatatcttcaaagggcttgcttacaaaggcaaaccaaaaaaagtcaaaaaaggcgaagaagacaaacctcaagagtgggaatttgacaaggctgaagctgaaaaaaaaatgtggctaaaccttaaaggtcacgccaaattgaatgaagtacttggagttgaatcctttttagaactcctcaaaaatcctgatttagccgatgaaattgctaaagtattaacataccaaaaagatgagcgtgccaaaaaagaggaacttgctaaacttcctttagaggctagcaccatcgacaagctctcaaaaatcagttttactgactttaatcaactctctttaaaagcgatgaaagccattttacctgagatgatgcaaggtaaacgctatgatgaagccatcagtattttaggtaaggcatccagtgaaaagtctatctttttaccgcctcttaaagagacaaatatcgctatcttaaacccaaccgtcattagagcgtttgcacagtttcgcaaagtagccaacgccttagttttaaaatacagcagtttcgataaagtgcattttgaattggcacgtgaggttaataccaaagaagatagaaaacgatgggagcaagaccgagataaaaatgaaaaacaacatcgtcaaatttctgagaaattaaccgaagatgaaattaaacctaattataaaaatgttttaaaagcaaaattgagaagtgagcaaaaagacacctgtccctactgtcaaaaaaatttacattatcccatgatttttgaagacggctatgctgaaatagaccatatacttcctttgagtcgaagccaagatgatagctatgtgaataaaatccttgttcacagttcgtgtaaccaaaataaaaaaaatcgtacaccctttgagtggtttcaagatgaaaaacgagattgggaaacttttaaaaattatattttgctggaatcaactttaggcaagagaaaaagaagttatcttattaaagaaaattttggtgatccacaaagtcaaaatgagtttatttctcgcaacctcaacgacactcgttacatgtcaaaagcgattaagacctactgcgaaaaccactggaaactctcccatgatgatgacaagcttcgtattcaagtacgaagtggaaagctaacgtccactcttcgccaccaatggggactggatagtaaaaaccgtgacacgcatacccatcacgctatggatgccatcatgatagcctttagcacgcaaagtatggtcaaaaaactaagtgattattttgccaaaaaagagaaaagagaagaaaaagaaaaacccgtcttagccactcccttaaaacagtttaaagaagctgttgagaaagcaacagagcttgagcgtcaagagagcattcaaacaaaaacgggagaaaccaaaattttaaaccgcttgctgattagccgaccacctcgtgctagtgtaacaggtgcagcacataaagagacgattcaaagccctaaagagtataaagggcgtggtgtaaaggtcaatgatggaaagggtatatgtgataacggagacatgcctcgtgtcgatgtgtttttaaaagatggcaaatattatcttgtaccaatctatgtagccgattttgctaaaggagagttgccaaccataactgcttatggtgaaaaacttgtggaaaatgcgtcatttttatttagtatttataaagatgaaattattggaatcacaacaaaagcgactgctaataagccatcaaaagaagttaaaggctattttgcacaactaattggacccagtattttactcaacagttttgataatggtgaagcagaatttttcagatatgataatggtaagaaaaaatttgtatgccaacttaacgttttaagtgctattgctgtaaaaaaatacaccattgaccctctgggctactaccacgaagtcaaaggtgaaaaacgcttaggtaccataccgcaagaagccaaaaaacacccaaaacacccaaaacgccaaaaataataaaataagccgatttactcctatccttgattttaggagggagtaaatgggatggcgcacgctttttatcacccaacctgccaaattgagccttttgcataactcactgatacttaacaacggtgaagagtacacgattcctttaaacgaccttgcctgtgtagtaattgaaacacggcaagtgacacttacatctcctcttatagatgcgcttgctaacagtggtgctgtggtttatatttgcgatgaaaaacatctgccctctagtgtcatccttccttttcatgcacactctcgccaagcaggagttgcaagactccaagtgctttggagtgagccctttaaaaaacggtgttggcaaaaaatcattcacgctaaaattaccaatcaatcccaagccttagactcaaatgccaatgacgatatagcctatttgtgttctcttcgaggtcgcattacctcaggcgatagtaccaacatcgaagcacaagccgcaagggcgtactggagtatgctttttcaaaattttactcgccatatagatgaacaagacatacgaaattctacacttaattatggatatgctgttttacgaggcatggttgcacgggctttggtcggcgttggatttttacccgcttttggactgcatcattgcaatgaactcaatgcgcttaatcttgccgatgacatcatcgaaccctttcgaccttttgtcgatgcactgacacgagagttgcttgatgaagatggagaagaacttcctttaaaccttcccatgcgctacaaagcacgactgcttgagcttccctcactaccctgtcgtgttggaaaaatggagaccactttgtcttatgcctgtgaactgtgtgcggaatctttgcttcgagcaaccaaagccaaagatgcaacgctgattgaaacggtgagttttctatgacggaggctagatttatgaggctacttgtttttttcgacctaccaacggcgaccaaaaaagagcgtaaagactataccatctttcgtaaatttcttctcaaaagtggctatgacatgcttcagttttcagtgtattgtcgtatatgcaaaggtcaagatactgccgagcgttacatgtcacatttggaaacacatctaccaccaaaaggcaatataagagcgatgagcgtcaccaatacacagtatgaacgtatgaaattattgataggaatggataaaaaagaagaaaaaataggtaaaaaccaactgcttttattctagttttaaaatgaagaattctcaaaaaaacccctattatcaggggcttaattgaggtctattatagcaaaaccgagtgagatggtgggctataacacaaaacaaggcttggttttgtagtcctttattatagcaaaaccgagtgagatggtgggctataacaatg

SEQ ID NO: 2848 - DNA, 4456 bp, synthetic construct
  source 1..4456: mol_type = other DNA
  misc_feature 1..4456: note = Synthetic
cgtagtggcaacaaaaagcttgagggttgagtgtaagaaagacttcatggaagactcctgagtagatgggataaacatgccaggaggtgaaaacctcccgggcttttatccctccgtgaacctctactcaagaggcgatagctctcggaccagtcgcagaatctgccggaaccctagctatctttgttgtttttgcgtcgaggctttcgccccatgacatgttttctagcataagtataaccaagccacgcataaaaaaaaagagaataaatgattaaaaaataagcagttagctgagtctattttagtttacatgtaaagaaatttggggttgaaatttacaaagaaggaaaagctttttaggagatactccgtagagtagtgctttacgaggaagcttcgaaacctcttattatagccctttgatctcactcggttgtgctataaatgtgatattatatgaacattgcttaattcacgatgaaaaggtacgtcatggttgagaaaattttgggaattgatctgggcattagttccttaggttgggcagtcgttgaatacgacaaagataacgacgaaaacaacaaaatcattgattgcggagtaagattatttaccgccgcagaaacccccaaagaaaaagaaagcctaaacaaggcaagacgagaagcaagagggcttcgccgtgtgattaaacgacgacgtgttcgtatgaataccatcaaacatcttcttataacgcatgaactcattgataaaacggttttagatgaagaaactggtatgtttcactctcaaagtaaccgtgtcgatgtgtggaagcttcgccatgatgcactttatcgcctattaaatggcgatgaactggctcgtgtgctcattcatattgcaaaacatcgaggatataagtttttaggcgatgatgaaagtgacgaagagagcggaaaagtcaaaaaagcaggtgctgaacttaaagcaaaattccaaagtacaggatgccaaagtgtgggtgaatggctttggaaagaaagaggcttgcaaggcaaaaagcgcaataaaagcggtaattatgagatttcgattccaagagactttttagtcgaagagattcatcacatctttgaaacacaacaaaaatttggatcttctcttgccacctcagaacttcaacaagcctattccgacaccgctttttatgttaaacctatgaaaagcatcgaacacatggttggcaaatgcacctacttccccaatgaacctcgtgcccctaaagcatcgcccacagctgagcaatttgtagccttaggtaagttttatgctacggttgtaatgaacaaagaacataaagagcaaaaaatcagtgagcttaaaaccgttaaagagctgatggattttgcaataagcaaagagaagcttacctacaaagagttacgcaaatttttagcactggatgatgagcatatctttaaaggacttgcttacaaaggcaaacccaaaaaagtcaaaacaggagatgaaggtaaacctcaagagtgggaatttgacaaggctgaagctgaaaaaaaagtgtggataaatcttaaaggacacgcaaaatttaatgaagcacttggagttgagtcctttttggaactcctcaaaaatcctgatttagccgatgaagctgccaaagtattaacctaccacaaagatgagcgtgctaaaaaagaggaacttgccaaacttcctttagaggctagcaccatcgaaaacctctctaaaatcagttttaccgactttaatcaactctctttaaaagcgataaaagccattttaccagaaatggaaaagggtaaacgctacgatgaagccatcggtattttaggaaaaccttctcatgaaaaatccatctttttaccaccccttaaagatacaaacattgctattttaaatccaacggttatcagagcgtttgcgcaatttcgcaaagtagcaaatgcattggtttcaaaatatggcagtttcgataaagtgcattttgagcttgcacgagaggtcaatacaaaagaagatagaaaacgctgggaaaaagaccgagacaaaaacgaaaaaatgcatcgtcaaattactgaaaagctcgtagaagaaggtattaaaccaagctacaaaaatatcttaaaatctaaattacgaagtgaacaaaaagatacttgtccttactgccaaaagaatttacattaccccatgatttttgaagatggttatgctgaaattgaccatatactccctcttagtcaaagccaagatgacagctacgtcaataaagttcttgttcatagtgcatgcaaccagaacaaaaagaatagaacaccgtttgagtggtttcaagatgaaaaaagggattgggatagatttaaaaactatattttaatggaatctacactaggtaaaagaaaaagaagttacctcatgaaagaaaactttagtgacccacaaagtcaaaatgaatttattgcacgcaacctaaacgacacccgttatatgtcaaaagcaattaaagattattgtaaaaaacattggcaattagcctctgatgatggagaaagaattcaagttagaagtggaaagttaacttccacccttcgtcatcaatggggattagatagcaaaaatcgtgaaacgcatacccatcatgctatggatgctattatgatagcgtttagtacgcaaagcatggttcaaaaactcagtgactacttcgccaaaaaagagaaaaaagacgaaaaagaaaaacctgtcttaaccactcctctaaaacagtttaaagaagctgtcgaaaaagcaacaaaacgtgagcgtcaagagagtattcaaacaaaaaagggagaaactattacccttaatcgtctgcttatcagccgaccacctcgtgctagtgtcacgggagccgcgcacaaagaaaccattcaaagccctaaggattacaaagggcgtggcgtaacaatcaatgatggtaaaggtatatgcgataatggcgatatgcctcgtgttgatgtttttattaaagaggggaaatactatcttataccaatttatgtagcagattttgctaaaggagagttaccaaataaagcaattgttcaaggtagagataaagagtggattgaaatggatcaaaattataagtttttattttcacttgcaaaagatgatttaatagaattgcatcaaaaagggaaagtcccattgcttggtttttttgctgggacagatagtgcaactgcaaatattgctatcaaggctattgaaacacaagaaattttcaaaagtcttggggtaaaaacagctttatcatttaaaaaattgcaaattgacccactcagctactaccacgaggtcaaaggtgaaaaacgactcggaaccatacctcaagaagtaaaaaaacactcaaaacgtcaaaaataataaaatatgccgatttactcccatccttgattttaggagggagtaaatgggatggcgcacgctttttattacccaacctgccaaattaagccttctacacaactcactgatactcaacaacggtgaagagtacacgattcctttaaatgaccttgcctgtgtggtggttgagactaggcatgtgacattgacttcaccacttattgatgcccttgccaacagtggcgcggttatttatatttgtgatgaaaagcatctaccctctagtgtcatactcccttttcatgcacattcccgtcaagcaggtgttgccaagctccaagtgctttggagcgaaccttttaaaaagcggtgctggcaaaaaattattcatgccaaaattactaaccaatccgaagttcttgattcatcagctaatgaagatatagcctatttatgctctcttcgtagtcgcatcacctcaggtgatagcaccaacatagaagcgcaagccgcaagggcgtactggagtatgctttttcaaaattttattcgccatatggatgagcaagatatacgaaattctgctcttaattacggatatgcaattttgcgaggtatggttgcacgtgctttagtgggcgtaggatttttgcccgcatttgggttgcatcactgcaacgagcttaatgcgcttaatcttgcagatgacatcatagagccatttcgcccttttgtggataccattacacgagaactcttagatgaagatggcgatgaacttcccttaaatcttacgatgagatacaaacaaagactactcgaacttcccacactaccatgccgacttggaaatatagaaacaaccttatcctacgcatgtgaactatgtgctgaatcgttgcttcgtgcaactaaagcaaaagatgcaacactcatcgaaaccgtgagtttcatatgacggaggttagatttatgcgactccttgttttctttgaccttccaacggctaccaaaaaagagcgaaaagact

SEQ ID NO: 2849 - DNA, 17604 bp, synthetic construct
  source 1..17604: mol_type = other DNA
  misc_feature 1..17604: note = Synthetic
agattttgtgcatacctttggcgatgtgcacatttattccaaccacctcgaacaagtaaaactgcagctcaccagagaacccagggcactgccaaaaatgctgctcaaccacgaggtaaaagatatttttggtttcaaatacgaggactttgaactgctgggatacgacccgcacccgcggataaaagcggcagtggcggtgtgaacggtttcactttttgccgacgccgtacaaaaagaaaaaggcccggagccgtggttcagctccgggccttttttatttggcgaatgccggctttttataaaaatcagtttttattcccattggcaagcggtaccggctttttcatgtcttcgccaaattcttgcgcagcaataaaagaggaagtcatggtagtgagcatgtctgcagccgagcttggcgagttgggcagcagtatcaaggtactccttgtctgttcgccgatggcctgcagggtatcgtaatgctgggtgaccacaatgagggcagaagcctcttgcgaaccgatgcccaccttgttcagtgattccacgctgtcctcgatgcctttggcaatctccctgcgctgatcggcaatgccctgcccttgcaggcgcttgctctctgcttcggcctttgcctttgccacgatgcggatgcgctcggcatccccttcaaactgggcggctgcttttttcctttcggcggcgttgatgtggttcatcgcgattttcacctcgtgtgcggggtcaatgtccgtaacgagcgcctttacgatgctgtaaccatagtcgttcatggcctcgtcgagttcacggaggatggcatgtgcaatgtcgtctttcctgatgaacacgtcgtcgagggtcattttaggcacttcggcgcgcaccacgtcgaagacataggaggtgatctgctcggtcgggttttgcagttcataaaaggcttcgtagatcgaatctttgttgatgcggtactgcaccgaaacctgtatgcggacaaaaacgtcgtcctttgttttggtttctaccggcacgtcgagttgctggattttcaagctgatgcggcctgccacttggtcaatgaccggtattttgaaatgcaggcccgctttgcggatactgtggaatttgccgagcctttgcaagatcactgccgtctgttgttttacggtaaacagggcagtggtcaggatgaaaaacccgagtacgaggaacactatcaattgaatttccatggtgaagtttttagtgaattgatacgggcctttaggtttttagacaatagataatagactgtccaactcgtaaatatttctgtccacaggactcctttggcgaaaaccaggctttagttgcgactgtcttttttctatttcctaaaaggctaaggcccaatgaagtaggaaagaattacagtctgaaagataggctaattccctgaattttgttgttattatccacaaattttaggaaaaagacgataagcgggggtcaagggggcgggaaacaaataagctgccggtcatggcaaggctgatttttgggttttccgacaaaggtcagccgcccaaaacccactccaccgttgccctcaggccctcctccaaagcagtcggttcaaagcccagttccctttccgccttccccgtcgaatgctcccaatcgaacaagtatttttttacccacggaggggtcaacaagggttctgtgccagtgagcttggccattgtttccattgctgcggcgccgatctgcatgagcgggagcggcattttgaacatcctgaaatctttgccgctgaccttggccagcatttcaaagaattcaataaaactggcattttgcccgcccaaaatatagcgctcccctccccttcctttttccattgcttggatatgcccctccaccacgtcgttgataaaaacataattgccgatgcttttcccattgcccggcagcaggcggaatttgccctgcaggtagaggcggaccattttgttggcggggttgccggcccccatccggccagggccatagaccctgctcggatttacggtgatggtttcaaaacccccggctgacatttgttttgcaactgcttctgcctgcgcttttgagcgttcgtaatgggtgaaaaaaccttgcctgcggggagaactttcagaggtcgggctgccctccgatgggctgatgacacctgcggtagaggtaaaaaccactctccttgcgcccatttttttagctgcgcaaaatacgttttccgcgccttttacatttatccgaaaaaaggtttgcgggtctttgtgccagggttttgcgaaagcggcgacatggaaaacggcatcgcagccctcggctgccctttgcaggctgcccggatccagcaggtcgcctttgtggaggcaaacgcccggcaggttttccaattctttggcctttgttccgcttcggtaaagggcattcacggagtggccgagggaggcgaggcgcctggtgagctgatggccgatgtagcctgttgcgccggtgacaaggtatttcattttgaataaatgaaatttggtattaaagaacgtatgtgttagcccttctccatgcccttccaaaagagggggaattgattccccctcttttggaagggcatggagaagagcgcatacttttgcgcgtttctcttgaaagaataaaaaggtgcgcattaaaaaaggtaccgggcttccactgaattaatgcccaataccttttcaatacctttcaaactattcaatcaccactttcttcgcaaacaccccttccgggctagtcaactggaggaggtacattccggcaggcaggccgcccacctctatttgtattttaccgaaaataaaaccgggctggcgggaaagcaccaattggccttgtgcattgaaaaggcttgcctttgaaatgcccctgttgccgtctttcaactggatggtcaaacggtcgcttgcagggttcggatagaccaaaatgccctgctcttctacctgtccttccacagcggaaggctcggcatcttcgtcaatgacaatgttaaaagaaggtgtcccaaaaaagccgctgttgccatcctctacatagaaagtaaagtggtcggcaatggccgtaggctcggtattggtgtattccatctggctggaatagacatcctgcatggtgaacgagtcgcctgcccccaactggacgccgttcttggaaacaaacccaaaatcggtatttttcaaaatggtgaatttcaattgatccggggcgttgtcgtcatcactgaccacaagtttgtttgaatagatcaagcgcgaatcgttcggagggacggccaaggtgtcattggtcaccaaaaaaggatcgagcgctgaagagccgccgcacacctctattgtccagccatcaaaagagccgccggcaccgatggtgttcacgatgttgagttgcagcgtccaatccccggctgcgtcttttccattgaacgcaccaagtgcttcctgtggccggtaggaagtcccatcggtaggggggcaaggaatatccgtaaatggggactcgtcatcaaaaccgacgttgaaagggttggtactgccacaaggctgctcctgcatcaacaaaacagaagtcgcatcagggccgaccaagtggaactccacgtcgccaaaggcatcgtggtctcctttgatgtttttcacgttcacatcgctgatttccccgcctgtcggcaaattgatgaccgaaagtatttctggcaagcccgaaccagaaatgggttgggtggtattgttggtaaagctgttgcaactttgggaaacggttttgaaagccgccgcatccgagaagctgcccgttccgcattcattgctcacgctgacatgccaataataaatggtgttttcgtccaaagtcactcctgccggataatttggcgaagccaggccacttgctgcatcaatgacgttggcaaagtctgggtcgcttgctatttcgatgttgtagctcaggccattaggcaggcctgtccatccataatcgggcaaagtgctggtgcccgaagcccccgccggggcagtcaattgcaaagccgaaaaatcactgttgacaatgttcagttccacgcttcgctcagaattggcagcaccgtttgcttctgcaagaatggcaatgcttgcccccccgtcttccactgcacctgaaaaatcaatgctcagggtactcgttccgcccggcgcaacctgtgcggggtcgaaggtggccacggctccatcggggaggttgcccaccgaaaaagagatcatatcggtaaaccctagcagggaagaagtttgcagttgcacctcgaacacatcgggaacacagacagtgcccagttcaggggaagaaaccaatgtgaaaccgggcgctgtgggcggcacgatggagaagttgttgttcgagatatcgaagaaaatgttgtcggcagcttctacccgtacccgtgcttggtcgctgaccgcgtcaggcactaccacgaaggcgctgccgtcgttgggcgtgttttccaaaagcatgaccgggtaattaaagccgccatcggttgacaggcggatgttgaccatttggcaattcacttggctgccatctgtattggccacgtcccaggccacttccatgtacttgcccacttcccaagattcagaccccgtgttgggcaaggaaaccaaaaacgggccggcggcctctgttgattcgaaagctatttcggaataggaatagcccccggcctcggcattgttgtcgcgggcggtaaaacggaaggtaagggggcgcgaaatggtaggcaacacctcgttgacatgagaaacgttggccaccaggttgttgatgttcgggaacaccctcgtcaatgattcagttggtggataagagcggaacaagggcgccgtgccgataggggagccgagcgggctcattgggcccaggtcatattcttcccaagtataggtcatgttgtcgccttctgcgtcagttgcctcgccggtcagttcaaaaggcgtggagataggtattttgaaacccccggctatcgggatactggtttcaggggtcgtattggaggtagcgatgacctcggcacaggagcctcccgaaaggctgttgttcgagaagtccttgatgcgctccatcgcgtttatgtggaaataactgtcgttataatcctgcacgttgtttgagccacaactggtgtagcacatgatggtactccccccaccgggctgataggctgtcggcgggttttcgttttcgttgtcacaaaaattgaaaccatgctgggcactgaactggtggcccagttcgtgggtcacggtaatataaaaatcttcggggacaaaggtttgcagattgcttgcgcccgatgccttgttggtgccacaaaccgaagccaagcgtgctatcccgatagtcccaccgccattcgtactcccgaacacatgcccgacatcgaagccatcgttgccataggcaccgaacaggatagcggggttttctcccagcatcactccagcattgccattggtatagccgtcgtcgccgtcggcagcgaagaaaaaagtttcggtcgtatttgcaatgagtaccagccggatggcatggtctatttcataaatggcgttggtctggttcagcaccgaggtaacggcactcagcaccgaagcgggcgtgttgccataaaggttagaatactcgctggtagtggcaacggcaagccggtaggtgcgcaggtcaacaggcgcttgcaaagatttattggtaaaaaggaactctttgtcttcggccgttccatcgagggcttcttcattttcgatttccgtggtgccgcaggatttgcccacatcgtttggcgtacttttgataaaataactggcgtacaattcgcccggaagggtcgtcatagggccgaccacggctactttttcaccaaaaaccgttgcatgaaaacccagcgcgcccgtttccaaacggatcctttccgaggggtcgttcaagctggcaccggcataggtctttatcatcgggaaagcagcggcaaggcccggctccatgatggatatttcataaataccaaaaacctcgttgctgccgtcggggagggggatgctcaattgaaggggcgccgattttgcctccgccgtaaattcaaaaggcgctttctgcaaatgctttttcatggccgtatagtccaacgaaagtgcccggtgggcagtggccgtcaaataggctttcttttcgacagtagttgaaatggagcccggatcaaggtcttcccaaaaggactgggcagatgtccataagccaaaaagcaggagagtgcaaacggtaattattttcttcatattaaattttattaaaaaaaagatgggtgaacgggatgcttatcccttttttcctgtcccggcaaaactaagcaacggcggcaattttataaaatacttttggttggttgcgagacaaaaagcggctggcaccattcgcgttcagcgccaaatgtcctccacctcctgttttataaatacaatgtaaatttgcagcgaaccatttttcatcccgcatgtaagtaacacgtgctaattatttcggtaatttttaaacatctttttccgctatttttccttaaaaaattctcacgtagcccccactatgtttggattttttaagaaaaactatcgaaaaaatcttgtctaaaaattttaccgaaataatcaccacgtgttacttaatcctttctgtcaaataaacaacatggaataccaagaagcaaaagaaaaattcctgcaagcatggggcaccctcggcggccaatggggcatcaaccgcaccatggcccagatacacgccctgctgctgatcgcccccgaggccatgaccgcacaggacatccagaaagaactgcagatctcggtcggcaataccaacatgaacctccgcgccctcattgactggggactggtctttaaaaaattgaaaaccggccaccgcaaagaattttttgtggccgaaaaagatatgtgggaggtggtgcgcaaaatcatcgcccagcgcaaacgcaaagaactcgaacccgtggtaaagattttggacgaagtatcggccctggaaggcagctcgcccgaagtattggaatttaaaaaaacagtgcaggatatccacctctttaccaacaaggccaacaccatcctccaaaccctgctcaaagaagacgccgattggttcatcaaaacttttttgaaaatggtttgaatggttaaatggttaaatggttaaatggctgaatggttaacaaaagacccgatggagtgagtaccatcgggtcttttgcttaaccattcagccatttaaccattcaaccattcaaccattcaaccattcaaaccattttgaaaaaagaaggagtggtggatttggatattgttttcaagccctccgccatcatgtagtagaggaagccctcgtttttgttgaagatgccgaggcggttgttggagcgcttgaccaattctttgaaaaaataccattttggggggaggtcgaaattgtcccttgcccattgtgctgccggtttgatgcggccgtattcgagggcgaggtcgagttccatgcccgtgctggcgtttgtttttatccagttgacaaaggccggttcgtcaatgtcctcaaattttttgaacagttcccagagggccgcgtggtaggggacggaatctttgcgctgcaattcaaatagttttttgaacgaaagcccggcgccgggtcgctcggtattttcgctgtgcgacatccagtggtctgacaaataagtgaaaaaacggcaggcctccggcaaatccattcccattgcgtaagcaaaacccaaatgaagtttgatggccgaactgagcatttcgttgtaggtccactttgtgtatttttctttcaggctgcacagcacgagagcagaggaggcctggtactgcttttcaaaaataacgtgttccagttcgccgccgaagcggtgggtttcgggacggtagctaaaatactggaccgagttgttgggcagccatttgtattcttctgggtagctggaaggataggccggttccctaacaaaggatggacgtgaatcgaaatattggttgaaatgctcttcgagattggggcgcagcatcttggcgatgatgaaggtgctgcccttgaaccagagtcggatattggggccgcgctgccaactgcgctggaagtagaaccgctcggccacgcctgtctgcaataccacgtcggtataaggcttgaccgcttttgtcaaaaattcttcccaaggttcgccgtagtgcaaactgaccgctaaccatttagtggttgttttttttgccataggaatgctttcttgtttgagaccattttcccaaaaacaaatacttagccaaaggggctttgtattataaatatttttaatactaatttgaggggcaatcttgattggatagcgtttcaaggagttctacggagaaaaaaggaatttggttcggggctgtttgggcaaaaaaatagcgccacggagtacgcagcgctaaaggatttgactcctacggcatatagccttattgtgataagattaaaaaaaggttcattttagcaggcggtcgaggtcgtagccgatcacgtcgctgaaagatgggttatcggtgtcctccccttcctccaacctgtacttccgccattgtttcaagtcgtaattatacacaaaaccttcgggaacgccatattcttccaccagattttttactttttcaaaatcccgctttgcgcccgtattgcccgatatctcgatgatgactttgttctgcttctgtttgttgtcgaacaataaaatgtcgggcgtagggctggtcttgctttcatcaatcatggtctcagggaacggctcgaagggtatttttttgaggttgtagaacaggatgccgaactgcatcatcaacttgccgatgatgcgctggtggggttttggtgcgttggccctgacgtatattgtgttgtccaacattggttaaaatttttacgaagatagagggtttgagatatttttggaaatgtggattgaaaaaatcgcaacctctaccctcttttggaggaggtgaccgtaggccattttcgaggatgcgatttggatgaaggttttaggcttcatcgtaaatcctttttttaaatcaaaccacaacaccaaacttcgaaatttgggtagaatgtctaccgctaaggttgatgattggtgacaaattacttattgcaagtaatttattttttaaaatattttgaatttaccaaactacgttataagtttgtgctgtcaaatcaggcaagctgtttaaatttctgtaaagaaacgaaatacacttgaatccaccaagcttcgcaaagaaaattattgattatggaatacaaaaaatttgcagcccaaatgtcacttcttttagaggagcgggaatttgaagcaattctcaatcaactaaagaacaaagtccctgctttagcaggggattgcgtgctaattttaagtcgctgccaagaactcaaaaaggccaagttgagagggctactttcctgggacgtacattataggcatggaaatcaaattgcagatgatatatctgacctgattaaagaagcagccacaatagagtagccgctcaataaataggcctgttccactaagataagagaataaccacacaaacctttctttatgcttttagcgaaacatgacggcctcatttacactgttgaaggactatttgagaatatggcttccaattattttcctttatgtattctaataaaagacccatagtttgattaaaaaaaggatttacgatttcaataatataactttggcccaagaaggcaatccaccactccatactatgcgttaactgcaaatatttttcaattctaacaaacccttttatccatgaaaaaaatactcggccttgacctcggcaccaactctatcggttgggcagttatcgaacacgaacgcaaattttcactcgaaagcgaacccactgaaattttcaagctttcaaaagacagcaataataaaccgcattgtggagtaacaattttcacggaaggcgtgaaaatcgaaaagaacaacgaaagctccaaagcagccgaacggacagcttaccgcagcgcccgacgcctgaagttccggcgcaagttgaggaaatacgaaacgctcaaagttttagaagaatacggctattgcccgatcggcaaagatgaactggaaaaatggagaagttataaaaacccattgacccgcaaagcagaaaatttcaaacattacccaaaaagcgatgcctttttatattggctgaacactgacaaccaagcaaccaaagacatgcgcaagaagcaagaaaaaaatccttatttcttgcgagaccaagtttcgagagaaaaaatagaccactcaaaaaaggaagaaaaatacaaattggggagagcgctttatcatatggcgcagcgccgtggatttctcagcaaccgattggacgtagaagacaaaagtattattgaagaacacttgccatcactgaacgcactaattgaagaagctgataatagtgcagaattaatgagattattcaaagattattttaaagactttgacaaaaaggatgaacgtgaaaaacaaatggttactttaaaaagagcttttgattttattatcaaaaaaaataaaggtgtcagttttgaagaattaaaaacgcttattttaaaacgcctgaacaggaaggaagaccttggcaaagtaaaacaagggatattggatttgaccactaaaatagaagaagagggctgtgaaaccctcggccaatatttttacaaatcatatcaaaagaaagaaaaaataagagggcaatatacggcaagggaagaccactatctttttgaatttaaacatatatgcagagtacaggaattgccggaagaaataataaaaaaattaaaaagggcaattttttaccagcggccattgcgctcacaaaaaggactggtcggtaaatgttcttttgagcctaccaagcctcgttgccccgcctcccatccgctttttgaggaattcaggatgtggtcttttatcaataatataaaattcaaaacggaggacggaaaatggaaatccatttcaaaagaagaaaaagaaaaagcaatcccaaagttttttaggaaaagtaaaccatcttttgattttgaagatttagcatcggtaattggcaaagacaaacattataactataagttgaaaagaacggtcatcggctctccgacaacggcagctttggtcaacctgttcggggcagactggaaagaaaacatttatgaacgatatactttaaaaataaataaaaacggaaaaaagaaatctttagaaaccgtaatcaacgacatatggcatgtattgttcacttttgacaaaaatgaaaaacttgtcgaatttgccaaaaacaaactaaagctatcgcccaaagatgctatcaaattcagcaacatccgattaaagaccgattatgccagactgagcataagtgcgattaaaaagatattgccttatttgagagccggacacatatattcatatgctgtctttttggcaaatatggaaaaagtaattgatgacgatatatggaaggttgatgataacaaggattttattaaagaagaattggataaactgatcgaaaacaatagggaggagaaccgattgctttttattgtcaatgaattattaaaaggctgcaaagaccaaaactcagtttattcagaagaagcaaaaccatattatgacaaaaggataatagaaaaactgaaaaatagttttggagaaaaaacttgggagaaaagaaatgacaaaaaagaaacaattgattttgtttcccatgaattttacacccaattcaaaaagaagggcggcaaaggtgaatttaaaaaaataaaacgccttgacgaaaaagtgaaacaatttattaaaaacaacggtttttgttccgacgaacggaaattggacgaactgtaccccccctccgccatggaggtttaccaaaaacccgacaggaatgacgacggtttattactgctcggcagtcccatgatttctgccatcaagaacccaatggccatgcgctcgctgcaccaattgcggaagctggtaaatacgcttttaaaagaagaaataatagacgagcatacacatatccatatcgaactcagccggcaattgaacgacgccaacaagcgcaaagcaatacagcggtggcaaaaagaacgggaggaccagaacaaaaaatacaaaaaagaaatagaagatttatacaaagcggagtctggcaataaagcaccactcgtgacaagcaatgacatattaaaatataggctttggaaagaacaaaacgaaaaatgtgtttacacaagcaaacaaatatgcatttgtgattttatcggcgacaaaataaaattcgatattgaacataccatcccccgaagcagatgcaacgataattcattgatgaacaaaaccctttgcgaaatagaatttaacagaaatataaaaaagaataaaatgccgtcggaactttctatccacgatgaattaatcagaaatatagaacatttagggtggaagaaaaattacgaaaatctggaaccccgcattaaaagattaaggtcgtccgcccgcaaagcggtaataaaagaaaacaaggataaaataatacaagagtaccaatatctcacaatggagcgggattattggaaaggcaaatacgaccgcttcattatgacggaagtttcggacggatttaaaaacagtcaattggtggacacgggcattatcaccaaatatgcgagaagttatatgaagactgtttttaaaagagtagaatccgtaaaaggcgatatggtagcagaattccgcaaggcatgggggctgcaggattattatgaaaagaaagaccgctccaaccatatccaccattgcgtggatgccattacaatcgcttgcatgaccaaagataaatataatataatggcaaaagcatggggcaaagaagaaatggaattgagatatgaggcaaggaatattatgacagcgagcaaaccctggcccaccttttcagaagatgtgcagaccatcgaaaaggaggtacttatataccaccatacacccgatcaggtacggaagcaggtgaaaaagaaatggagaaaaaggaataaaatcgtaaaaaatataaaaacaggaaaaccgatttatttgcaaggcgacactgtccgcggctcacttcaccttgatactgtttttggggcaatcaaacgagcggtcagggatgaaaacgggaaagtacaatttgacgaaaacaataacatggttttacaaaaagacgataaaggaaatgaacaggttttttacgtcatccgccgccaattgataaaccttaaaaaatcggaagttgacaatatcgttgacgaaaaggtaaaagcaaaaataaaagcggccattgaagacggaagtcttgccattaccccaaatgacaatgccgataataaattcaagaaagtatggatgaacaaggaaaaaggtattgaaataaaaaaagtgcgggtatatgcaaaagcaggccgtggctacctttccaaccccatccatctccggttacaacgtgatttgtcaaagcatgagcataaacaaaatgtttatgtgcagaacgacgaaaactacgttctcgccatctatgaacaaatcaacaaaaaaggcaaacgccagcggaaatatgaattggtaaatatgatggacgcaggttggtattttaaggaaagcaataaaggccaccggaaaaaatacggattagtgcccgaatcaatgaaagggatgccgctcaaagctgaattaaaaaaagggacaatggttttgctttataaaaaccggcccaaagaagtccatcaattgagccaaaaagaacttgtaaaaaggctctataaaattgtgggtttcgatggccgccccagggtcatgctgcgccaccaccaagttgccaaagcagcaaaagaaataacccaaagcagcaaaatggatttcggcaaccctgccgaacaattgagcctcggtgtgggaaatttaaatattttggttcaaggaatagatttccgaatgacaaattcgggcaatattattttcattgaaaaataatcatcggcaataaataaagggggcattttaaaaatgccccctttctaaacccatccccctcggaacgatttttgatatttcatcttcataaaatcctcaaaaccagtatttaaccacttaaaaaatcgttcccccagatgattaaaagaaccctccttttttccaacccgtactatctcagtacccgcaacgagcagttggtcatctccaatagagataaaaaatcggagaccagccagcccatcgaagacctcggctacctcgtgctcgaccatccacaaattaccgtcagctatacggccatgcaaaaattggcggccaataatgtcgccgtcatatattgcaacgaaaagcacctgcccgcttccatgctcctgtcgctcgacgcccattacacgcagaacgagcgtttccgcatccagttggaagcgagcgagccgctcaaaaagcagctttggaaacagaccgtcgaagccaagatcggcaaccaggccaaggtcttgcagaaatttggcgggggcgaacaaccgctgctccgctttgcccgggaagtaaaaagcggtgaccccaccaaccgggaagggcaggctgcccggcattattggaaaaaggtctttgccccattaatcggcccatttaaaagggagcgcttcgggccaccgcccaacaacctgctcaattatggctatgccctgctccgtgccgcaacggcaagggcgctcgccggcaccgggctgctctgcaccctcggcatccaccaccacaaccgttacaacgcctttgccctcgccgacgacatcatggagccttaccgcccgtttgttgatgaactcgtcatgcgcatgctcaccaacggcctgcccaacgaagacctgagcaccgaggacaaggcttcgctgttgcgcatctttgccattgatacgaagatgcccggacagttcagcccactgatgatcgcactcaacaagacagcgagcagcctcgtgcaatgcttcgaaggcaccaaacgcaaaatcatttatccagaaatattggcacattgatccgtcaactcccgaaatttcgggacaggctgtcaaccgttcaccgtcaaccgtcaaccgtcaaccgtataacatcatgcaaacccgtttaaacgcttatcacattatgtggctatttgtacttttcgaccttccgaccaataccaaaaaagaaagaaaagctgcctcctccttccgcaagaaactgctgaaagacggcttttcgatgatgcagtactccatttacatccgccactgcccgagcagggaaaatgcggccgtacacctgaggcgcatcaggacattcctgcccgaccggggctttgtcagcgtcctgaaagtgaccgacaaacagtttggcgacatcgaaaatttttggggcaagtcaagcacaaagcccaaacaagacccgccgccccaattggaactgttttaaaatgaatggtcttgcaaggcagggctgctttaggctttcctcccgatatttatcggaatgaaaacttgaaaagtctttgcgcaaatccttggaatttaggaatatgtttcatgcccagagtccggattagaaataaaaaaacagtccttgcacggcgcaaggactgttttgaagtccatttttcctatcgtaatattgaagtaaacccttgtctttcaaggagttccaacaacatacaatatcgtaaatcctttttttaaatcaaaccacaactaccctctccgtgtttacgtttgttgtcttaatatcgtaaatcctttttttaaatcaaaccacaactatgatcgcttccctatgcgtaagctgccaaatatcgtaaatcctttttttaaatcaaaccacaactccacggccagtgcaaaaccataccacgcaaatatcgtaaatcctttttttaaatcaaaccacaacccgtatcgggggtctatactttcttctcgaaatatcgtaaatcctttttttaaatcaaaccacaactaattgttatgagggaattagtacaggcataatatcgtaaatcctttttttaaatcaaaccacaaccggggggtgcaatgccccccgtgccgattcaatatcgtaaatcctttttttaaatcaaaccacaacatcgttacgatcacgcccagcgattcaagaatatcgtaaatcctttttttaaatcaaaccacaacccttttttgcttgcgctgctcttataggagaatatcgtaaatcctttttttaaatcaaaccacaacagtaacatcagtagtagtaacgttagtattaatatcgtaaatcctttttttaaatcaaaccacaacatcaagcaagatgtgtgtccatcatatcccaatatcgtaaatcctttttttaaatcaaaccacaacgacttatctacgattagtagtaatagtatgaatatcgtaaatcctttttttaaatcaaaccacaacttacaatgaactgattgaaagcgatagcggaatatcgtaaatcctttttttaaatcaaaccacaaccatcatcatgaaatcaaaaatcttagtataatatcgtaaatcctttttttaaatcaaaccacaactacttaatctctttgtgaccgtgctttcttaatatcgtaaatcctttttttaaatcaaaccacaacctggagctgctacatataattcaagtatataatatcgtaaatcctttttttaaatcaaaccacaacaattttgcggttgcgttctggaaatcgaaaaatatcgtaaatcctttttttaaatcaaaccacaacaatcacaccgttgtacagcgttttcaagtcaatatcgtaaatcctttttttaaatcaaaccacaacgatcccaactttgaacgccgacaaaagccgaatatcgtaaatcctttttttaaatcaaaccacaactattaccacgagattaatgaaccttggcaaatatcgtaaatcctttttttaaatcaaaccacaaccatggctatactttataatgtcgcaccaataatatcgtaaatcctttttttaaatcaaaccacaacttagcagccctcgaatttgtcaagtcagggaatatcgtaaatcctttttttaaatcaaaccacaactgataatcagcgaattaaggccaccaaaagaatatcgtaaatcctttttttaaatcaaaccacaacaccaatgaggcgcctactatcactaataaaatatcgtaaatcctttttttaaatcaaaccacaacaccgaacgcttctttgacaccagtcccgacaatatcgtaaatcctttttttaaatcaaaccacaacgaagagccgttc

SEQ ID NO: 2850 - DNA, 23609 bp, synthetic construct
  misc_feature 1..23609: note = Synthetic
  source 1..23609: mol_type = other DNA
taatggcttcgtagtctactgggcataaccagcaacgtattgcattgaaatttatttcacctataatgctcatgtgcagcacaggcacatccaaggaggaggctatggcaacagcgacacaacgtatcccggtattggtgacgacggcagagaaatcgcgaattgcgaaaatggcaaaggacaccggtttatcgatgggcgaatttttgaggcgtgccgcagcatcgttcagcccgtcacaggacgatgctgcgattgaaggcatgatcggccagatgcttaagacgacgaaagcggctaatcaagcgctcgatgacgccttggcttatgtggaccaatcgaacaagcgtattgcggcgatggaagcgaaacactacactaaggctgcttgatatgggcatcacagacaagatgtgggatgccatcaccaccgtcattaaaatgaacgataaggtggaacgtttggccggtacggttaaggctcaacaggataagatcgagaacctgaccgagcggattatccggttggaaatggcgctcgaaattgcgctggccggcaagccttcatcggcacgtcgaattgaacacaggaaataggtattgattacacaaggctggattagcgttttttcccgcaagagggatgaagccgccaatcctaaacccgacgagccggagccaataatgggaagctgtcttctcgtttggttgaacgcagttttgtaggagcgcaatttattgcgcgattggatgatgcgaaacctcatcgcgcaataaattgcgctcctacagctacgctttgctcaatctggcacccctagcagaattaccattgagcacagcaggacgatgccgctataatgccgcattcgaaaatccaggcagcgactcgcagaaacatgcaacccaactatcatccagccggatttaacgtgaaactcgcgcagcgagtctttgtccccctcgcccgcttgcgggagagggccggggagagggaaacgggcaaggcggatttcatcatcaggggcggcatatttgccatgcccgttaggacaatttgtgattaaaaaaatactcgtcgccaaccgcggtgaaattgccgtccgcattgtgcgcgcctgctcggaaatgggcatcaagtcggtcgccatctacaccgatgccgaccgccatgcgctgcacgtaaaaaaagcggacgaggcctaccacatcggctccgagccggtcaccggttatcttaacgcccataacatcgtcaacatagccgttacctcggggtgcgatgcgctgcatccgggctatggcttccttgctgaaaaccctgaactggcggaaatttgcgcgcgccgcgatatcaaattcatcggcccgaacgcggatgtcatccaccagatgggcgacaaagtccaggcgcgcaacgcgatgatagccgccggcattccatgcgtgccgggcagcgacggcaacctcgccgatgttgaagaggcgcgcgtgctggcaaacaaaatcggctaccccgtgatgctcaaggccaccaatggcggcggcgggcgcggcattcgccgttgcgacagcgataaagacctcttcagcaactacgagcgcgtaatatcggaagcccacaaggcttttggccagccggaagtcttcctggaaaaatgcgtggtcaatccgcggcatatcgaagtgcaggtgctgggagacagccatggcaatgtgatccacctgttcgagcgcgactgctccatccagcgccgcaaccagaaactgatcgagattgccccctcgccgcagatcacccaggcgcaacgcgaatacatcggcaatctgggcgtcaaggccgcacgggccgtgggctatgaaaacgcgggtaccgtcgaattcctgctcgaccaggacaatcatttctatttcatggaaatgaatacccgcatacaggtcgaacacaccgtaacggaaaccattaccggcatcgacatcgtgcaggaacagattcgcatcgccgatggcctcgagctgcaatacaggcaggaagacgtcagatttcgcggttacgccatggagtttcgcatcaatgcggaagaccccaagaatggcttcttgccaagcttcggcaagatcacccgttactatgcaccgggcggccccggtgtgcgcattgatgccgccatgtatagcggctatgagataccgccctatttcgactccatgtgcgccaagcttaccgtttgggcactcacatgggagggggtaatcgagcgcggtcgccgggcgcttgacgacatggtgatctatggcgtcaagacgaccatgccgtattatcaagagatattgaaacaccacgatttcaggaatgcggacttcaacaccgggtttgtggagtcacatccggagttgatcaattacaccacaaaaattccgccggagctgagggccgcagttatttctgccgtcatagcggcgcacgaaggcatataacatgaagctcgcgaagcgaaaccctgtccccctcgcccactgggagataaccagcgacttggctgctgtcttttggcagcctagtcgagtggctagtagttccatcagggatggggagagggaaacgggcatagtaagttcattatcatgggcggcacatttgccaagcccgttaatttcaacccaaatataaccaagctaacaacatggcaaaaactcttatttccgaactggttctgcgtgacgggcatcaatccgtgatcgcgacgcgcatgcgcaccgaagacatgttgcctatctgccacaagctggatagcatcggcttctggtcggtggaagcctggggaggcgcaaccttcgacgcctgcgtgcgtttcctgaaagaagacccgtgggagcgcctcaaaaaattgcgcaaggcattgccgaacagccgcatccagatgctgctgcgcggccagaacctgctcggctaccgccactattccgatgacgtggtgcgcgcatttgtcagcaaatccgcagacaacggcatagacgtgttccgcattttcgatgcgatgaacgacctgcgcaatttgcgcgtctccgtcgaagcggtaaaaaaatccggcaaacatgccgaaggctgcatcagctataccaccagcccggtgcacggcattccgcagttcgtcgaactggcccgcgaactggaagccatgggctgcgataccatctgcatcaaggacatggccggtttgctcacgccttacgcgaccaccgagctggtaaaagcgatgcgcgcggccgtcagcttgccgattcatttgcacagccattccacctcgggcttgtcttccatgtgcttcctcaaagccgtggaagcgggcgccacgatgctggatacctgcaactcttccttcggcgaaggcgccagccattcctcgaccgagagcatcgttgccgcactgcaaggcacggaatacgataccggtctcgacctggccgcaatgcaggaaattgccgcctatttctacgaagtacgccagaagtactggcatttcgagagcgctttcaccggcgtggacacgcgcgtgctggtaaaccatgtgccgggcggcatgatttccaacctgtccaaccagctcaaggaatcgggcgcgctcaaccgcatgaacgaagtgctcgccgaaatcccgcgtgtgcgcgaagacctgggctacccgccactggtcacgccaacctcgcaaatcgtcggcacgcaggctgtcctgaacgtactgaccggcgcacgttacaaatcggtcaccaatgaagtcaagaactacctgctcggtcactacggcaaggcgccgggcaagatcaatgaagaagttaaaaaacttgcggttggcaatgcggaagtcgtgacctgccgcccggcggatttgctggaagatgagatgcgcaaactcaagatcgagtgcgaaaacctggccaagagcgaggaagatgtcctcacctatgccatgtttccggatatggcaaaaacctttttgcaggagcgcaatgccaacacgctcaagcctgaaccattgttgcccaaagaagctgctacagtttcatccgaacgttacgcgcccaacgagttcaaggtaacgctgcacggcgaaaccttccatatcaaactcactggcagcggacaccgcggagaagcccagcgtccgttctatgtttccgtggatggcatttcggaagaagtcgtagtcgagatactgaatgaaatcgaggtttcagatggaaagagcaacggcaagaaaaaaaccgccgccgcagcttcaggctccagccgcccgcgcccgtcccatcagggatgcattgcaaccgccatgcccggcaccattgtcgccgtcaaggtcaaggtcggagataaagtcgaagccggggatggcgtactggtcatcgaagccatgaagatggaaaacgaaatccaggcgcctcaaagcggcgttgtaatcagcgtccatgtcaagaaaggcgacagcgtggcgccggacgaaaccctggtcgagatccagtaaatccggaacggccagaggcgcgggatggtagtgctgttttatgaccattcttgttaagtacgccgaataacacaggaacatgtagattatgtccgccccgcaaaccgtcctgatcctggtcgaaaacttcgagcgcaatctggacgcttaccgcaacgggcagtacaacgaaacacaggtgcggcgcgacttcatcgatccgctgttcaaggcgctcggctgggacatggacaacagcgcgggctacgcggaagcctaccgcgacgtgatccacgaagatgcgatcaagattggcctctccacgcgtgcgccggattacagctttcgcatcggtggccagcgcaaattttttctcgaagcaaagaagccctcggtcaacctcaaagacgacatcgaacctgcctttcaattacgccgctacggctggtcggccaaacttccgctctccgtactcaccgattttgaagagttcgccgtttatgattgccgccagaaacccgacaaaaacgacaaggccagcaaggcgcggctgttctactgcaccttccgcgattatgcggaaaaatgggacgagatcgccgcgatattttccaaggatgcggtgctcaagggttcgttcgacaagtacgccatcagcaccaaaggcaagcgcggcaccaccgaagtagacagcgcgttcctggaagaaatcgaaggctggcgcgacctgctggcgcgcaacatcgcgctgcgcaacgccaacttaagccagcgcgaacttaacttcgcggtgcagcaaaccatagaccgcatcatcttcctgcgcatctgcgaggatcgcggcatcgagccttatggccgcctgatggcgctgcaaaacggcgccaacatttatgaccggctgtgcgagcacttccaccaggccgatgaccgctacaactccggcctgttccacttcaagcgcgaaaaaggccgcgaagaagccccggacgaactcacgctgaaccttgagatagacgacaagccgctcaaggagattttcaaaaatctttactacccggattgcccctacgaattttccgtgctcggcgcggacatcctcggcagcgtatacgagcaattcctcggcaaggttatccgcctgacggcaggcaaccgcgccgtagtcgaggataaaccggaagtaaaaaaagctggtggcgtgttctatacccctgcctacatcgtgcaatacatcgtgcagcataccgtcggcaagctgctggaaggcaagagcaccaaacaagcggcaggcatcaccgtcctcgatccggcgtgcggctccggctcgttcctgatcggcgcgtatcaacaccttctcgactggtacctcaaacaatacctcgaagacggcgcggataaacatgccaagggcaaggcagcacggctctaccagggtgctgggggcgtgtggcggctcaccactgccgagcgcaagcgcatcctgctcgaacacatctacggcgtggacattgacgcgcaggcggtggaagtaaccaagctctcgctgttgctcaaagtgctggaaggcgaatccgaccagacgctcaccagccagatgaagctgttccatgagcgcgtgctgcccgatctcgaccacaacatccagtgcggtaactcgctcatcgggccggatttctatgacggccaactcgatctcgacgacgaagccgcgcagcgcatcaacgtgtttgactggcaggccgcgttcccgcaggtgttcaaaatcccccccagcccccctttgccaaagggggggaaaccacaaccccctttgcaaaagggggtggagcgtagcggagggggatttgatgcggtaattggaaatccgccgtatggcgcagcattttcagttgttgaaacgtcatacttatcgtccagatttcctttgcaaaattaccagcttgattcgtatctgcttttcttagagaaaggattgtcactatcaaataagcaagcaaccctaggtttcatcattcccaatacttggcttgttaacctgacatcgaagaaaattcgctcgtatattttcagtagcacccaaatcgaacacgtcgtgcattatggtaggtatgtttttccaaaagtaacggttgatacagaagtagtaattctccgaaatcaaataccaagtagtaaacatgagatcaatattgagttgatcagcaaagatcaattttctgacagctatacaattcagcaaagtttatggaaagaaaaggatggtgcccctgtaaacattctggagcgcccagagtatttttcgcttgcggaaaaacttaaaggccatccggtttttgatgaattcttcaaaattacccaaggtacaaaacctttccaagtagggaagggaaatcctccacaaacccaagaggtcgtagattcaaaacccttcgttgccaattcaaagattaacgcttcattccggcctttgctgcgaggtagccttattcataaataccaaatttactggaataacgactactacatcagctttggaggttggctggctgaacctcgctattcagcgaattttgatgctccggttaaactggtcatcagacaaacaggtgattcactcgtggcaaccatagatacacagcagtttatagttcgcgataacctttatgcgataacctcaaagtctggtgatttcgacttgatgtatgctcttggaattctgaattcaaagttactgaattggttttatcaaaagattgttaacccagaagcgggtgaagcacttgcccaggttaagcgtggtcacattgcacaattaccattcgcacagccttctaactcagataaaaattatggcaagttaatctcgttcgtcgaaaaaatgctcgcgctgcaccagcagatcgcagccacgaaaaccccgcaggacaccaccctgctgcaacgccagatcgacgcgaccgaccggcagatcgaccagttggtgtatgcgctgtacagcctgaccgatgaagaaatcgctctggtggaagaaagtgcgtgatgcataaactttacgagtattttggcctgattattttgttctatgccaacgagcacgaaccggtgcatgtgcatggcaaatatcaggatcgcgaatcccgcgccgagatcgttgtggttaatggcgagatcacagaaatccgctatgcggatgtcgcggggcgcgctccgctggaaaatcgcgagatgcgccattttgaagaggttgttaccgcccgcgctgctgaaatcgtcagcaaatggatcgatttcttcgtactgcataaacctgtaaaatcggaacgtattacgaggaggttgaaatgacacctgcaacgattaacatcactaccgccgaacaggttggcgattacgcgttgcgtctgtcttttgacgacggcaccatgcagacggtggacttcaagccgtttctgtcgtcttcgcgccaccccgatatccgcacctatctggaaccggcgcgtttcgcgggctatcgcatcgaatatggtgaactggtttggggagattatgacctgtgtttccccatcgcagatttgtaccacaacaggctaatgccggatgctgcgctggaagcggcggcctgataccattaccaaaactcccgtcgcaactgctgccaatccgggttttttgagacacccatgacatgaataacctcctccacccctccgacgtgctctacgcgggcagccgccccttcccccggcttgccgcgtgcgagcattttgccggcagcgaaaagctgttgaagaaggcgctgcagattcaagccgaattagcggtcgacgggcggcctattttcgatatcaccgccgactgcgaagatggcgcgcccgcaggcaaggaacaggaacacgcggccataatcgccgggatgatcctgtccggcgaaaaccgttttggtcgcatcggcgcgcgcatccacgatgtcagccatcctgcctggcgcgatgaactggaaattatcattagcacagccgggcagcgtgtggcttatatcgtgctgcccaagccggaaaaagccgaagacgttgcgacacaaatcaccgcgcttgacgagctgagaaaccgccacggcatcgcccgcgaaattcccgtgcatgtgctgatcgagacacccggcgcgctgcatgaagcgtgggacatcgcccgtctgccccatgtcgaagttctcgatttcggcctgatggattttgtttccgcgcaccacggtgccattcccgccgccgccatgcgctcgcccggccagttcactcatgcgctggtggtgcgcgccaagtgcgcgattgccgcagccgcactgggcaatggcgtggtgccaagccacaacgtaaccaccgaaatacgcgatgccaatgtggtgcgcgaagacgcccgccgcgcccggcaagagctcggcttcctgcgcatgtggagcatccatccgaaccagatactgcccatcgtcgaagcgatgcgcccggattttgccgaggtcaatgaggccgctaccttgctgaccgttgcccagaatgccgcctgggggcctatccagcaggaaggcaaactgcatgaccgcgcctcctaccgctactactgggaactcctgcaacgcgcgcaagcgacgggaatggacatcccgtccgatgctcgccagcgtttcttttcctgagcatggataaaccaagcgaacctgcaagaggtcgagttgggtttcgattcaactatccggaaactccggatagtcgtagggtagatttccgacgtgcttgaaatgatgttgagcgcgataaaagttcagtcgtaaaggattctttagcaaaagccgctctaggctaaggttccggatgacatagacttcgagtatgtcgaagacattcctctacagagggaatgtggttgcggctgcgttttcacaccgccggatggcagctttgtgccaaagctgcacttcgcgtttcccgatagcagtcgttgatctcgatgcggcaatgacgagcagcctcgcgccatgaagcgtccattacccactcgctccattgacaccatctcacccatcccatagagttcacgcctcttgcgcaaccgccgcaacaaaaccgcgccgcaaagtacggcacggacacggcggataatcagcataggaggctggcgcgagttctcttatccagtcccctcgcccgcttgcgggagagggttagggagagggtacttttccgccacagcgggtttgttatttaaggggataacaactgcaagcctccattcttctcattcgtggcgcacgggcgcttgcccgcgattgttcatgcacgatgtttggcttctgtgggttgaatctcgaatgcttttcggaaaaaataaagcccggtgggtttccccaccgggcggatacgttcaggtctttcgaccttcacttattgtagcaacggctctcaccccggatgcgctacaactggttcattatcagggagaacgcgatgacaggcaagcagaaaaatctcggtgcacgcactttcgggctggacatcggaatagcctcggttggctgggcggtgctcggcgagagccgcatcatagacttgggtgtgcgcgccttcgacaaggctgaaaccgccaaggaaggcgactctctcaacttggtacggcgcatggcgcggctcatgcgccgccgactgcatcgccgcgcctggcggctgaccaagttggcaagactactgaaacgcgaagggttgattgcggatgcgcacctgttcaaaagccagcaaccatttccacaatcaccatggcagttgcgcgtggatgctctcgaccgccgactgaacgatgaggaatgggcgcgagtgatctatcacctgtgcaagcatcgcggcttccactgggtcagccgtgcggaagaaaaagcagcggaaggtgacagcaagggcgaaggcggcgcagtcacccaagcattgaagaaaacaaaagagatgaaggaaaaataccgcaccgcagcggagatggtgctggtggaatttgtaacacagcgcacagataaggatgggaatgttgtattgaacaagacaggggaacccattctcgacggggcagctcgcaacaagcagggcgactacagcaaagcactctcacgggtgttgcttggtgacgaattgaaagagttgttcagggaacaaagcaagttgggcaacccccacgcgagcgtggaactcgaagccgagattctcggcaatggcgacaagaaaactggcttgttctgggaacaggagccagctctaactggccccaagcttcttgaaatgctcggtcgctgcaccttcgaaaaatctggcgggcctgatggcaaaggtgaataccgcgctcccaaagccagttttaccgctgaacgccatgtctggctcacccgcctcaacaatctgcgtgtcgtggtggatggcacgactcgcccgctggacgagcaagagcggcgcatcgctttgccgttgccctatttgcccggcgaaaaatttacctacaagaatctgcgcactgctttggttaaggctgggtgcttgccggagtcttttcgtttcgccatgccctatcccagcgaacaacaaaaaatagaaggcaaagccaaagaccccgaagccgatacgttaatcaagctaccagcctggcatgagttgcggctcacacttaagaaggccgaacttgaaactgagtggcaaaacatggcgaatgccgcattgaatgggcaaccggaactgctcgacgaaatcgcaagggtgttgagcgtgtacaaagacgatgcagaggtagaaacagaattgcgcaagctggccttgccgaatttggagaaaatggttaaagccttgctcgacatccgcttcgccaaattccatgcgttgtcgctcaaggcgttgcgcaagatcgtaccgttcatggaaaaaggccagcgttacgatgaggccgttgccaacatcccggaatacggacaccacagccagttgcacaagatcggtgaaggcgaacacaagtacctgccgccgttttactccgggcgggacaaggatggacgcatggtgttcagcgaggacatggacatcccgcgcaacccagtggtgctacgcgcactcaaccaggcacgcaaggtggtgaatgcgttaattcgtgagtacggcgcaccacatgaggtgcatatcgaaatggcgcgggatttatcgaggccactcgatgaacgacggaagattgaagccgaacaaaaagattttcatgacggcaatgaaaaaaataaatctgagttcgccagtcacttcagtatcgttggcacgcccaaaggaaaagacttcgagaagtggcggctgtaccgcgaacagcagggaaaatgcgcttactccatcgagccaatcgacctcaaccgtttgcttgaagcgggctatgtcgagatagaccacgccctgccctactcgcgcagcttcgacgacagcaagaacaacaaggtgctggtactggcacgcgagaaccgcaacaagggcaacaagacaccctacgaatatctggacggcgcagagaatagtgaacgctggcggcaattcgtcgccttcgtcgagtcgaacaaggcataccgccaagccaagcgcagccgcttattgcgcaaggatttcggcgaaaaagaagccaaagaattccgcgaacgaaatctcaacgacacccgctacatctgcaaattcttcaagaactacgtcgagcaatacctgcaactgcatgaagacagcgatgcaaaacgctgcgtggtactcagcggccagcttaccgccttcctgcgcgcgcgttggggcttgataaaagtgcgtggcgacagtgatcgccaccatgcactggatgcagccgtcgtggcagcgtgcagtcacagtatggtcaagcgtttgtccgattactcgcgctgcaaggaactgggtaaggctcacaaagattttgttaatgtagaaactggtgaaatcatcaatcacttccccgacccatggccgcacttccgcgatgaactgcaagcgcggttgaacatcgacgatcccgcactgttgcgcaccgagatggaacagctcggcacttatccacccgaagcattggggacattgcgcccgctgtttgtctcacgcgccccgcaacggcgcaatggcggtgcagcgcacatggatacgatctacaccaagccgcgagatggtcatgtgctaatggtggaggacaaaaaggcaaaaaagattgcgaaagataatgccgaaaaagtattacggcctgccacaaccgaggaaaaggccagtatggtcattgggcgtatcggcgtgatggacaaggacagcaagggtaactacaaacttacgctggaaaaattggatgacatcattgaccctcgccgcaacgaaaacatgattgaagccttacgccattggattgcgaaccgtgacgaacgcgaaaaagcagcaaaaacaattgaggcaagtttcggtcgtggtaaagagaagcggaagccaaccgatgctgagaacgcagaaatagaacggctgcgcgcattaccacgcaagcctctaaaagacgatccaggcaacggcccatttaccggcccaatcattcgtgcggtcaaagttaatgctgggaagatgagcggcattcaaatccgcaatggattggctgcgcaggaatcgctgattcgggtagatgtcttctcaaaggaaggcaagttctatctggctccgttgtacgtggccgacactgcaaagaaaaaactacccgatcaaacagccgatggagaaacacaaatcgataacagtttcgatttccgtttctcgctccacccaaatgacttggcgaaagtaacgctcaaagggaaaggttcgattcttggttatttcaggggttacggcggcccgcccaacccttacaacatcaccctcgcgatacatgatcgcaacaaaaatgggcacgagagagcgaatgacaagggagaaattccgagcatcggcatcaagacagctttgaatatcgaaaaattcaacgtggatgtcctcggcaacacttaccccgccccgccggagaaacgtcgtgacttggcgtagcgtagtcatctcgcgccccgccaagctgcggcgtgagcaattccggcttgctattgagcaggagcaaacggcgtttgtaccgttcgaggacattgcggtgatcatgctcaaccaccgcgaaatcacgctcacccatccggtgctttcggcctgcggggaatatggtatcagcctgttcgctacgggcgacacgcaccatcccagcggggtgtttctcccatttttgccgcactcgcgcgccacgcgctggttgcgtttgcaactggatttgccgcgcccggtcgccaagcaatcatgggcaacgattgtgcgcaagaagattgacaaccaagccgcctgcctgcggctggctgggtgcgatggagcggatcggctggattcatactctcgacgggtgcgctccggcgatagcggcaatctggaggggcaggcagcagccttctatttctcgcagctcttcggcaaggacttccaccgcaatcaggcgcgtttcaataatgccgcgctgaattacggctatgcggtgttgcgcggaaccattgcacgcgggctggtggcgcatggcctgctgcctacgctgggcctgttccacgccagcgaacagaatgccttcaacctggccgatgatgtgatcgaaccatttcgcccgctggtggatttgtttgtcgccaaacttttcgtgcctgttgatgacgaattgcgcccggaagacaaggtggcgctggtaggtctgctcaacgtggatatgggtatgccacgcggaaaaatgtccgtactttccgccatcgaacacacgatagaaagccttgcccgtgtgtatgacggcggcagcgagatactgcttgagttgcccgtcctgattggattggagcagcaccgtctggagtgctgaaacatgaattaccatcgagcacccctatgttgtcattcccgcgcaggcgggaatccagttttgttaaaagcactggattccgggtcaagcccggaatgacggggtaaccatgagcgaggagacaagacggtttatgcgcttgcttgtgttcttcgatcttcctgtcgtcaccaaggcagaacgccgcgcctatacccttttccgccgtttcctcatcaacgacggctacgacatgatccagttctcgatttatggccgcatcctgaatggcaacgatgcgctggaaaaacacatgcggcggttggtgaacagcttgccaccggaaggctcggtgcgctgcctgagcgtgacggaaaaacaattcgccagtatgaaaatgctggtcggcctgccgctttttcaggaaaaagcgctcaaggtcaatcaaatgctgctgttctaaatcgggatttttcaagcagaacgcccacccagtttaggctgggtgggcgtttgcgtgagggctattgtagagcatccggggtgagagagggagctacaacttgagtagctccagtccgcgcgatacgtccattgtagagcatccggggtgagagagggagctacaacgtatcacaagcaggtttagcaaaggcaggtattgtagagcatccggggtgagagagggagctacaacacacaagtcaaaggcgcttcggcgcagcttattgtagagcatccggggtgagagagggagctacaacgctatgaggccaagggagtttgacgatgacattgtagagcatccggggtgagagagggagctacaacgtggtggtgaataacgccgccgttacggccattgtagagcatccggggtgagagagggagctacaaccccctttccagtaagtccctgccgattgctattgtagagcatccggggtgagagagggagctacaacgcgcggggcgctgggggccaacaaggccgaattgtagagcatccggggtgagagagggagctacaaccgtacagcaatgcggtggtggccaacccgtattgtagagcatccggggtgagagagggagctacaacatggagaggtttatcacttgtgccacccgtattgtagagcatccggggtgagagagggagctacaaccggtgtccggcggaacagcttcgcagcccgattgtagagcatccggggtgagagagggagctacaacgtgcttggcgtcaaagctgtagacgatgtcattgtagagcatccggggtgagagagggagctacaacggtgctgcattcagagtcagtttcatttcaattgtagagcatccggggtgagagagggagctacaacgcaccgtcagcccggtgccgggacaagagtattgtagagcatccggggtgagagagggagctacaacctgattggcatgatcttaaacaacgcgcggattgtagagcatccggggtgagagagggagctacaacgtgctgcgcgggcaagtcgggcaatcaggtattgtagagcatccggggtgagagagggagctacaacctttaaaaaaccgggggagggcgggatactattgtagagcatccggggtgagagagggagctacaacgcagtccagctctcagtgacagtacgcaacattgtagagcatccggggtgagagagggagctacaacgggaagccgaggttaaggctggcggatttgattgtagagcatccggggtgagagagggagctacaacgtcccgatactgatgatccacttctttgccattgtagagcatccggggtgagagagggagctacaactccgtggaccggtcagttttgggaggttttattgtagagcatccggggtgagagagggagctacaacggatatagtttgaattctgtttgctatcctattgtagagcatccggggtgagagagggagctacaacgaaccggaggaaggtaacgacctcttgtatattgtagagcatccggggtgagagagggagctacaacgtggctttgacagtagcgtttacagtgtgcattgtagagcatccggggtgagagagggagctacaacctgcattgagaggaactgatgttctcgcctattgtagagcatccggggtgagagagggagctacaacagctaaatcaaacagcatggcgcaactgtgattgtagagcatccggggtgagagagggagctacaacggaaacgacagtatgggatgcggcgccgacattgtagagcatccggggtgagagagggagctacaaccaccacttcgggagagtaccggcaggctgcattgtagagcatcctgggtgagagagggagctacaacagatcgtcaaggcgcgaaagaatcaggacaattgtagagcatccggggtgagagagggagctacaacacatcgtccgcgcaaacgtccagcttgcgaattgtagagcatccggggtgagagagggagctacaacagactcgatgggcgggtacgcagaatacatattgtagagcatccggggtgagagagggagctacaaccgtgttcccgttcgataacgccgatctcccattgtagagcatccggggtgagagagggagctacaacgcaaaaaccacagggcctctcatgtctatgattgtagagcatccggggtgagagagggagctacaacgcacatgccagcggtgcgcgaacgaccgtcattgtagagcatccggggtgagagagggagctacaacgctggcgcagacgaccccataaaggggccatctgtccagcgttctcgcttcgcgaggtttagcaggaaagggcgaacaccagcagcaacccaaatagacattctgcttgaccgcgagtatcgcctgtccacgacttatttagatgagaagtctcaccatctggtttgtgtcgtttccagacattggcgttctacactgaccgtcagatcaagtctggggtaatacacccgattcaacccatattatctatcaggatcgaaacgcagttggagcgcagcttgctgcgcgatggtcaaccatcgcccgataaatcgggctcctacaacggttttttttcctaatgggttatttgggttcaatacaagccgcagttttcgccacgctggacaacagcctgtttggcgccaactgacgccctgccagatcagccaccccgataaaccgccctgcaccatacaggcggactttgccgtccggcagcccggcatcaatggcgagccgctgcccttgtgccatgcgggtcacctgcactgcatcgagttcgagcatgggtagctcctgcaacaggcaatccagcggcagcaggcaggcctcccgctcctgcatggtcatcgcctcaagctgatcccagctatacgcattttctaaatggaatttggcaatggccgtgcggcgcaaaccctgcaaatgcgcgccgcaccccaaggctttgccgatgtcttcggccagcgtgcggatgtatgtacccttgctgcaacgcacggtgatttccagttcatcgccggcgaaacgctcaaacaccaattcgtggatggtcacgttacggcttgcgcgctctatggtttcgcctttgcggatgtactcgtacagcggttttccttgatgcttgatggcgctgtgcatcggcggcacttgttcgatctcgccgagaaaatcggccaatgcgacgcgcacctgctcctcgtccagagccacgtcacaggtgctggtgatttcgccttcggcgtcgcccgtggtggtggtctgcccgagcttgaccagcgcgcggtaggtcttgtctgcgtccagcaatgcgttggaaaatttggtggcttcgccgaagcagatgggcaacaacccggttgccagtggatcgagcgtgccggtatgccccgccttctctgcctgaaacaggcggcgcactttttgcaaggcgatgttggagctgagggtcagcggcttatcgaatagcaggacgccgtctatctggcgttttgtgcgggtcatagtatttaaatagggaagggggaagggaacgcaccttcggtgctcaagggggaagagtaaaaaccctgcgcgcgaagcgctccacccttctcccttccccctttacccttcccagtttttatcgcttgcgaccgcttgttcgataagctgcgacaagtgtatgccgcgctcaacggattcatcataaacgaagtgcagttgcggcgtgatgcgcagcttcatgacgtgcgcaagctggctgcgcaaaaacccactggcccgctccaggccttgctgcaccttgtcgctcgcgccttccagcgtggtgtagaacaccttggcgtgtgaatagtcgcgcaccacctcaacccccgttattgtgaccatgcgcactcgcggatctttcacttccagacgcaccagttcggccagctcgcgctgaatttgctccgccacccggtctgtcctggtgtagtccttgggcattacagcgcgcgcgccacttcgacgatttcgaacacttcaagttggtcgccaaccaggaggtcattgaacccgcgtaacgacaggccgcactcaaaattcgattttacttccttgacgtcatccttgaaacgtttcagcgaatccagttcgccggtgtggatcaccacgttgtcgcgcagcacacgcacctgcgcattgcgcttgatcatgccgtcggtcacgtagcaaccagccacggtgccaatcttggaaatatggaacacctggcggatttccaccatgccaatgacgctttcctttttctccggcgccagcatgccggtcagggcagctttgatttcatccaccatctcgtaaatgatgttgtagtagcgcacatccacgccggtggcttccgccaacttgcgcgcagtaacgtcggcacgcgtattgaagccgatcacaacggccttggaagccagcgccaggttgatgtcggattcgctgattgcgcccacgccactatgaatgagattaactttcacctcggcagtggacagcttttgcaaggattgtgcgatggcttcgcaggagccttgcacgtcagccttgacgatcagtgccaggttacgcacttcgccttccgccatctgctccagcatattttccagcttggcggcctgctgtttggccagcttcacgtcacggaacttgccctggcggaacagggcgatttcacgcgccttcttctcatccgccagcaccagcacgtcttcaccggctatcggcacttcggacaatccctggatttccaccggaatcgaaggccctgcttctctcaccaccttgccgttctcatccagcatggcgcgcacacggccaaatacggtgccggccaacactgtgtcgccgcgcttcaaggtgccggactgcaccagcacggtcgccacaggccccttgcccttgtccagcctggcttcaatcacgatgcccttggcgttggatgccttgggtgctttcaactccagcacttcagcctgcaacagcactccttccagcaacgcgtcaatgccttgcccgctcttggcggacacttcgacgaacatggtgtcgccgccccaatcatccggcacgacctgttccgcaaccagttcctgcctgacgcgttcggcgttggcttcgggtttgtctatcttggtcaccgccaccacaatcggcacgttggccgccttggcatgatgaatcgcttccctggtttgcggcatcacgccgtcatcggccgccaccaccaggattacgatgtcagtcacttttgcgccgcgcgcgcgcatcgcggtaaacgcctcgtggcccggcgtatcgaggaaggtgatcatgccgcgcggtgtgtccacatggtaggcgccgatgtgctgtgtaatgccgcctgcttcgccgctggccacgcgggtgcggcggatgtaatccagcaacgaagtcttgccgtgatcaacgtggcccatcacagtcaccaccggagggcgtggctcgctgggcgcattcttatgctcgtccgattccgtcaggtaagcgccggggtcgtccgccttggccggtttggcaatatgtccaagctcttccaccacgatcattgcggtttcctggtccagcacctgattgatggtcaccatggagccgaggttcatcagcgccttgatgatttcgatggccttgaccgacatcttctgcgccagatcggcgacgctgatcgtctccggcaccatcacctcatgcacgaccggttcggtcggcaaggagaaagcgtgctgcgcggtttcttcctgtttggcatgtttctcgtgatggcgcgggccacgtccatgacccgccgtccacccgccgggccgtacatcgttacgggtaggcatgcgtttcttgtgtccggcctcattccagggactgcttttatcgggagctgtttttgcgcccttcttggcggctggccggacgaccttgtccccgggtttggacactggcttgtgcagcgtgccttcagccaggctggcggcaggtgttgcctcaacaaccggcgcagccggtttaatctctgccggggctgcgggctgctccgcaggtttttcgggctcggcaaccggagccgccttgcgtttgctgcgctccttcttgacctgaacttcagcggcctggcgtatggccaactctgcctgactgcgcgcttcttcctcacgcagtgcaagttcctgctcgtccaccttcttcttcgttgcagattttttcgctactggttccggcatcgcctctggcgcaacagcagcgggcttctccgcagcaaccggtgcaaccacacgtttcttgcgcacttcgacctgaatggtgcgcgccctgccagtgctgtcagatttcttgatctctgtggtttcgcggcgggtcaaggttatttttttgcctttggcgctgcccccatgcgcggtgcgcaggtgctccagcagttgcgccttatcctgttccgatatcggatccgcctcctgctgtttggcgaccccggccgcctgcagttgttccagcaacagcccaaccggcaagccgagctcgccagcaaactgcgctacattcatttttgccattactatcccttaactacaaagccggacgagccggaactaaatgtaggtcgggctgtgcccgacatggtgggcagtgcgtggttgttgccgctttagcggctttacaaccacggcctaccccttgcgggtgcagcccaccctacgttacagttttgccatgtgacaaattctgctcaaaaatgtgaaaagtgtcgggttggctttgcatagccattcgactaggttgccaaaaaaacgccaaccaagtacacccgcaaggggtacgccgtggttgtaaggggctaaagccccaacaacacacgcaggctggttaaaacccgacctacaacccgttaagcaaaccagggggcgcgcgcagtcatgatcaaccggttggcgcgttcgccatccatggccgtcaactcaaccagctcatccacatccagatcggcaagctggtcttgcgtgccgattcccttgcctgccaggatacgcgcggtttcctcgtccatgccttcgagtttaagcaagtcctcgatgccgtgttccacctgctcttcattcacgatcgcggcggtcaacagcgcgttgcgcgcgcggctgcgcagttcattcactgtcgcctcatcgaaagattcaatctccagcatttcttccagcggcacataggccacttcttccagcgtattaaacccttcctgcaccaggatgtccgccacctcttcatccacatcgagcttgttgatgaacagatcacgcaccttggaaaattcctgctcattcttctggccggattccgctaccgtcatgatgttgagttcccagcctgtcagctcgctggccaagcgcacattctggccgttgcggccgatggcctgcgccaggttttcttcctcgaccacgacatccatgctgtgcttgtcttcatccaccatgatgctggttacatcagccggagccagcgcgttgatgacgcttgtggcggggtcttccgaccaaagcacaatgtccacgcgctcgccggccagttcattggttactgcctgcacccgcgagccgcgcatgccgacacaggtgccgatcgggtctatccgcgcatcgtgcgaacgcaccgcaatcttggcgcgcgcgccgggatcgcgtgccgcactgacgatttcgagcagaccttcctcgatttccggcacttccagttcgaacagcttgaccaaaaattcgggcgtaatacgcgacaggacgatctgcggcccgcgcacggaacggtccacacgcagcaagtgcgcgcgcacgcggtcgccgacgcgcatgttttccttggggatcatctggtcgcgcggcaacaacgcctcgatcttgccgaactcgatgatggcgctgccgcgctcgatgcgcttcaccgtgccggacaccagatgttccttgcgctccatgaaatcgttcagtatctgttcgcgttcggcatcgcggattttctggaaaatcacctgtttggctgcctgtgcgccgatacgcccgaagtcgatggactccagcggctcctcgatgaactcttccatctcaatgtctggatcgcgcttctgcgcctcgcccagtttgatatgaagttccggggtttcgaaagtttcatcatccatcacctgccagcggcggaacgagtcatattctcccgtggtgcgatctatgctgacgcgcacatcggcttcctcggagaaacgcttcttggtagcggaagctaacgcagactccagcgcgccgaacacgatctccttatccacgtttttttcacgcgccaaggcatccactaataacagaacttcacgactcatcaccgtctccaactaaacaatccgtccaccctgataattttcatggggcaaacaattcacgaaactcaaaatgtcggcaccaaccgcgccttatccaaattggatagctcaatcggtatctgattgccatccacctccaactgcaatatgccgtcccgaacttctcccagaacgccggtaaagtttttgcgccctgccagcggcatgcgcaatttc

SEQ ID NO: 2851 - DNA, 23564 bp, synthetic construct
  misc_feature 1..23564: note = Synthetic
  source 1..23564: mol_type = other DNA
tggatcattagcaccgaccttctcggatagggacttcagcgcttcgcccagctcgatgttttcgatatcaagaaccaaacgctccgggtctttgacaaagaagtgttggtatttgaacgccgtaccggcttcgaatgtgactcgtgtgtattcattggccggccagacacgggcggcatcgacctttgaccgcgtgggcaacgcagcgaacacctgcgacggaaccaagggcaatatcgccgccgtggcgagcaacgaacgccgcgacactgatacgccgtggacagaaattaagcgcgcagtttcgcaagcagttgttgaccgcgttgcgtggtagccgtcaggtgcgcccggcgttgcgtctccagattggccgctgcggtcagatgaatatccaaatccggaagcggcaagggcacctgcgctccctgcgctttctcgggccactcgatcaacgagatcgccttgtccgttacggaatcgcgaaagcctgcctcgtgccattcgtcagggtcctttaagcgataaaaatcaaagtgatacaagtttaatctagaaactgtataaacttcaaccaatgcataggtcgggctcttcacccgaccgttgaagcctaaaccgcgcagcaccccccttacgaaggttgttttgcctacgccgaggtgcccacgcaaaaaaatcgtgatcggcagctcgccagcatcggccgccgcctgtatcgccgtggcaagctggccggccatccgcgcggtttgcgcctcgtcagcaaaatcaacgtagagcgaagagaatgttgtcatccgatagactgctggcatgaatgaaatcgacttccagcagttggctgccgacatcaaggtttggggaaagtcgctcggttttcaggaagttggcattaccgacaccaacctttccaatgaggcagtgctgcttgagggttggctcgcctccggctatcacggcagtatggattatatggctcgctatctgggtgccaatggatccggtcaggacacagttccgcatcgcgcgatacccgcttcgatcgtgccaggcacagttcggattatcacgacacgattgaactacgacacgctggtggcgtgcgatggctgggaagtcctcagcgacccatcgaaggcattcatctcgcgctatgccttaggccgcgactaccacaaggtggtgcgcgccaaactcgtggcactcgctgaaacgatcgcggaaaaagtgcctagtctggcctaccgggtgtttgccgattccgcgccggtgatggaagttgcgttggcaacaaaggcaggcataggctggcgtggaaaacacacactgctattgaatcgcgaagcgggctcattattctttctgggggaaatctacatcaacctgcccctgccgattgatgcacccaccaccgaacactgcggcacctgcacgcgctgcatcgatgtctgcccgaccaacgctatcgtcgccccgtacgttgtggatgcgcgccgctgcatttcctatctcacgatcgaaaacaaagacgcaataccgattgaatttcgcgaagcaatcggcaaccgcatctacggttgtgacgactgccagcttacctgcccgtggaacaaatatgccgcaccaactggcgagaaggattttatgattcggcatcagctagacaacatcacgctcggtgaactctgggactggaatgaaacaacatggctggagcgcatgcggggcagcgcgattcgacgcatcggcttcgagcggtggcaacgcaacctcgcagtggccattggcaatgccttgcgagcggacaagctcccagtcgccgaggccgactcactccggcagcgtttgcgctttgcgcgtacgtcggcgacccccttggtcgccgagcatatcgactgggcactcgcctgtgacgaccgcgattgaagagggtaaaacggggcgcaggtacaaatagatgatgcggccactcaacacgaataaatgacccccgctcccgcgcacaaccgcaagggttgcaccgggcgggagcctaatttttttcgcagaaaccatcccttgaattacaagcggatgagattcctcgtcgcccgatgggctcgcgtcggaatgacaagcagcggctagcgaagcatgaattgattgacgcgcttgacgaagcccgccggatcttccaattgcccgccctcagccaacagcgactgctcgaacagaatcagactgaggccgtcaaaggtctccgcgtccacatccgctttgagtttttcgaccaacggatgggtcggattgatctcaagaatcggctttaccgcgttgaccttctgcccggccgctttcaacatacgctcgaggttgcccgataactcatgctcatcaaccaccagacacgcgggggactcagtcaaacgatgggtgattcgcacttcttttactctctcagcgagcgcgttttttattttttccagcaacggctttaacgcgtcggccgtcttttcggcggccttcttttcttcatcgtcggccaatgcgccaaggtcaagatcacccttcgcaaccgacagtagcttcttgccatcaaattcgtcgaccgatcccaaccaccattcatcaaccgattcagtcaaaagcagaacttcgatcccctttttcttaaacacctccaagtgagggctgttctgcgccgcaatgaggctgtcggcggtgacgtagtagatcttttcttgaccgtgtttcatgcgcgcgacgtaatcggcgaacgaaacagactgcgcgctgatgccagattcatgggtggaataaaaccgcgctaatttcgccacacgctccttattggcaaagtcctcgcccatgccttctttgaagacgcggccaaacgcatcccaaaacttgatgtatttgtccttctggttttcggcgaggtcttcgagcaggctcaaaaccttcttcacacaaccggagcgaatcgcatcaacgtcttttgattgttgcaaaatctcacgcgaaacattcagcggcagatcgtttgagtcaaccacacccttgacaaaccgcagataacgcggcagcagttgctctgcatcttccatgatgaacacacggcgaacgtacagcttcaacccgtgtttacgctcgcgatcaaacatgtcaaacggcgccttggatggcacatacaggagctcggtgtactcctgacgcccttccacttttgcgtgcgtccacgccagcggcggctgccaatcatgcgagacatgtttataaaactcttgatattgctcttcggtaatctctgacttggcgcgggtccaaatggcgttcgcttggtttatcgtttcatcctcatcgcggacaacctgtgccttggcctcttcatcccactcagactttttcatcacgatgggaagttggatatgatcggagtattttcgaatcacactttttaagcgccagtcgtcgaggaactccttagcgtcgtctttgaggtgaagaacaatttctgtgccgcgtccggctttttcgatcgcctcgagcgtgaattcgccgtcacctgtcgattcccaacgtacgccgtctgcggcgctggcaccggccctgcgcgaggtcaacgcgacacggtccgccacgataaacgccgaataaaaaccgacaccaaactgaccaatcaaattggcgtccttttgttggtcgccggacaacttcgagaaaaactccttggtgccggacttcgcaatggtgccaatgttggcgatgacctcttcacgagacataccgatgccgttatcgctaatggtgagcgtaccggcgtccttgtcgaagcccacgcggatcgtcaattcagggtcattctcgaataacgctggtgttgtcaccgcttcaaaccgtagcttgtcggcggcgtcggatgcgtttgaaatcagctcgcgaaggaatatctcgcggttggaataaagcgagtgaatcatgagctgcagaagctgtttcacttcggtctggaacgcacgagtttccttcacggtctcgctgttgggctggtcggtcgcggtggtcatagcaatttttctccgtaaatttgatgacaaactttggttacaaaaaaggtttgcggagcaaatttgggcaaatcgacaaatttcaagtccgtcgtgggattcgctgccgccctcgctacaactgacgaacggaataccccttctgggagagaagattgaccagcccgcgcggcccaatgagatgaagagagccgacggcgatgaaatgcgtttcaccgcttgcaagataggcctcgatcttctccatcatcgccgggtggcgcccccagagcaacaattgattgaatttgtcggcatccttttggctgcgcgacgcttcatcagtcagttcgagcattagtttcgcgtcgcccaactgccaagcgttcacgatgcccgtgatctggtcggctgagcgcccttgctcaatgatggtcagcgcgttatcgaggaacgactcctgcaaggcgcttggcatactcgtcagcagctttatctgcgcgagcgatgactctagttggagcagcggcttcttttcttgctgcgcccgtttgaccaacgccagatccaagccagaattcatgtcgtagcctaactggacatattcaagtatgggcaacattccaccaagaatgaccggacgcatgcccgacacgttggcgtacgggattttgcgtttttcgagctgtgccttgagcctcgtcaacaactgcggcgaaatatggcgctcgatggtctcaccttttggataatccacaatcttggcgatttccttaccctcagattgatccgtgatgtcggcctccaccacaatcttgctcgatgccaaccacgcaacttgaactgggcgcggcagcggataaaagctcggctttccaacatgaatggttccaaacagatatgcgatgttgccatcctttgatttcacctcccagagaagtccacgaagactgtcatttcgctcttcaatccgcgtggcacgactttgggtcgggtcgtagccttgctgtcccacggctggtgtggcgggtggtgtggcgggtggtgcggcgggtggtgccacctttgcggcaggcatctgcgcgcacaacgccgtggacaatgcggccaccgtcatcgacgtgagaaaaaagcggcaggcaggattacgatgaattttcatgtatcggctcaataatgatgcctcgcccggattcttctggagcgaggttgttaaactacgagggtcgaattttcgctcagatcaaacaacaaaaggggaatgccatgaatgcaaattttcagtaccctcaggtcggacaagcccgccagtgcttcgtttcagtaatcgcgatcttggctgccctaacggtcggcgcgttcgtgcgctccgcggcggcacaggagtgcaagcaccgcggcgacctcgacgcaatgtactgcgacgaaaacaaagatcttgttgcagatacgcccaaggacagtaagaaactgaagaatcccaacaccatcgtgttcacctacacgccggtcgaagacccggctgtgtatgaaaaaatcttccagcccttcacgcaggatttgagcaagtgtttggataagcgggtggttttctaccaggtcaattcaaacgcagcggaaattgaagcgatgcgctccggtcgtctccacgtcggcggtttctccaccgggcccacggcctttgccgtgaacatcgctggcgccgtcccgtttgccgtcaagggcacggagaaggactatcaaggctacaacttgttggtggtcgtcaaaaaagcctctccgtttttgaaactttctgacttaaggggcaaaaaggtggctcatacgtcgccatcgtccaactcaggccacatggcaccgttagcgctgtttcctgcagaagggctaacgccagacaaggattacaagatattgttttccggcaaacacgatcaaagcatcatgggcgtgaactccggcgactacgacgctgccgctgtggcatcggacgtctatcaccgtatggcttcacgcggacaaatcaaggaagacgacttccgcatcatctacaaatcgaacaaatttccaacgtcgagttttgcttacgcacacgacctcgatccggctctcgccacgaagctggtcaagtgtttttacgactaccggttcacgccagagatggtcaaagccttcgacggcgcggaccgattttttccggtgaacttccagaaagactgggaggtcgtaagacgggtcgcggcgggctcgggtgaagtgttcaatcgcagcgcatatgagaagcagacggcgaaggaagccgaagcggcgaaaacaaagaaataatccgctactacatgcgctcggccccacaagggccgtctcccgctttcaacatttaccgctaacgaaggaccgccgtgcgcaatacgaatcttgtttgccgatcaacatctcacacgaggttaacaccagccgcagcctccgcgctctcggtcgcgcttatcatcgcattttccctgctgctttccgcaccaaccgcgagtgcacagacctgcaaaaatcgtggtgaactcgatacgatctactgtgacaacgacggcgacatgttggcggatacaccgacagatccgaaaaagttacgcaatccgtcaatgttgttgtacggctatacgccgaccgaggacaccgccctctacgaaaaactgtggcaaccctacattgaccacatgactagctgcaccggcaagcccacacgtttctttaaagtccactcggcggcagccaccatcgaagcattgcgcagtggacgcattcatgtttcacaattgtctgccggcgacaccccgtttgcggtaaatatcgctggtgcccagccgtttgcgattcgtggcgacgccaaaggtccggccgtctatcggctcgtgttgctcgtaaaaaaggatagtccgtttcaggcgccgaaagacctaaaagacaaacgtattgctcatgtgacgcccacctccaactccggcaacttggccccacgcgctctgttccccgcacaagggctcacaccagacaaggattacaaagtcctgtattccggcaaacacgataactcggtggccggggtaatgagtggcgactatgacgccgccgcggtagcggacgacgtttggtttcgtatgattgaccgtggaatggtgaaggcagatgacctgcgcgtgatctttcgctcaaaaccattcccgccgggtagcgccgtggtggtgcacgatttactacctgaactcaagaagaaaattgccgattgcaccatcaactaccgcttcacgcctgagctgacggctgccttccgcggcacggccgatcgccactggccgctggactataaagaagactatgatgcggttcgcgcagtcgccaaagcaagcggcgaagtatttacgcgcgaagcgctggcaaaacgcgctgctgaatctgcagccggcgcaaagaaatgaatccactcgaccgaagtatccaaatccgtggactgaccaaagagtacaaaaaaggcgtgcctgtcttaaaggggattgacctcgatattcccggcgatggcattactgcaatcatcggcccctcaggcactggcaagtcaaccctgattcgttgtatcaatcgcctcatcgaccccaccgccggccagatactcttccaaggtcaggatctcgccaaactgtccggcgtgccactgcgcgaagcgcgccgccgtatcggcatggtgtttcaagaatacaacttggtcgaacgcttgactgtgatggagaacgtgctgacgggacggcttggttatgtttccgcattcagagcatggctgcgaaaattcccgcaagacgatatcgacgaagcctttgcgttactcgatgcggtaggtctgggcaatttcgtcaatcagcgtgcggatggcttgtctggtggtcagcgtcagcgggttggtatcgcgcgtgccattatgcagcgccccgaaattttgctggcagacgagcccacctcatccctcgatccgaagacatcggtggagatcatggaaatcatggcggagatggcaggaacgcgcaatattccgatcatcgtcaacatccacaacgtggcgctggccaaacgtttctgccagcgaatgatcggcatgaccggcggtaaggtcgtgttcaatggaagtccagcggaactcaccgatgaccacctcaaagaaatctacggtggtgaggactggttagagtgagcattccggccacacacaaaactcgcgtcgccttcattccaaactggccgctgcgtatcggcttcatcctgctggcattctatgtcgtgtgggcgatgggtcagctcgatgtgacgtgggcacgttttgttgatggactcagcgccggacaaaagtttttggggcgtatgtttccgccgaacttcagcgccgaaaaggtggagatgatcaccaaaggcttgctcgaaagtatccaaattgcggtgatcgccaccgtcatcggtatcggcttgtcgctaccgatcggacttctcgccgcacgcaatctcatgcccgcatggatcgtctggccggcgcgtgcgctgatcgcggtgtgtcgctcgtttcatgaagtggtgatcgccatcatttttgtgaaggccgttggatttggcgccatcgccggtatcggcgcgctggtggtgggctccatcgggttcatttccaaactcttcgccgaagccattgaggaaatttcaccgaaacaagttgaggctgtccgtgcctccggtgcggggttttttggtgtgctgatctatggcgtcattccgcaggtgttctcgcgctttttaggttttgcctcgtatcagttcgattccaacctgcgccattcaaccatgattggtattgttggtgcgggcggcatcggcggcagcctgttctccgcgttccagcgctttgactatgactttgtctgcgcgattctgctgtcgatcatcgcgctgatcatcatggcggaggttttctcaaactacgtcagagcgctcttcaacgataacttagcgttactcgattacctgcgtaaccgcagagcaacaaaactgtcgcaagaaaaatctgccgggttgggggcatcgtgagcacacacgcgattcgacggtgggagcgcttcacccccgaacagcgattcttgcgatttgcgttctactttatttcggtcgccgcgatcgttttttcgataaagaacattgaggtcatccccgagtttctttacgacgcaccagaacagcttgctgattttttccaacgtatgtggccgatggatacggcttactatcaaaaatccgtacacgcagccctgatcgaaacactcaacatcgccacactcggcacgctgctgtccctcacgatgtcgattccggtcggcatcatggcagcgcgcaacgtggtgcccatcaagccactcaacatgctcgcgcagctcatcctagtatcgagccgctcggtcaataccctagtttgggcgttgctattcatcgccatttttggcccgggtgcgatggcgggaacaatggcgatcgcattccgctccattggctttgttggtaaattgttgggcgaggcattggaagaggcgaatcgcgggccgattgatgcgctcaccgccacgggcgcgccgccgacgtctgtcttcctgaaaggctactggccgcaagtcatgccatcgtttgtttccattgcgctgttccgctgggacatcaacgtgcgcgaatccgccgtacttgggctagtcggcgcgggtggtattggcatggcgatggacaccgcgatgaacctgttccgctgggatcaagtcgcggtcgtactctcgaccatctttgttgtggtcatcatcgctgagattgcggtgagcgcgattcggcggcgcattatctagaaaccccaataaggacgggcgttttcaagcgtttttgcttgaaactgcccgccacttggcgctaacgccttgcggacgttaagtgacaatagtatcctagcgaacataacgtctgccgaccgagccaatccacacgcaacgaccgcaacaaatgaaaagcccgacaggcaagcctgtcgggcgggtactgattcaatcgttagattgattcattattgtagcaacggctctcaccccggaagactacaagacttcatattaaggaatttacgcatgaatgacaagaagaatttgggcccactgacatttggcttcgatattggtattgcctcagtgggttgggcggtgctgtcgccgacccgtattgttgaccttggggttcgttgcttcgataaagcagaaacggcgaaagaaggcgagtcgctgaacctcgcgcgacggtctgcgcgcctcatgcgccgtcgcttgcgccgtcgcgcttggcggttgattaagttggcgcgattgttgaagcacgaaggactgatcgcagacacaaaaactttcattcagccttctgcttcgcacgcctctccgtggcaactccgcaaagatggcttggaccgagcgcttagcccagaagaatgggcgcgtgtgctttatcacctttgtaaacaccgcggattccattgggtgagccgagccgaagcgcgaaaagcagatggggacacgaagggagaaggcggaaaagtcaaacagggcttggccagcacaacaaagctcatgaacgacaagagctatcggaccgcagcggaaatggtactggcagaatttcctagtgcacagcgcaacaaacgcggcgagtatacaaaagcgctatcgcgtgagttgcttgacaatgaactgaagcaactatttgagcggcaacgcgagtacggcaatccacatgcggatacaaacctagaagctaagattcgcggtagtggcgatcacaagagtggactattttgggaacagaagccagcgctttctggtaatgaccttctcaaaatgctgggcaaatgtacctttgagaaacaagagtaccgcgcaccaaaagcgagctttaccgctgaacgccatgtctggctaacaaggttaaacaacctacgcatcatcgtcgatggtcggacacgtccactggctgacgcagagcgcacgatggcgctgagtcttccctacgagcaagtaggagactttacgtacaaacaacttcgtgctgcgctcgtaaaagctgggctcatgcctgatagcttcaaatttgcgagcctcgcctatcccagcgaatttcagaaagccgagggcaaagcgaaggatcctgaatctgcggcgctaaccaagttggcggcgtggcaagagcttcgtgcaacgctaaaaaaagccgacctcgaatcagaatggcagcaaatatcgtgcgcggcgctagaagggcagcctgaaacgctggacgaaattgctggtgtgctaagtgtattcaaagatgatgatgaggttttgaacgagcttcagaagttagggcttccaggcggtgctaaaacggaaaacgccttgttggacattcgctttgataaatttcacgcgctttcgcttaaagcgttacgcaaaatcgttccgtatatggagcgcggcttacgttatgacgaggcatgtgaaagggcggagtaccaccacagccaactgcataaggttggtgaaggtaaccgaaaatatcttccaccactttataaatcccgcgacaaagacggccgtatggttttcaacgacgagcttggcgacatccctcgtaatccggttgtgcttcgctccttaaatcaagcacgaaaggtattgaatgctctcatcgcccgctatggctcgccgagttcggttcatatcgagatggcgcgcgaactttcaaaaccgttcgatgaacgaatgaaagtaggcaaggaacaagaggcctatcgcgagcgaaacgaaaaggacaaacaaacctttgtcgcggagtttggcatcgtcggcgcagccaagggtggtgagtttgagaaatggaagctgtaccgagagcaacaaggcaagtgtgcctactccatacaaggaatcgaccttaaccgattgcttgagcccggttacgtcgaaatcgaccatgcgctgccctactctcgtagctttgacgacagtaaaagcaacaaggtccttgttctcgctgcggaaaatcgcaacaagggcaaccgcacgccctatgaatatctggatggcgaacacaacagcgaacggtggcggcaattcgtcggcttcgttgaatcaaacaaactgtaccggcaagccaaacgcagtaggctgctaaggaaagactttggtaaagagcaggccgacgaatttcgcgagcgcaatctgaatgacacccgctatgtttgccgcttcttcaagaatcaagtcgaacagttcctcaaactggctgaaggtagcgaaagtaaacgctgcgttgtcttgtctgggcaactgaccgcattcctacgagcgcgctggggtttgattaaggtacgcgatgaaagtgatcgccaccatgcacttgacgccgtggtggttgccgcctgtacgcacggcatggtcaaacgaatgtcggactatgcaagacgcaaagaactcgatcaggttgcagaaggctttgtcgatgtcgagaccggcgagatcatcaacgccgccatgttccagcagttgcatgaacacttccccgatccgtggccccactttcgtgatgaagtccagatgcggttaaagattgacgaccctgcgcagttgcgttcagatttgttgcggcttggcaattacgccgaggaagatgtacacgcggtcagaccgctgtttgtttcgcgcgcaccgcaacgacgtaacagcggcgcggcacataaggaaaccatctacggacagcccgaacgccttaaagcccaaggtggtgtgactgaaaaagtcgcgctcactgcgttgacgatgaaggatttggatcgcctaattgatccgcatcggaacgaaaaactatatgcggctattcgtaaacgcctggaggaatttggcggcaaggcagacaaggcgtttgctgcgagtaatccgcttcacaagccggataaggaaggaaatcctacgggccccatcgttcgtacagttaccttagaaatcgacaaattgtctggcgtaccggttcgtgggggtatcgcgaagaacgacacgatgttgcgagtggacgtattcactaaagctggcaagtttcatcttgtacccgtatatgtccaccataaagtcacgggtcttccaaaccgtgcgatcgtcgcgtctaaggatgaggacgaatggacagcaatcgatgactcatttgagttccttttttcgctgtatccaaacgatctggtgaccatcacccagaaaggcaaagcaccggtacgcggttactacgcaagttgtcaccgcggaaccggcgcgttcagcctttgggctcatgaccgtgcatcgtccgtaggtaaaggtgggcaaatagaaggtatcggcatcaaaactgctctagcagtccagaaatacaatgttgatgttttgggaaccacctatgccgccccattggagcaacggcgtggtctggcgtagcgtcgtcgtcaaccagcccgccaaactcaagcgcgagcatttcgcgctcgtcgttgagcagaaccagtctgcacgggttccgtttgaggacattgccgtgattgtgttgcatcaccgcgaaataaccattacccatccggtgctatcggcctgtgcggagtacggcatcgggttgttctcaaccggtgataaccatcaaccaaatggtgtgtttatcccctacctctcgcacagccgcgccactcgaatgatgcgattgcaaatggccatcgataagccgttggcaaagcgtgcgtgggcagaaatcatcaaagctaagattgggaaccaagcgcggtgtttaaagcttcgatcaaaacaagaagttgatcgattagagtcctttgttcggcgcgtgcgctccggcgataccgagaacatggaagcgcaagcaagcgctgtctatttccgtgcgctcttcggcgcgagctttgatcgttcgcagcccggttggacaaacgcggccttggactacggctatgccatcttgcgcggcaccattgcacgcgggctggtcgcacacggcttcctgccaagcatcgggctattccatcgcagcgagcaaaacgccttcaaccttgccgatgatgtgattgagcctttccgcccaattgttgacctttatgtttcatctaaccgccccgctgaagagacggcagagttacagccgaaagacaaagccgacttagtggcgctactgaatgtagatgttggtatggtacgcggcgtgatggccgccttatccgcaattgagcacaccattgaatcgctggtgcggctgcatgaaggcgcagacgaagaggcgcttgagttgccgaagctgattggtcttcggcaacatcaacgcgaaatgtagtgagcaaagagacgcggcgctttatgcggctcatggtcttcttcgatttaccagtagtaaagaaagaggatcggcgcgcctacaccgtctttcgtcgattcctcttgaatgatggttacgacatgctgcaattttcggtttatggacgaattctgaacggtgccgatgctgagcaaaagcatatgcagcgcttgattcaaaatctgccgcccgcaggctccgttcgcgtcctgactgtcactgaaaaacagttcgcatcgatgaaattactggttggcctgccactctttcaagaaaaaaaggtcagcgcccagcaagtcttgctgttctgagcgcggaatttgggcgaaagaaaacccgcaaggtcgttaaaccatgcgggtttccagtgactctattgtagccttccggggtgagagagggagctacaaccgacgataggtcgagagccctgagaaacaacgataggtcagaccagttgaccataaaaatattgtagccttccggggtgagagagggagctacaacccgtccgcagccgcgtacagcctgcgtaagattgtagccttccggggtgagagagggagctacaaccgcgtcaatagacgagctacacgcccacaaattgtagccttccggggtgagagagggagctacaacaattttgatcagccgctcgagcagctcgcaattgtagccttccggggtgagagagggagctacaacttaaaaaatgttgtggtgtctacaacgccaattgtagccttccggggtgagagagggagctacaacttagtcggctaggggcgaacgcccctgccgaataagttggcgcttcgcgctcccccgttcagcaaaaacatctacgctgcggaaagcggagtcctccgctcagctacgctccggtcggaatgacagcgtgggtgtttgcggtctggttttggcctgattgtgtccgttacttatgaacgcatcattctcgtcatcgcttgatcgccttggtggacttccgtctttggaaaaggcgaatcgcggaggtgcctcgcacggctcgcgccgtttgacgtaggacacttccccgttctttaaagagggaaatacttcgcgccagccgcgacaattttttcaaccctccgtctccgctgacgctagatattcgcgcgaacttcctcacatggtgggacacgtagaagcacgaccctctacacgatgacttcagcaaaccaaagaacgttggcaaacaccagcaacgacgggcgttttcaggcgtttttgcttgaaaatacccgccactaatagagtttcctccccagggaacttctaaaagcctactgcgcgggtgaatccgtcagttccggtactcgccgtacactgggtacgtgtcccgcgtttgcccaccccgtcactgccaacttcacccgctcgcgacggtttttagaaattccccccagggcgaattgcgcgcctgcggtgctcgccgtacacggggtatgtgtcccgtgtttgccaaacccctcggcacgagcttcacccgctcgcgacggtttcgagaagttccccctaggctcctgacttcgcggagtcttgttcgctggaacccacggctgccacatttaggctgatcggtgcctgcgggacaaacgcatcgatcaccaccgcctcgtaacggacttccagaatatcgagttcttcgcggccgcccggcgcatgcaacgtcacgctgtcgccctcgcgcgctttcatcagcgcacgcgccaacggtgaaatccatgtgatgtagtggcgcgataggtcgagctcgtcgataccgacgatggtgaccgttttttccagcccggttgcatttgaatagaccacagtcgcgccaaaaaagacacgtccggccagctcttcgtcacgcggtgtaagcggatcaaccacctcggcggcatcgagccgtttggttaggaaacgaatcctgcgatcaatttcgcgcagacgcttcttgccgtattggtagtcggcgttttcagatcggtcaccattttttgccgcccacgacacggcggatgtcaccgccggccgttcacgatcgagcaggtacttcaattcgtcgcgaagacgctgatgaccgcccggcgtgatgtagtttttgatgcccgcaggaatcggcgtgccgccctctgcacccgcgtcatcatcaccttcgtccgtttctctcgtaaatgctctattcattttctcaacacgctatgtgtggcatcgcaccgatgcgaattggattcacgccccaaactgttcgcgcgaatcaaggtgaattttggcagcggattgagtgcgagttgatcaacatcaaaccgcatttcgcgcttaagcctaagattatgtgatcgccaacctctcacaatgaaggagttaccaccatgtttaagtcaattatcgttccggtcgatggcggcaagctgtcattgaaagcactcaagtacgccagcaaactcgccgccgcccatgacgccaaactaacggtgatgaccgcgctgcctgaattccccaacatggtcggcggtgatggctacatggtagcgccattgtcaaccaagcagtgggatagcatgctcaaaaagcgctccgatgccattaaagcaaccgtcactaagcaactagaagacgccccgtatgagtttacgtccgtgacctctgatcggccatacgatgcgatcatcacgattgccaaaaaacgcaaatgtgatttgatcgtcatggcttctcacggccgccgcggtctgtctgcaatacttctgggtagtgagacgacgaaggtattaacccattcgtcgattccggtcttggtctaccgctagccggaatacctcacgactcgcccactgctatcgtgtgtggtgggcgtagatttcgcgcagcccttcgatgttccgcagatggacgtacttttgatccactgcgatcaacccattggcttgaaactttgaaaacaggcggctgactgtctcaagtttcatgccgaggtagctgccgatttcctcacgcgtcatgcgcaaatgaaattccagtgccgagtaaccacgcgcatttaagcgttgcgataaattcaacaaaaatgctgccagccgctcgtcggcgcgcatggtgccgagcaacatcattacgccgttctcacgaacaatctcacggctcatcactttgtggaaatgacgctgtagtgacggcacctcgatggataaacgctccagatgcgaatatgggatggtacaaatctcaccatcctcaagtgcaatggcgtcacaattgtgcttatcctgactaataccatccatgccgagtatctcgccggccattgaaaagccagtcacctgatcgcgcccgtctggcatggtcacccgcgtcttaaaaaaaccgcttctgaccgcgtagagagcatcaaacttagccccagcgcgatacagcgtatcgccgcgctttactttcttgcgcacgtaaaccagttcgtcgagctgatcgacctcgtgcggcgtcagcccagccggaagacaaatttcacgcaggttgcagttcgcacaggcggtcttcagcgcaccgagatctaacggtgtggtgtagcgcttcaattcggctgtcatctcagggttcatagacatctctgcgcaagtacagccttggtgaaaaatcgcaataccccagcggtaacgtcgtgatcgtcggaagtccgtgggtgtgggtctattttccctacatgtgctctgcattcgcccagcatttcccctacatctgatctacatcaacacgcgaatgggacataagctcattattgtacataagcaatcgcgctttccatatagatttttcgcccgtgatgagatcattcgccctccaccacctgtatcctggcaacgatctcattctggacgccgagatcatccggcgatatgaccaaagcggcccacggtacacctgctaccccaccgccgaccgatttgtcgaggcttacaatgcggcgacccacgcgcaaacgctggcacagcgcgcggttcgggaagctaacccgccgctgtcgctctatatccacatccctttttgcaacaccatttgcttttattgcggttgcaacaagattcccactcgcgaccacagtctgagcgccaaatatctgcgttatcttgagcaagaggccgcgcttaccgttgagaagatgtcggggtcgcgtcgcgttgagcagctccacctcggcggcggcacacccacatttctttcatcggaagaaataaccgaactcatgcgcatactatcgcgccacttcgaaatgagatcaggcgaatactccatcgagatcgacccccgtaccacgaacacggcgaagatggaaacgctcgccaacctcgggttcaaccggattagtgttggtgtgcaagattttgatccggacgtacaaaaagcggtgaaccgtattcagccggaggaggagacctttgccgtgattgatactgcgcgtcgcgttgggatgacatcggtcaacatcgatctgatttatggtttgcccaagcaacaagtcagcagcctgagacataccctcgatcgggtgatcgcactcaaccccgacacaatcgcgctttaccgctacgcgcatctgccaaccgtgttcaagccccagcgacggattgaatcagatgacctgcccacggcggaggccatgttgcagctcatgatgcttgccattcgtcgtctcaccgcagcgggctatttgtatatcggcatggatcacttcgccctgcctcacgacagcctcgcagtcgcagcgcgccgaggccgacttcaccgtaacgttcagggttactcaacgcagccggacggcgatctgatcgcgctcgggatttcatcgatcagcaaagttggcccgacttacagccaaaacgtccgtacgctcgacgactactatgaccgcctcgaccgtggcgagctgccaacaatgcgcggcattgaattgaccgccgatgacatgctcagacgcagcgtgattgagtcattgatgtgtcagttcgcgctttcgatcgatgcgatcgaagaggcctatttgatcgacttccatcagtacttctcaccggaactcgaagcgctcggcattttgcgtgagcacgacgtggttgagctcgaccatcattggattacggtgaccccgtgtgggcgtgtcatggtgcgcgccgttgcgatgacgttcgaccgccacctccagcatgatcgggagcggcagcatttctcaaaaattatttgaaatagtcgcgtgacaggagttccaatgggactagaaatagccccggcaacattagtagcgctcgcatccgcatttgcggcggcactcgccacaggctttctgggaagcctgcattgcatcggcatgtgtggtagcacggttgcgatggctatcgccacgccgtcacctggctccatgttgggttcacgtccgagcatttggttgcaactcgacacatccacgacagttgctcggcaatatgccacccacgatgccacccacgatgccactcgatacaacgcccccaacctcgcatcgacgcgagccgccgtcgcgccaccgagcaccatcatgcgtgcgagtattgccttcaatgcaggccgcatcaccagttatgtgattgccggtgcattggtgtccggtatcgcgggctctctcgccgagcgggtcgtcatgaacgagctcgccccaatacgtctcgccctattcatcgtcgggcaatgcttagtcatcgccactggcttttatatcgctggcgtcgtcgcgtttctgacgccgtttgaacgtgccgggcagcgcatctggaatcgcatgcagcccgttatcgggccaagattacggggtcatttccgcgacggccaagcacaaccctttgccttcggtttactctggggctggattccctgtgggctagtctacggaaccttggccacggccatggcaagcggcagcatgcaatacggcgcgctcatcatggcagcgtttggcctaggcacattgcccgcgatgctcgccgccagcgtcgccgcaggcccgatacgtcgtctcgcgcaaattcggggcgcacggattgccgcagggaccgtcatcattggcctcggtatcgcaggtctcgcaaaacttccgcaactagcagactttgccgcgcttgcaaagttgtgcgtgggaaatccttaaacgaatggatatgcgtattggaaaattgtttggtgggagcgcttacgcatatcccggcacgtccacggacgcgagcacagacgcggccacaaacgcgaccacagacgcgacaacggacgcgaccacaaacgcgacaacggacgcgacaacggacgcgacaacggacgcgaccatagacgcgaccataaacgcggcaacggacgcggcaacggacgcggcgatggcgaccacgcgttgcttccactgcggcatcgatgtgcccgctgacactcacttcacacttgagattgaccaaggtatgcgcccgatgtgttgcgtcggttgcctcaatgtcgcgcaaaccatcattcgggctggcttgattgacttttatcgccaccgagtgggctattcagaccagtttgacccacgcgatctgccgccacccgagccactaagcgcgacttcacttccgacgggcttgcccatcggggatcgcaagacacgagcagccgtgtatggacatctcacgctttatctccatggcctgagatgcacagcttgtgtgtggctggcagaacgtgtgctcaattctgtgccgggcgttgaccagattagcgtcaatctaacgactcaagtggcacgcgtcagggtcgatcaacagcaggcgtgcgaagcccaaatcatcgcggcgctaggtcgggttgggctacgcgctcaacccgccgaacacgaggcacgaatgcaggtgcgcaaacaacagcgccgtactcaactactcgaacttggcgtcgccgcactctgcatgatgcaggtcatgatgcttgtggtgccaatctatctagcggactcaagcgacatcaccgacgacggcaaacaactcatgagttgggcggcatggctgctcaccttgccagtgctgcttttctccgctcgccctattttccagaacgcttttcgcaccgtctggcataccttgcaaaacggctatgtcgggatggatgtgcccgttgcgattgcactatttctgacattcgcgtccagcacagtcgcgctcgtcacacaaaccggacagcactactttgatgccatcaccatgtttgtatttctgctgctcggtgcgcgctggatcgaagcatcaattcggctccgtaccagcgaaagcattgaccgactcaccaatgccacgccgctgcgatgcctaaagctggtgaactatccgctgagcgaatccacgctcaacattcgcgcggaacatttggccgtcggcgactttgtcacggtcaggccaggcgagagcgttcccgccgatgcggtcgtcgttcgcggggagagcgaactcaatgagtcgctgatgaccggggaatcgcgtccggtgaagcgtcgcaaaggtgatccactcattggcggaacaatcaacatccattcccccttgattgcgcgcatcacggctgtgggtgacaaaacgttgttgtcacgcctcgggaaaatggttgagtcaggcttactctaccgtccccaattccaaggtgtcgcggagcgcacagcgcaatggcttgcgcccggaacacttatcgccgcggcactcgccgccgttttgtggagccaaattgacgctgcacgcgccgcagaaattgcgattgccgtgctggcggtgacttgtccatgcgcctttgccattgccgcgccaaccgctttagccagtgtactaagtcgcatgaccgacgatgggctattagttgcgcacgggcatttggtagaaaccctcgctgaggcgaccgatgtggtgtttgataaaaccggaacactcacgaccgggcagatggtggtgagcgaatttagctgcacttgcgccaacaaagttgatgtgcttcgcgtcgcagccgcgctcgaacaaggggcgctgcaccctgcggctgccgccatcatcgaatacgccacgcaaatgaatatcggcgatatcccggtggcaacgtcgctcatcaacattcccggtgagggtgttgaaggcagcgtaaatggtcatcgctaccgcttgggtaagcctgcgtttgccacggcatttgaacccactcgtcgcacgctgcgcggaactaccattgccaccgaaatcgtactgacttcaattgaccatcccgcatggcgatgtgccacgttccaactatctgacccgatccgaccagatgcgcgtgcgtgtatcgatcgcttgaagcagtccggcattcgcatccatgtgttgtcgggcgacggcgacgcggtggtgcaatcggttgcctcgcagttaggtatcgcggctgaatacacgcactcgtcccaattacctcaacataaacaagcctacattttggcccttcgccagcgcggtgcaacggtcgtcgcgataggtgatggtgttaatgatgcgccgatgctggcgacggctaatggaagtatcggccttgccgagggtgccacactgacgcgcgtatcggcagatgcagtgcttgctgcgggccgcgatcacctgctcactacgctcgcaaatgcatttgtattggcgcgaaacgcacgtcgcgtgatcaaacaaaatctcggctgggcgctggcctacaacctgattgcggtaccactcgccctagcagggtttgtgaccccacttatcgctgcacttggtatggcagtgagctcgctgattgtcgttctcaacgcgagccgcctcatgcacgcaggcacgtcgaatcgcgtcacacctccgcaaacgaaggcacgatggaatccatctggatattagtgcctctttcgttgctcattgcagcgggtatcggtgccatcttttggtgggccgtatccgacggccagatggatgacctggactcaccaagtcgacgcatattgatcgacgacgacgccgtcccagggcgcggttgtgacgccagttcacaacatgc

SEQ ID NO: 2852 - DNA, 23558 bp, synthetic construct
  misc_feature 1..23558: note = Synthetic
  source 1..23558: mol_type = other DNA
cggattgcgcgatgtcggcgcggcgcagcgagtgggagcgcgcgaccgttgcgcgcccccgatccgtcctgcagccggcgtcgcgccgtgctgcggctcagcgcctggcagccgcctgaccgtacagcgattcggcacgcgcgctcaggcgcgcgacgtcggcttcgtcggcctcgctggagtctttctcgttgagaatcaggtcgccggcttcgttccatcccaccagcgtcgtgacccctttctggacgcgctcgacgacccagggcttgccgcccttgtaggcatagcggaactgcgccgatccggcatcgccgtagtcgacctgctcgcgcgccatgcggatctgcccgctgtcctcgacgaaggcgtcccagcccaccgcgatatcgtcctccaggcgctcgccctggatgcggcgcagcgcgccgatgccggcgacgagcttctcgaactcacccttggccacctctgccggcggcacatcggcggccggctggccgccgcgcaccagcgacacggcgagctcgcccttgggcgcgccctgggtcagcaccggaatcgggcgatcggtgccgtagagaaccagggtttccgcctgcagcatcacctggagaccatagtggtgcgaggcgtcgatctttgccggatcgtagccaagcgcgaccttgagcggcagcgccgccgaggcgggctgggtcgattcggccacgaccaccggaaggttggccgcatcggtgacatccaccaggcgcatgatcagcgacaggcccggcggcagcgttgccagctggtcgatgctcaccttggccgtgatggccggaccggtaaccgcgggcgcggccgccgcaggggcctgcgtcgcggacgccgcgaccggggcattggactggttgttgcaggcgacgagcgccagggctgcggcaacggtcagcggaagaacgatgaacttcatgggatcactcgtggatgggtgtgaacgaggaaggcaggcacgtgggccggcgaaggtacacgcactgtcgctgtcgacggcggcccggaaacgcgctgcgccgggcgtcgctgcgccggcattcccgacgcatcagcctgccggattccagccgctggaggcgcggcaggtcgattagcttagagcaaaaccggcgaaagcgtcatgcggccccggtccaggtgcccggcggcgggccgtgacgtgagggaacgcgccgcgcgcgaagccggtgccgggacacgcctcaaccggctgccgccaggcgcacgcgcgcgaagctgcgcttgccgatctgcagcacgccctcgaagccgggggcaaacacccgtgccgcatcctccagcaccgcgccatccacgcgcacggcgtgctccttgagcttgcggccggcctcggagttgctggcggccaaacccgccagcaccagcagcggcgcgatccgcagtccctcgaccggcactgcgagctcgttgagcggcagggccgagacatcgccctcgccgcgcaccgcggcgttccatccggccacggcctgcgcggcggcgctggcaccgtgaaagcgcgccgccagttcctgcgccaggcgcagtttcaggtcgcgcgggttgagctggccggcctggatgtcggccttcaggcgctgcgcttcggcgatggatatctcgaagctcaaaaggtcgatccagcgccacatcaacgcgtcgtcgatcctcatggtcttggtgacgatgtcgatggccggttcggcgatgccgatgtagttgcccagcgacttgctcatcttctggacgccatcgagcccttccagcagcggcatggtcagcacgacctgcggcggctggccgtgatgctcctgcaggccgcggcccatcagtaggttgaacttctggtcggtgccgcccagctccacatcggccttcagcgccaccgagtcgtagccctggaccagcggatagaggaactcgtggatcgcgatgggctgctgcgccgcatagcgcttggcgaagtcgtcgcgctccagcatccgcgccacggtgtgctggccggccaggcggatcatgtcggccgcgctcatggcaccgaaccattcggagttgaaccgcacctcggtgtgctcgcggtcgagcaccttgaacacctgctcggcgtaggtttcggcgttggccagcacatcctcgcgcgagagcggcttgcgcgtgacgttcttgccgctggggtcgccgatcatcccggtgaagtccccgatcaggaagatcacccgatgcccctggtcctggaactggcgcatcttgttgagcagcacggtgtggcccagatgcaggtcgggcgcggtcgggtcgaagccggccttgacccgcaacgggcgaccggcgcgcagccgcgcctccagctcctcgcgcttgagaatctcgtcggcaccgcggccgatcgtgtccagggcttcctgcagtaccgtcactggcgtatgcctcgcgttgcatcgaacttggaatggcggcgcgcgccaccgagcgggccagcttagaggatcgcgacgcctcgcggtggcgcgccgcggggtggcacgcgcgccgccggagggcaatgttaatgatccgttaaagccgttcaggaaaaaagtctgcgcgaacaagggtttgacgaacagtcttcccgctcgttatcgttttgcccggtttcaacgcaccgcgcgctcgcgccggggacacacgcatgcaggaacacgcggaacaacaccggcacggcgcggaagcaaaaacgaaggctgccggcacgcgcccgcacgagcgctggctcttggccagcacggtggccgccaccgtttcgctcatcgccgccatcggccccggcttcgccagcgccaccgtcgatgaccacctgatccagcgctgggtgcagccgcttccgctgcccgaacccatggtcgagaccgaggccggcgcgcacggcgaggacgccgccacacagggcacccaggtcgccgagtggcgcaccgtggaagtgaagcccggccagacgatgggggcggtcttcgcctcgctgtcgctgcccccttccctgctgcaccgcctgctggaacgccccggcctgcgcgaaccgctgacccgcgtgcgcgccggcgcgcgcttcgatttcctgatcgaatccgacggcagcctgcgcggcctgcgcttcgagcgcgacgaggcgcgcatcgccacggtgacgatcgacggcgacgcgatccacgaggaaatcgcccagcgcgacatccagcaccgggtgaacatggccagcggcgtgatcgaaggctcgctggtcggggcggcggggaaagtcgggatcggctatggcacggtgctggaaatggccaaggtgttcggctacgacatcgacttcacccaggacctgcgcgtcggcgataccttcaacgtggtgtacgaggaagtctatcgcgacggcgagcgcctgcgcagcggcgacatcctcgcggccagcttcatcaaccagggcaagccctaccacgccttccgctacactttcgccgacgggcgcaccgagtacttcgacctcgaaggccggccgatgaagaagagcttcctgcgcatcccggtcgagttcacccgcatcagttcgcagttcaccaccgcgcgcaggcacccggtgctgggcacgatgcgcgcccacaagggcgtggactacgccgcgcgcaccggcaccccgatcatggctgccggcgaaggccggatcagctttgccggctggcagaacggctatgggcgcacagtgatcgtcgaccacggccgcggctacaccacgctgtacggccacatgtcccggctgggcgggtatgccaagggcgcgcgggtgcgccagggcgacaccatcggctacgtcggtgccagcggcctggccaccggcccgcacctgcactacgagttccgcatcaacggtgcccaccgcgatccgctcaaggtgaccctgcccaagcccgagccgctgccggcctccgagctggggcgcttccaggagcaaacccgcccgctgcttgccagactcgacctgctcggcggcaagcggcactatgccgcgcgctgaggatcccggcctcggcgaggcgctttatctcggcctgatgtccggcaccagtgtggatggcgtcgatgccgcactggtgcgtttttcccaggacgacacgcccgcgctggcggcggcgcgcaccttcgcgtgggaaccggggctgcgcgaggaaattctggcgctgtcgcaggcggcggtgacggtcgaaccggaccggctggcgcggctcgaccaccgcatcggtgccgccttcgcgcgcgccgccggccggctgctggacgaggccggcgtgcgcgccgcgcaggttgccgccatcggctcgcacggccagaccctgcgccatgcgccttcgggcgatgcgcctttcacctggcaattgggcgatcccagcctcatcgtcgagcgcaccggcatcaccacggtcgccgatttccggcgccgcgacgtggctgccggcggccagggcgcgccgctgatgccggccgtgcaccgcgccctgttcgccgatccgggggaagaccgcgcggtgctgaacctgggcggcatcgccaacctcacgctgctgcccgccaatggcgacgtgcgcggcttcgacaccggtccggccaacggcctgatggacgcctggatccttgaacaacgcggtgtgccctgcgatctcgacggcgcgttcgccgcgtgcgggcaggtcgacgagcgcctcctgtccgatctgctcgccgacccctggttcgcgctcgccccgcccaagagcacggggcgggaccgattccaccttggctggctgcgcgcgcgcctgggcgggcgggcgctcgcggccgaggacgtgcaggcaacgctgctggaactgaccgcgcgcagcgtcgcggaggcgctcgggcgcacccagccgcgcacgcggcgggttctggcctgcggcggcggggtgcacaacggtgcgctgatgcgccgcatcgccgcactcctgcccgacgccgggatctccagcaccgcggtgctcggcgtcgatccggatttcgtcgaggccatcggcttcgcgtggctggcgcggcagacgctgtccgggctgcccggcagtctgccctcggccaccggcgcgcgcggcgcgcgcgtgctgggtgcgatccatccggcctgaggagaggcagcgtcggccacgtagggcctacggtggcggcgcgcccggggttcgtaggtcggggctacgcccccgacggggtgttcgacgcccggcagctgttcgaagcccggcagcgtcggccacgtagggccgacctacggtagtggtgcgccgctcgcacggaacgatcgggcgcggcgcaggctcagtaaggcgtgtcgtcgggcagctgctgcatggctcgcatggcttcggccagcgcccgcgattcttcgtcttcgaaggctccagccaggcgcgcgatatccccgggctcgggcacttccggctgctccatccccagcgcctccttgatcaggcgcaggatcacgtcattgatcggccagccgcgttcacgcgcgatgcgcttgatgcgatcggcgacctgcggttcgatgtcacggacgagaaagtcgggcatgtgtgatcgttagtgcggccggaatcacgacgcgaccccctgttgccaaacgcacgcggcgcagccgggaacatagcacgaccgcgcgcggctgcgcagtcggctgtagcaaaggtttgccttccgttcgatcagtgccccggcgggttggcctgcggcacgcgcggacgcagccagaaaaacagcagcagcgccggaatcgccagcgccgcggtcagcacgaaatagcccgcgtagcctgcgcccagctccacgatgcggccggagaagaatccgagcaccttgcccggcagcatgatgagcgaagagaacagcgcgtactgggtggcggtgtagcgcgtgttcaccagcgccgacatgtaggccaccgccaccgtgccgaggaagccctgcgccaggttctcgccggagatgaccagcgtcagcaatgcgatatcgccgcccgcgccgatcaggatcaggtacaggagattgctcgccgcccccagcgcgatcgccgccagcagcggccacgacacgccccagcgcgccaccgcgaggccgccgaggaaggtgccggcgatgccgacccagatgccgtagaccttggtcaccgccgcgatctgggtcttgctgaagccctggtcgaggtagaacggcccgatgatgccgccgaccagcgcctggtcggagatcttcatgccgaggatgaacagcaggatcgccagcgcgaccctgccgccgaagcggcagaagaaatccgcgaacggctccaccacgccctcgcgcatcgccgccatccagccctgcgcgcgcgtgcgcagcacctgcggctccggcgcgcgcaggcacgccgcgatcgggaccagcatcagcagcgccatcgcgcgatacaccgtcggccaggccacatgatcggccagcaccagcgccagtgcgccgctggcgatcagcgcgatgcggtagcccagcgagtaggtcgccaccagcgcgccctgcgcctcgaccggcgcgatctcgacgcggtaggcatccacggcgatatccagcgtcgcgcccagaaaggccaccgccacggtcatgccgacgaacagcgacagccgctccggggtgatttccgccatcgccagcaggccgatgccaatggctcccatcgccagcagcagccagccgcgccgctgcccgaggcgaccgagcagcggcagccgccagcgatccaccagcggtgcccacaggaacttgaacgaatacgccagcccggcgctggcgatcatcgtgatctcgcgcagctcgatgccgccctcgcgcagccagtacgccagggtgacgccgaccagcaggaagggcagccccgaggcgaagccgaagaagaacatcgtccacgccgagggcgtggcgaatgcggccagcgccgtgcgccagccggaggcgggctgcgctgccgcctcgctcatcgggtgtaatccaccaggtaaggcgcatgatcggaaaagcgcggctcgcgccagacctcgcaggcgcgcaggcgctcgcgcaggccgggcgtggcgagctggtaatcgatgcgccagccgacgttgttggcgcgcgccgcgccgcggttggaccaccaggtgtactcgtccgtggcctcgggcttcagcgcgcggaaggtatcgatccagccgctctccggctgcggcgacccgtcgccgcaggcgtcggcgatcatgccgttgagccacgcgcgctcgggcggaaggcagccggagttcttctggttgctggtccagttcctgatgtcgccgcgcgcccgcacgatgttccagtcgccgcacagcacgtagtcgcgcccgctcgcgagccactcgtccaggatcggccgcagccacgccatcacctcgaacttgaaaccctggcgcgcctcgcccgaggaaccggaaggaatgtagaacgacaccacgctcaggtttccgaaacgcgcctcgatgtagcgcccctcgtcgtcgaacggcgcccagcccagcgcggtgcggatctcgtccggctcgcgccggctgtagatcgccacgccgctgtagcccttcttggtgatcgcgtcgcggaatgcgacgtggtagccggccgggcggaacgcggcgtcagccagctggtgttcctgcgccttggtttcctgcatgcacagaacgtccacgtcctgcgcggcaaaccaggggaagaaccccttgcttgccgccgagcgcacgccgttggcgttgaaagtcatgatccgcatcgaagttcccgcctccacacgccgggccggaggatgatagccgctcgcggccggccggccgttccggtgccggcacgcgggcgcggcggcagcccataccgcacggcatggtgcagcgcgacacgcgccttgaacattggagtggtaatgtgcgcccggcgcgcgccggggggccgcgcgccttgctgtcaacttccattcgatggggaaaattcgatgatccgtactcgcttgctcgcaagcctggcgcttgcgcttggcttctcctcgctggcccttgcggccggacccggcgcggatgcgccattcgcctcgccgggatccgccgccgaagaagccgcgctcgcgtcccgcctggcgtcggaagaagtgcagcttcgcgccatccgcgccgaactgcccgccctgttcgccgaggcctacgccagctacccgcagattcctgccggcacgctggaagccatcgcctactcgcagagccgctggatgccgctggccaagggcggtgaaaacgacggccaccaccacatgcccaccgcgcacggcgtcatgggcctgtatgccggtgaaggcttcaccaaccagatcaagcaggcccaggccctgctcggggtttccgcccacgccattgccaccgacagccgctggaacatcctcgccgccgccgcgctgctggcgcgcgagatcgacgccgacgggctttccaagcgcggcagcgcagcggatcccgaggcgatcgcgcccgcgctggcgcgctacgccggcctgtcgccgatgaaggaaaggaagagcgcgatcgacgaatacgcgcgccagagctttgccttcgacgtgctgttggcgatggaccgcggcatcaacgacaagggcatggtagtgcccgagcgcgccgtcgagtgggaaaaggcgttcccgatggatgcgctggtcaagctgcgcgcaccgttcgtgcgcctcgacgcgacccgcgacagcatcgacgtcggcggctatgccatcgatccgatcagcgagaccctggtgcgcaccgacggcagcgccgccgccaagagcaccgactacggcccggcgatctggaacgcggcctactcgggcaactacacggcgtcgcgttcgcaggcgatcagcgcggtcaccatccacaccacgcagggcagctacgccggcgcgatttcctggttcaagaacgcctccgccaaggtcagcgcgcactacgtgatccgcagctccgacggccaggtcacccagatggtgcgcgatgcgcacaccgcctggcacgtcggcagccagaacggctacaccctgggcatcgagcacgaaggctacgtcagcaacagctcctggtacaccaccgccatgtacaacgcctcggccgcgctggtccggcacatgtgcgccaagtacagcgcgatcagctgcgccagcgcctacaagggtgccgcgagcagcggcatcaacgtgctcgcaacctcggtgaaggtgaagggccaccagcactacgccggccagacccacaccgacccgggcatctactggaactgggccaactactacaccctgctcaaccccggctccggcgggcccaccggcgtggtcaagatgctcgacaccttcgaatccagcgtcggccacttcaccaactcgcccgcctattcgggaagcaccaccggcatttcgacggcatcgaccgcgctgcgcgactgcgcgatgcgcaagaacggcaattgctcgctgcaggtcaaactggtggacaacaccgcaacttcggccaactgggcggtgcgcctgctctcgggcggcggcacgccttcggccaacacctcgctgagccgcgccaacggcaaggtcggcttctgggtgtattcgggcggcaccggcctgtcggcggcccttggcatcgacgacagcgacggcaccgagcgctccatcacgcgagccattcccgccaacacctggacctacctggagtggagcctcgccgacgccaaccagtggaacgcctgggtcggcggcaacggcgccatcaccgccggcaccgtgaccctggacgcgatctggctgttccgcgaccagaccgcctacaacgtcttcgtctacctcgacgacgtgcagatcaagaactgatcgcaggtggcaagaaggccgcgccgcttcggcggcgcggcttttttttgtcaattattcggcgcacacgaaaaacccgcccaagttgccttgagcgggtttggattcgaccgtacccttgcgagtacgtcttattgtagcaacggctctcaccccggaaagctacagtgggcaaatctactacagggagtcgccatgacacaagccgcctacaatgcgcctcgtgcgcccatcgactacatcctaggcttagacattggcgtcgcctctgtgggctggtgcctgctcggccacaacaggatcatcgacctgggcgtgcgcgccttcgacaaggccgagactcctgacaagggcgagtcgctcaacaaaacccgacgcgacgcacggctgctgcgacgccgtctgcatcgtcgcgcatggcgcctcacgaagctggcacgactcctgaagcgcgaaggactgatcgacagcatcgacgtgctcaagcgccctccaaacaagggattcaagacgcccaacctgtggcgattgcgcgtggaagccctcgaccgcccgttgtccggtgaagaatgggcgcgggtcctgtaccacctgtgcaagcatcgcggctttcactggtacagcaaagccgaacaggccaaaggcgaaggcgaatccggtgcgagtggtggcagcgtcaagcaaggcttgtcgcagaacgccgcgaggatgaaggacaagaactatcgcaccgctgccgagatggtgttgacggaattccccaacgcacagcgcaacaagcagagccactacgacaaggcactgtcccgagtgttgctcgatgaggagctcggcaagctgtttgtcgcgcagcgcgaacacggcaacccattcgcgcgtgcagaacttgagcgccacattcgcggaccgggcgaccagcgcaacggccttttctggaagcaggagcccgcactgaccggatcaagactgctgaacatgctggggcgctgcattttcgagacgcaggagtaccgcgcgcccaaggccagcttcagcgccgaacgccatgtctggctcacacgcttggtcaatctgcggatcgtcgttgacggcattgcccggcctctgaatgatgaggagcgccagttcgccctgttgttaccctatcggcagtctcggtccgccacgaagttcagttacgccgatctgcgcaagaaactgaccggggaattcccccacctcgagggcttccggttcctggggctgccgggcgcaaggagaaagaagagcggcgaaatcagtgatccggaaagtgaggcgctggtccgtatccctgcatggcaggagttgcgcaagaccctggaaggtgccggcctgacaacagaatggaagcaactggcatccgacgcacttgaaggcagacccgagatacttgacggcatcacctacgtgctgagtgtgtacaaggacgacgatgaagcgtgcgcagagctgactaagctgaatttgccgcactctgagaagatgatcgaagccctgctgccgatcagattcgacaagttcagcaacctgtcgctgaaggcgctgcaccggatcatcccgctgatggaacaaggtctacgctacgacgaagcggtagcgcaaattcccgaatacggccatcacagccagatagtacggtcgcccaaaaaatcacactacctcccatcgttctatgaatacggatcaggaagcgccaagctcaaggacgacccgagtctgccccgcaacccggtcgtgcttcgcgcactgaatcaggctcgcaaagtggtaaatgcgatcatcgcggaatacggttcgcccgcagaagttcatgtcgagatggcccgggatctgtcacgcccgctcgatgagcggcgcgacatcgagaggcagcagcaggagtatcgcgatcgaaacgacgcggcacgcctgaggttcacggaactgttccagagaatccccaacggccgggacttcgagaagtggctcctctatggcgagcagcagggaaagtgcgcctactgtctcagcccactggcaaacggcagcgacgcatcttccatattcaccgacaaccgcacgcaagtcgatcatgtgctgccgtattcccggagtttcgacgacagcaggaacaacaaggtcctggtgcatacaaaatgcaatcaggagaaaggcaacagaaccccgtatgagcttctggatgggcaaagcgacagcgcgcagtggcacaacttcgtggcatgggtggggggcaataaaagctatcgcctcgccaagcgcaatcgactgctgcgcaaaaattatgggcgcgaagaagcccaaggcttcaaggatcgcaatctcaacgacacccgctatatctgcaagttcttcaagcagtacgtcgaggacaacctggccttgtccagcgagagcaagcgttgcgtcgttctaagtggccaactgacagccctgcttcgcagacgttggggcttgaccaaatcccgcgactccagcgaccgccatcacgcgcttgacgccgccgtggtcgccgcgtgcagccatgcgatggtcaaacgcatgtccgactatgcgcgacgcaaggagttggagcacatcgaacagggcttcgtggatgtggaaaccggcgaagtggtggatgtcaatgcgctgcgccgactggaggcgcattttccacgcccttgggatggcttcgaggatgagctttgcctgcgtatcgggattgaccgcagcactggccgggctctggaagacacgtcggtcgaaacgctccatgagggtttgcgtcggttccgcgacacggacaaccagccacgctatttggacgaggtgctgaatcacgttcgcccactgttcgtttcacgggccccgaagcgtcgaaaaggtggggcattacacgaggcaatgatccgatcaataaagaacgccggagtcgagcagagctatataaaaaccccattatcgaaactgacgatttctaagcttgaaaaaatcgtgggcgcgcacgacggtcgcaatgagaagctcattgccttgcttcgcgaacggctcgagagacacggggatgatggcagcaaagcgtttaaggagcccgtctacaaaccttcatcgaaccccgaaaaggcaccacttgtgcgcaccgtgaaggtgcttgatacgcagaagagtggcgtgaaaattcgtggcggtgttgcggaacttggggaaatgactcacgtagacgtctacgccatgcatgatagctattacatccggcctgcctatctcagcaatgaagaagaccacatccaacaaaacgtcattccaaatggtgcagagtttattttctcattgaccaagaacaatctggtatccatcgacataggaaatcatgtctatcaaggctacttcgtcatgtacgaaagcgatggccgtatgacgttgcgtggacacgaccagccacagcccgacaagatgtactttagaaagatggtttcaagggcaaaagcaatcaacaagcatcatgttgacgtactcggcaatgtttatccgccactgccaaggcaacatcgtgggctggcgtagcgttatcatcagcaaacccgcgaagctgtcggtgaagaaccgacagctgctgctgcagcaagatgaaggaaatctcgccgccttgccattggaggatttgagcacggttgttctggatacgccgcaggtgctgctgaccggcgcggtgctgtcggagctagcgacgcatggcgtggcgcttgtctgttgcgatgccgaacaccacccgaacggcgcgctgctgcccttccttgcgcacagccgcaccctgaatgtcatgcaaaaacagttggcgctttccgtgccgcagaagaagcgcgtctggcagacgatagtgcggcagaaactgcgcaatcaaagctcatgcctcgagcgctaccgtccgggcaagggaaagcaccttgcaaaccttgcgacaaaggtgcgttccggcgacccggacaacagggaagccagcgccgcgcagtactatttttccgagttgtttggagctggattcacgcgcacccggcaagggtggtacaattcggcactgaactatggctacgccatcttgcgcgctgccatagcgcgcgggctggtggcgcatggttttcttccgccgttcggcttgcagcacaagagccagctcaacagcttcaatctggcagacgatctgattgaagtgctgcgcccggttgtggataactgggtcgttgcacaggccgacagggagtcgccccagttgctaaaggcagacaaagccggcctggtgcaactgctgtatgccgatgtggccatgcggcgggggaacatgaacgtactgtccgccattgaatacatggtggaaggattggggcgctactgcgattctgccagtctggaggagctggattggccgaccttgctggagtgaatcggatgcgattcgatgagccaggacacccgacgattcatgcgcttgatggttttcttcgatttgcccacggtgacgaaggcggacaagcgcgcctacgtcgtgtttcgacgctttttgctgcaagatggatacgacatgctgcagtggtcggtctacgcccgtatcgtcaatggcatggacgacattaccaagcaccagaagcgcctgtcggccaacttgcccagaaagggctcggtgcgctgcatgaaggtcagcgagaagcagtacgcgggcatggagatcctggtcggcacgcagtctgtccaggaggaaagcatcggaagccgccagctcttgctgttctgatggctcctttttcagccacgaaatcctcccaagcccaaggaatacatgggcttgggaggctggtattgtagctttccggggtgagagagggagctacaacccgctgatgtgcgggtcagtgataccgcaattgtagctttccggggtgagagagggagctacaacagcgcgctggtcagccgatggaaccgttcgattgtagctttccggggtgagagagggagctacaaccgagcatcaaggcaagcaatacgacgccagattgtagctttccggggtgagagagggagctacaacgtcgcccgtgttcgtgccggacaagttggaattgtagctttccggggtgagagagggagctacaaccaagccttctacgccagccaggggaacgagattgtagctttccggggtgagagagggagctacaacaaccgcctcgcgctgccagaagatgcagacattgtagctttccggggtgagagagggagctacaacaccgaatccggccccatcgtcatcggcgagattgtagctttccggggtgagagagggagctacaacctgtgcgcgtgcgggatgttgaggtgcaagattgtagctttccggggtgagagagggagctacaacggcaatccaggcgatgcagtacgcaagtcaattgtagctttccggggtgagagagggagctacaaccctacatggagcgcggcggcgaaggccgagattgtagctttccggggtgagagagggagctacaacgttccagcctccgtcatcaagcagggccggattgtagctttccggggtgagagagggagctacaactgtcgctcaagcgcgagcgcaatctatcgcattgtagctttccggggtgagagagggagctacaacagccagaccgatatgcgctcccggcgggggattgtagctttccggggtgagagagggagctacaacgacgctggccgggagcaggcaagggcagcgattgtagctttccggggtgagagagggagctacaacgtctgggacaaagccattgcggcgcgtcttattgtagctttccggggtgagagagggagctacaacggcgtaggtgtgcgggatgacgccctcaaaattgtagctttccggggtgagagagggagctacaacctcggtgtcgtcacggtatagcggcagggtaatgattcgtgaggcaggggtataacgaaaacctacgttgtaaggtgcaaaactacgggtgggaggcgggggatttatttatggtccttcgagggttcccaacaaagtacagcgccggatttctccggcgctgtttttcgaggcggatgacgccgggcgcttacgccacggcgcgcttcttctcctcgtagaactgctcctcctcggtggagccggtcagcgcggtgacgctggacgcgccgccctggatcacggtggtgacgtcgtcgaagtagccggcgcccacttcctgctggtgactgacgaaggtgtagcccttctcgcgcgcggcgaattcgggctcctgcacctgctcgacgtagtggcgcataccctcgccgcgggcgtagtcgtgcgcgaacttgaagctgttgaaccagttgatgtggatgccggccagggtgatgaactggaacttgtagcccagcgcggacagctcgtcctggaagcgcgcgatggtggcatcgtcgaggttcttcttccagttgaagctgggcgagcagttgtaggccaggagcttgcctgggttcctggccagcacggcctgggcgaactcgcgggcaaagcccagatccggggttccggtctcgcaccacaccagatcggcgtagggcgcataggccacgccgcggctgatcgactgctccagaccgttcttcacccggtagaagccctcggcggtgcgctcgccggtgaggaagggctggtcgttggcgtcgtggttggaggtcagcaggttggcggcctcggcgtcggtgcgggcgaggatcagcgtcggcacgccgagcacgtcggaggccagacgcgcggcgaccagcttctggatggcctcctgcgtcggcaccagcaccttgccgcccatgtggccgcacttcttcaccgcggcgagctggtcctcgaagtgcacgcccgcggcgccggccacgatcatgttcttcatcagctcataggcgttgagcacgccgccgaagccggcctcggcgtcggccacgatgggcaggaagaagtcgatcgcgtcggcctccttcatcttgccgtcgcagatcgccttccactggatctcgtcggcgcgctggaaggtgttgttgatgcggcggaccatggtcggcaccgagtcgtaggcgtacagcgactggtccggatacatggtttccgaggtgttgccgtcggccgccacctgccagcccgagaggtacaccgcctccagtccggccttggcctgctgcatcgcctgaccggccgagatcgcgccgaaggcgttgacgtagcccttcttcgaactgccgttgaccagcgtccagagcttttccgcaccgcgcctggccagggtgtgctcgggctgcaggctgccgcgcaggcgcaccacgtcggcggcaccgtagggccgctggaccaggctccagcgcgggtcggtcttccactggttctcgagctcggtgatctgctgctggcgggtggtcatggcttttccttcggaatgggaatgggaatggggatggggaatggaaaaagcgggaaggtggcggggtgcggtcaggggtgggatggcgtcttgctctacgattccctattccccactcccgattcccggctacaaacgctcgtacgcgggcagggtgaggaaatcggccagttcgtcggcgcgggtgagttcggccagcagtgccacggcctcggggatcttcgactggccgggaaggccgctttcgggcaggcgctggggtacgcgggcgagcacggcgtcgaaccagccaaaatcgatgggggcaccgtcttcgaagacctgatcgcccaggtgcagccactgccagagctgggcgcggctgatctcggcggtggcggcgtcctccatcaggtgatggatcggcacgcagcccaggccgtcgagccaggcggcgaggtagcgcacgcagacatcgacgttggcctggaagccctcgcgggtgatgccgccgccgcagggggcgatcagcgcatcgcgcgaggcactggcgtcctcacgcgcgaccgcgaggtggttgggtccgggcatgtgctggtcgaacaccgcctgcgccacgggaatcagcgccggatgcgcgacccaggtgccatcgtgaccgctgcgggcctcgcgctccttgtcggcgcgcacgcgcgccagcgccttctcgttggcctccggatcgccgctgatcgggatctgcgccgccatgccgcccatcgcgaacgcgccgcggcggtggcaggtgcggatcaggagctgggaataggcgctcaggaagcccgagcccatggtgacctgcgagcggtccggcagcacccggtcggggtgtcggcggaaggtcttgatgtaggaaaagatgtagtcccagcgcccgcagttgagcccgacgatgcgcccgcgcagggcgtgcaggatttcgtccatctcgaacacggcgggcagcgtctcgatcagcaccgtgaccttcatcgcgccaatgggcagcccgaggcgcacttccaggaaggccagcacctcgtcccacagcgcggcctcctccatcgcctccagcttgggcaggtagaagtacggcccgcggtcgcgcgcggcgagcgccgcggcgttgtgcagggcgaacagcgccagatcgaagaggccgcccgagacgcgatgaccatccaccagcatgtgcttttccgtgaggtgccagccgcgcgggcgcaccatcaacaccgtggccgcgtccggcttgagcgcatagtgcctgccgttctccgcggtgaagctgatggagccggccaccgcatcgcgcaggttcacctgcccctcgacgaggttggcccaggtcgggctggtggaatcctcgaaatcggccatgaacacccgcgcgccggaattgagggcgttgatgatcatcttgcggtcgaccggcccggtgatttccacgcggcggtcctgcagggcggcgggaatcggtgccacgcgccagtccgattcgcggatggagcgggtgtcggcgcggaagtcgggcagttcgccggcgtcgatgcgggcctggcgcaggaggcgcgccgccagcagcgcctggcgctgcggctcgaagcggcggtgcaggtcggcgagcagctcgcgggcggccggcgtcaggatctgctcctggcccggcgcggccggcgccggaaactcgatatcgcggtgattggacgcatcggccatggcggcctccggagcggtgggacgggttcacggtaggcagtgaagattgactttgccaagacaaatgtttcaatgcttggcattaacattcccaatacgcgaattgagcatctgctcgaatcatggccaagacctctccgcgtttctactataaaggcagtcgactcaagcagttgcgagcgttttgccacgccgcgcgactgggatcggtcacccgcgcggccgaagcgctgttcctcagccagccggccgtgagcctgcagctgggcgcgctggagaacgagctgggcgtcaagctgttcgaccgccagggccgacgcctcaacctcacccacgagggcgaggagctctacgagctggcgcggccgctgatggacgggctcgactcgctggaaagcgacttccgcgaccgcctgcgcggtctttccgccggcgagctcaacatcgccgccggcagctcgaccatcctctacttcctgccgcccttcgtggaggcgttccgcgacgcctatcccgaagtgcagctcaagctgcacaacgtcaccggcaaggacggcctggcgctgatccgctccgacgaggtggatctggccgtcggctcgatgctggacgtgcccaccgacctcgactacgccccggtgcgcagcttcgaccccatgctgatcaccccgcacgatcacccgctggccgcgcgccatccgctcaccctggaagatctttcaccctacggcctgatcctgccgcccagccgcctgaccacctatcgcctcgtggacctggtattccagcagcgccgcgtaccctacaccgtggcgctggaagtgggcggctgggaaatcatcaagcagtacgtcgcgatgggcctgggcatttccatcgtcaccggcatctgcatcaccgacgccgaccacgagcgcctggcggtgcgcaacctgcgcgcctatttcccgccgcgcagctacggcgtggtgatccgcaagggcaaatacctctcgccccaggcgcgcgccttcgtcgatctggtgaaaccctcgctcttcggccgccgcgacggattcgacaccgggcattcggagcgttgagaccgcgaatacgccaacgacgccgccggcaaccgcagcagccagaccgacgcgcgcggcatcacgacgtcctacagccacggtgccctgaaccggctgaccgcgatggcgcacccggacagcgccctcagcgcgcctccagcaccacgatctccacgcggcggttgcgggcgcggccttcggcgctggcgttgtcggcgaccgggcggtccttgcccaggcccacggcggtcaggcgggtggcgtccacgccgtcctggacgagggcgtcgcgcaccgcttcggcgcgcttttgcgacagcacctggttgaggttggcaccgccctggctgtcggtatggccttcgatgagcacgtccttgtcgggaaagcggccgacgaactcgaccacgcgctgcaggttggcgcgggcttcgggcttgaggcgcgactggccgctggcaaaggcttcgccagagagcgtcatgacctggccgcgcgcctcgctggtggcggtcatggtctgcagctgaagccgcaggctgtcggcggcggcaaacgcgagatcggcctcgcggcgcgccagcgcggcctcctgcgactgggcttcggccaggcgcttggcctgttcggcctcggcgctggacagctcgctcagcgcgatggcgctggcggccgcttcctgcgcgcgctcggcctcttcggcgcgcgccaggctctgcaggcgcagtttttcggcttccaggcgcgcggcctcggcgtcgcggcggctggcttccagcaggatctggtcgcgctcgcgctcgagttgggcgatctgctgctgccaggcttccgcttcggctgcggcgcgggcgatgtccaggcgccgctcggccaccagcagcgcgtccgaccgttcgcgccgggaggcggtggacagcgcctcgatggcctgctgcgcgcgcaggcgctcggccggtgccagggtgcccagggcgggctcctcatcgagcgagcgaagctgcgcgcgcagccgttccatttccggatcgaccttctgcgccagcgccggcgcgcacaggcacagcgccaggaccgcgctcatcagcaggcgattcatggcgtgcctccctgacccagcagctcgcgccgcaggcgcgcgttctcctcgttgcgtcgccgcacttcctcgcgcccggtcgcggcgcgcgagcggtactgcgcgagctgggcctccagcagggcgtgtgaggccaggcggtcggcatcggcgtacttgcgcccgccgaaggcggcctcggcgtcgcccagacgctgctgcgcgcgcgccagttccatcggggcgtagtcccgcgcgcccagcgcgctggcctgttcgatacccgtctgcgcggcctccagcgccgtgcgcggcggcggagcggcggcgcagcctgcgagaagcagtgcgccaatcagtgcggcgaatcgaagtctggcggtgtggggtgtcatatcatgcaaccgtcaagggggcatcgcacatcggcccggatgcatggcattctggcgtcccgtgggctctgcccgcaatcgccaaccgtgccggcaccgcccgacctgccggaaagacagaccaaggaccacgcatggacatcggctatttcctcaagctcatgaccgagaagaacgcctcggacatgttcctgacgaccggcgcgccggtgaacatcaaggtggaaggcaggctttatccgctcggcaacacgggccttcccgccggcatggtgaagaagatcgcctactcgctgatggacgagggccaggtgccgcagttcgagcgcgatctggagctgaacatggcgatcgcggtcaaggacgccgggcgcttccgcgtcaacgtgttcaagcagcgcggcgaggtcggcatggtgatccgcgcgatcaagagcgagatcccgacgatcgagcagctcaagctgccgcaggtgctgcaggacatcatcatggagccgcgcggcctggtcctggtggtcggctccaccggctcgggcaagtccacctcgctcgcggcgatgatcgaccaccgcaacaccaacaccaccggccacatcctgacggtggaggatccgatcgagttcctgcaccgccacaagaagtcgatcgtcaaccagcgcgaggtcgggctggacacccacggcttccacaatgcgctcaagaacgcgatgcgcgaggcgccggacgtgatcctgatcggcgaaatcctcgatcaggtgacgatggaggcggccatcgccttcgccgagaccggccacctgtgcctggccacgctgcactccaacaacgccgaccagaccctggagcgcatcctcaacttcttccccgaggccgcgcacaagaacatcctgatgaacctctcgctcaacctgaaggcagtcgtcagccagcgcctggtggtgggcatggatggaaagcgcatgccggcggcggagatcctgatcaatacgccgctgatccgcgacatcatccgtcgcggccagatccacgagatcaaggaagcgatggagcgttcgctgcaggaaggcatgcagaccttcgaccaggacctcttcgccatgtacaaggacggacggatcgagctggaggaggcgctgcgcaaggccgactcgcgcgatgggctcgccctcaagatccgcctgtcggaaggtgccagcggcgagcacgacccctacgcggacgcgttcaacgcctgagcggcggcgcggcggatgcctcagggcgcgtccggctgcgcctcgggtgcggcgtcctgaaatgcccccagcgccatgcagttggcctcgatgcgcaacagcgtcggccaggccgtcaggtccatgccgtagcggcgcgcgttgtagagctgcggaacgaggcagcagtcggccatggtcggggcttcgccctcgcagaagtcgccggtggaggggtgatcggccacctgcgcctccaggccctccagaccgagcgccatccagtgctgcatccaggccaggcgttgcgcctcgttcgcgcccagctcgcgctccagataccgggtcacgcgcaggttgttgagcggatggatgtcgcaggccaccaccatggccagcgcacgcacccgcgcccggtcgcgcgataccgccggcagcagcggcggggcgggatgcacttcgtcgaggtattcgatgatggccatcgactgccggatcaggcgcgcgccgtggcgcagcaccggcacctgcgcctgcgggctgatctcgtggaactgcggtcgatgctgctcgccgccgtcgcgcgccaggtgcaccggcacctgctcgtactccaggc

SEQ ID NO: 2853 - DNA, 23534 bp, synthetic construct
  misc_feature 1..23534: note = Synthetic
  source 1..23534: mol_type = other DNA
caaagaaacaccgccggccagtacttgcgatgtatagccgattgccaacagctgcagcaggcctatacgctttaattgtgtgttcaagatgactccccaaaaactttataaaatctatatcatttaaatagtataacaacgccaaaatttaccttaaaaaacacgcaaatactaacgtatttttacaataaatcaggcatttagtagcatatttgtaattttcgctagtattccagcgcgtccacatcaagcacccagcgtacttttgcttgcagcggatgtgttcttacccaatcgaccgccaccaaaagcagctgctgcaaggcgccgcgatgcacagactgcaacatcacatagccgcgttccattttgtttagcctggcaatgccagggcgcaccgggtcatacaccaacggctgctcgggcaaggttgcagcgtgtgccgaaacatactctctggccgcctggctaaagtcgctcaaaaactgattcaccagcgcgtaatcagccgcctcagccttcattacggcgatataggtcgccggcggaaactgcatggccatgcgttcttgcaacaaatcattagcaaaatcggcgtagttttgctcgcgcaaagcggcaaataaagcatgctgcggaaaagcggtttgtaccagcacctcccctggcttgtctccgcgaccggcgcgaccagccacctgcatcagctgggcaaacaggcgctcgctggcacgataatccgggctatacagcgcaccatcgacatccagcacgccaactagcgtcaaattggcaaagtcatggcctttggccagcatttgcgtaccaattaaaatatcaatttgaccggcatgtaccgcggacaacagctcagttaaggcatccttggcctgaatggtgtctctatccacccgcgcaacgcgcgcttgcggaaaaagctgttgcatactttcttcaacgcgctgtgtggcctggccaatcgggcgcaaatcagggttaccgcaactagggcattgcacaggaatcggctgctcatcgccacaatgatggcaacgcaagacacgctggcgcaagtgcaacacagctttggccgagcagcggcggcagtctgccagccactggcaagcagagcaatgcagtaccggcgcgtaacctcgacgattaataaatagcaagctctgctcacctcgctgcaaacgcagctcaatcgcctgctttaactgcggcgtgagcccggcttctggcggactgtgcgtagtatctatgcaaaaaatgcggggtaattttgcctgggcagccgcgcgtttggttaaggtcagcaatcggtagcttggctttttggcagccgacgcgccttgcccctggtcacccgtggcgttataccagctttccagcgaaggcgttgcactgcccagcaccaccggaatcccgcattgcttggcacgcaccagcgccacatcccgcgcatggtaacgcataccatcttgctgcttgtaagaggtgtcatgctcctcatcgagaatcatcagtttgagatgcggcatgggcgtaaaaacactcaaccgggtgccgatgacgatgcgcgccaccccagactgggccgcctgccagttttgcaagcgctcactctcgcttaaatggctatgcaacgtcaccaacggaaactcactcaggcgacgacgaaagcggctttcaagctgcggggtaaggttaatttccggcaccatgatcagtgcttgcgcgtgcggctccgcgagcacggtttgcagcaagcgaatatacacctcagttttgccggagcctgtcaccccaaataacaaccagggctgaaaacgattcagcccttttaaaatggcgtttacggcatcggcttgctcattattgagtgtcggcgcctggtctgaggcgggtagagaagggcgggtcgcaatcacctcgcgcctggtcacaaacccaccatcaagcaatggctgcatcgctttgcgccaagtggcagacacttcacccagcactgcttcactgcattcatcatactgctgcaaacaggcaatcagcctggtgagcacttgttgccgtttgccgacaaagtcttccgggatcgcctgcgccaagtggtatacccacattgtgcgcgtcaccgcgggtttaatctggcgcaaacgtagcggcaagctagccaacacggtttgcccaaaagggtagtgataatagtcggcgcaaaatcgcagcaactttaaagtggccgcatcaaacggcacatcgtcaaacacttgcagcacggctttgagcttatgctgcggcacatccgtttcagtcagcagcgccatcacaatcccaaccaattgccgcccggcaaaaggcaccaccacgcgattgcctacacaaataggcaggccagggttcaaataatcaaaccagcgatccaatggcacatccagcaccacgcgcacaatgctggcaggagagatggcctcaaggtcggtggcggttgaacacatgggtgaaaatggctaattaggttaaaatggcggtttgattattcagcgtcattttaaccttgaaacaaacgatcacagaactcattctgcaagcggtgcaaccactggtagaagacacctccagcctcaatatcattcttgagcggccaaagtctgccgaccatggtgattttgcgaccaatatcgccatgcaactggccaagcctttaaaacaaaatccgcgtgcaattgcgcaacagattattgatgccttgcccgccaacaacgtcattagcaaggtagacattgcaggcgctggctttatcaatttctttgtatcggcagatagcaagcaggcgattgtgcatgaggttttgcaatcaggtgccgcctttggccgcaatcagcttggtcaacatgaaaaagtacaggtggaattcgtctctgccaatccaaccggccctttgcatgttggtcacggccgtggtgcggcggtgggcgattgcttatgccgcctgttagatgccaatggctgggatgttacgcgtgagttttattacaacgatgctggcgcgcaaatcgacaacctgaccaagtcagtgctggcacgcgtgcaaggcctaggcccggacgatgcaggcttccccgaagatggttatcgtggcgactatattgttgatattgcccaggcctaccaggccaaagccaccatcattgccgatgacatgcaagtgaccgctagcggtgacgtgcaggataccgagtctatccgtaagtttgccgtggcttacttgcgccatgagcaagacctcgacttacaggcttttcagatcaaatttgatgtgttttcactcgaaagcgctttatacagtgaaggcaaagtagaaaataccgtgcaatccctgattgccagcggccacacctacgagcaagacgacgccttatggctgcgcaccaccgagtttggcgatgacaaagaccgcgtcatgcgcaaaaaagaaggtggctttacctactttgtgcccgacgtcgcttaccaccgcgaaaaatggaaccgcggctttaaacgcgtgatcaacgagcagggcgcagaccaccacagcaccattacccgggtgcgtgctggcctgcaagcgctcaatgtcggcattccgcaaggctggccggagtacgtgctgcatcaaatggtcaccgtcatgcgtggtggcgaagaggtcaaactgtccaagcgcgctggcagctatgtcacactgcgcgacctgattgaagaggttggctgcgatgccacgcgctacttcctggcggcgcgcagtgcagactcgcaactggtgtttgatattgacctcgcgcgcgcgcaaaccaatgacaacccggtctattacattcagtatgcgcatgcccgcatttgcagtgtgctcaaccagtggaacggcgacgtagccagcttaaccgcggctgaactctcgccgctgcaaagcgccactgaaaccaccctgatgcaagcgctgggccaataccctgaagtggtcagcagcgcctgccaggcgttggcgccacacatggtggccaactacctcaaggagctagccagtgccttgcatagttattacaatgacaccaaatttttggtggatgagccgcaggttaaactggcacgcttggcgctgatcaccgccacacggtccgtattgcgcaacggcttgtctttactgggtgtcagtgccccagaaaaaatgtaagcatcctgctcaataaatgcttaaattgattggtaaacatcacacatgagtcgcgactacaaaccctcacaagccaaagcaaaaagtaaaagcagcggcagcaccttttttaatggcctgttggtgggcttgtttttgggcgtggcactcaccgtggcgctgatcatctacatcaaaggcgatcatagcccgttttccagtgcgtttaaaaaggacgacgaccagcaagaaatccccattaaaagcaccgtgaccgaagaagaagtcaaaccaggcagcgcttcgatcgaagacccgaacaagtttgatttctatacgattttgcctgataccgaaagcaaaattagcgaacagcaagtgaaaaagaaccccaccatcaagcaagaaagctattttgtgcaggtgggcgcgtttgccaaagaagatgacgccaacaacctcaaaaccaggctggcattggtcggtttcgaggcatttgtacaaaccgcagacattcccaataaaggcaccatgcaccgcgtgcgcatcggcccgctcaatgatttggccaaaatcaacaaaatcagccacgatctggaaaccaatggcttccaggccaatctgatcaaggtcaatatcgaatcttcaaaccattaatgccgctgtcatcgcataggcagctgccacgttaatgcataacgttacacaaaacttaggaaactgactttatgaaaaatatgttgttgagtttgatgctttttgctggcttcaccgcaagcaccgcttgggcagacccgcaaatgggtcagcagtttgatcaggttgcacaacaaatttcgactgaccaaccagccaaaatcgaagtcatggaaattttctggtacggctgtccgcattgttaccacatggagcagccactggacgcctgggtcaaaaaactccccgccgatgtgtactttaaacgcatgccagccttgcctaatgcaaactgggcaccaatggcaaaagcctatttcgccatgcaagaactcggcgtgctggataaattgcacacccagttgtttgacgcgattcataaagctaaaacactgaacccggctgacgaagccgcggccattgactggatcaccaagcaaggtggcctggacaaaatcaaggtcgaaaaagcctttaagtcgtttgccaccaatatgcaaatgaataaagccatgcaagtattccgctcttctggtgccacgggtgtacctagcctgattattgatggcaaatacatcaccggcagctcgatggccggcggtaatgaaacagccctgcaaaccgcagactttattattcagaatgtgcgcaaagacaaagctactggtaaaaaataatctagccactgcccgctcaaaaacgcctaatgtgatgcatcaggcgtttttttgttttaagcgcctgcaaaccatctttgccgcggatgaacgcagatacacgcggataaaaccttataggatttcatgactgagaattttcagaatagacgttgcaaggaatcttacaaagcattcttttcgccttgttggcgagttactttttttgcttgccccaaaaaagtaaccaaaaagagggcacccagccatcacggcctgacggctcccttgcgttgctcaacaaaataagccggtcacgaaactcgccctgacaagccacacaaaacgtggcttgctgcggagctcaaacagccgatggccgactactcccacttcgtctccgctactcagcgtgatgggatgggacttctctcacctaagtaacatcgccgaggtttggacggttcaaaaaccagattcttttttctttaattcgctaacggttgcagtcggatggtgttcggggtccccatctgacgcgccgagcaacgcaggattggcgggagttgtcggtcatcggctgttcgagttccgcggtggcttgcgtcttttgcaagccgctagggcgagtttcgatgaccgcccgacaagccgagtagcacaggaaacaagcggaagctggggtgcatttcttttggttacttattctttgggcaagcaaagaaaagtaactcgccgaaaaggcgaaaagcaacctaacaaacaactacaaaacccgcgtgggcatcaatacccatcctacgtcgcgcccagcaaggcgaaaagaaaccacccaaccaaagagcaaccttttattgtcatcagacgtcgcctggattccgatctacgccgcaatgacggtatgaaggtggtcacccagaggcaataacaccctaacaatgaccttattagccaattctaaccaatgcattagcgcccagccctcagccaccgccccacccatgtctccggcatctccgtccccgtcaccagataatgtagcgttttaatatcgtgcatcacaaaacgctgaatagatttcgcctgatccagcccgcaacataaaatcgtgtcaccaatctgcaatggcgtcgataatgtcggcaataacattttttgctcgccccgcaccagcatcagcggcaccactggcatttcatgtcgctgctgtccggcgggactcatcatcaagtgcttgagtgcaggctgtatgtcctgctccatcaacgcacacacagccactgccatatcgcccgcaatcgtaatatcccaagtatcaggcacttgctcacccagcttggaaaccaactgcgcaatcacagcgttagcccaggcattgccctgatgcctggcggtggccagaaattcggccagcatcggcgacaccatataagataaacaagtgtgcgcaatcacatcactcggttgcatggtgctatcggcattaaagtgctgaaacagcggatcgttatgccgtttgtttttgcggataatcacgaataagtttggattcaactcaagcgccgtcattacaatcgacaagttgttaatatcattatcggtcccggcaacaatgcccaccgcctgctctaccccggcctgctgcaaaatgtgcgattcaaccccgctgccgacaatacattcctcgcattgtgtcccttgtgggtctgcctcaataatagtgacatgcatgccgccattttgcaggctgttgactacagattttccaaatcggccaaagccacaggcaatccaatgcccttgcggcaccgcggccggtgtggcgattgcatcgcccggcgcgcgagtcagccattcgtgtaacaaataggtgcccagcgcattgaggcgcatggccaaatgctcaccaaaaatatcataagggttgataatgcggtccgtaccaaacgaggccatattcgcggcaatgacatcattctgtacccgggccagcaccggcaaatcgggcttgatcagtttcaccgccaccgcaatcgccagattggcatggtcgtcatcggtcaaggccgccaccccacggcacatcggatgtttaatgcccgcatacagtagcacttcagaaaatttagcatctgcacacaaatgtggaatgtaaaactggtaatcggtcatttccagctcattgatgcgctcaggcgaaatttccagcaccaccacgcgcaattcatttttatccagtgcgcgcaccagttcaccaccggtttcaccatagccgcaaatgaggtaaaacggctccatcaggttacgcacatcgcgctgaaacatggcatttttaaaagctagctttagggcagactcttgaaacagcgcaataatcgccccaatggcataaaaccaggaaatcactgtcaggtaaatcgagaacgtcatccacacacgttgatgcgtggtgaaagggtagggaatctcaccaaaaccaatagtggtggcggtatagcttagtatataaaacgcatcaaaaaagctgtagtgatatggctggccatggtcatctgcgcctgggataagcacgaaaccaatcagtgcaatggcatagctgatgatgaccatcagtagcggcgcacgcatgcgccgcagaatcagaaaaatgatgtgattgagactcacaaacggtccctacgggtgcacgctagcgacgcaaggtcacagtttcgtaaataagcaaaatcaccgaagtgatattggccagaaaagcaccgcccgacaaagaaacaataccgaccatcacctcgggttctgcgccttggctcccggccaccacccagataatcgcggcggcaatcagttgtatgtcagccaccaggctggtcgccagatgaatcgcaccaatttgggtgcggtcgccaaacttaagcacggtagcaatcaagttaaccacaatcgccacatataactcgtaatgcaagtgatgttgcggattatcaatctcgcccacaaaaaaaccaaaattgagtgtcatggccagaataataaaaaagccaaaaatcactttttccaaattcattacgtttccccgcgcattgttttatggcattctacccgattaaaatttgtttaccgtgatgttttttatgccgaaaagtagtgtgtccgccatgcgcattttaattaccggggcttctagcggcctcggtgccgcccttgcaaacgcgtatgcagaacaatatggcgaaaagctagtgttggctttatgtggcagaaatgaagtcgcattgcaaaccctggccaagcacttaaaacagcaatatcaaaccacctgcgtcatttactgtgtggatgtgcgtgccgcggcgcaaatgcaatctatggcacaagactttttaaatcgctttggcacgccgcatattgtcatcggcaatgccggtgtcagccgtggcacactcaccgaatatgctgaagacatcccagcgtttcaagccgtgtttgaaaccaacgtaatgggcttagtgcacacctttcagcccttgatcgaagcgatgaaaacggccgccaaccaaggcgagccagctcaactggtcggcatcgctagtgtcgccggcattcgcggcctgccaggctccggcgcttacagtgccagcaaagctgctgccatcacttacctggaaagcctgcgcgtagaaatgcagctatacggtattgccgtcaccaccatcgcccccggttatatccgcacaccaatgacagagattaacacttaccccatgccatttttgatggacgccaatgtgtttgcacgcaaagcgctacggtctattgcagctaaacggcgcttcaccattattccgtggcaaatgggcatcgccgcacgcctgatgcgactcttacctgcctgcatgtgggacctcatcatgaaaaaagccccgcacaaggcgaggctttaacaaaaacgttagcctgactaggttaagtctttaattgtttcggtagggccgttggttttcaccgacgcaataccattatcacggccagactctgcagaatacatctgactagtaccgatgacctggctattgcccgccagtagattgaaataagggcggccatctttagcagttagcttctgataacgctcgtccaacggactgtttttttgcacagactcaatgccattctgtgccgccgctttagtggtgtactgctcacttttgagaatctgctcgccattgccagccttcaatgcaaaactgaattgcccgttcgcatcactttttgttagttcaaaccaacccgccatcgcccgctccctatttgtgttgagaaattgatacgtcattaaagcacttcaaacaggtaaaaaaccattgaagcattttcaattttacataactttaaaataaaatggcgcacaatactttacatttacaaatgctggtcatctttttaataaaaaactgtgggtgattgccataacagaaagcccagcacgaaggctgggcttggatacagaatctttcgactctttattgtagcaacggctctcaccccggatgaccacaacgactcaataataaggaataaaaatatgaatagcaagcagggtgtgaaatatagcattggcttggatattgggattgcctctgtaggctgggcactactgggagagcatcgagttattgatttgggcgtacgttgtttcgataaagcagaaacagccgacaaaggtgagtcactcaacttggcgcgccggtctgcacgtttactacgccgacgtttgagaaggcgcgcatggcggctaaccaagcttgcacgactattcaaacgtgaagggttgattgctgatgtcaatgtgctcaaacaaccaccggccaaaggttttgctacaccaaacttatggcaattacgtgttgaagcactggataggaagctcagcgctgaagaatgggcaagagtcatttatcatttatgtaaacatcgtggctttcattggcagagcaaagctgaagagaaaaaagcagatgatgacaaagaaggtggcgcagtcaaaaagggcttggcagggactaaaaagctgatgcaggacaaaggctatcgttcggcggctgaaatggtgatcaacgaattccccgatgcgcaacgcaacaaacgtggcgattacagtaaagccttatctcgtgaactgctttcaagtgaattgcacatgctgtttgaaagccagcgcacattcggcaatcccaatacctctagtgaattcgaaaacaaactgctggaaagcaaacatggactgctatgggcacaaaagccctcgctatcgggtgaagcacttttaaacatgctaggtaagtgcacattagagaaaaatgaataccgcgcaccgaaaggcagctttactgtagaacgtcatgtttggttaacccgattgaataattgccgtttgattattgacggtgagaaacgtgcactgacaccagcagaacgcgcacttgccattaatctaccctatgaccaaagcagtgatttcagctataagcaattacgcaacgccttagtcaaagcggggctgacaagcgagttccgttttgccggattggtttaccctagccaatcagaacaagaaaaatccaaaaacccggaagatgaaaagctgattaaattacctgcctggcaacagttacgcaaagccatgaaagaagccaacttggaaagcgattggcagaaaatagcagtcgatgcgctggatggtaaagcgcagctttatgatggcattgccagaattctgagtgtttataaagaagatgatgaagttgagcgcgagctaaacaaactagatttacccaacaaacctgacatggttgcagtattacaaacctttcggtttgagcagtttagtaatctttcccttaaagcactgtacaacatacttccacacatggaaaaaggccagcgctatgacgaggcctgtctggccgctggataccaccatagtcaacagcatgtcatcagtactggtgagtaccgatatctaccgccattttatagcggtcgtgacaaagacggccgtcttaaatttaacgaagagctggatataccccgcaaccctgttgtgctgcgtgcattaaatcaagccagaaaagtcgtcaatgccatcatcaaaaaatatggctcgccagatcaggtacatattgaaatggcccgcgacttatctaaatcatttgatgatagacgtgacattaaaaaagcacaggacgaatacagagatcgtaacgagaaagatcgctcaacctttaaccttgaatttaatactactggcgaattgaaaggtcgcgaatttgaaaaatggcagctttatcgtgaacagcatggaaagtgcgcttattcattacaagcattagacatgaatcgcttatttgaaatgggctatgcggaagtggatcatgcacttccgtattcgcgtagttacgatgatagtaaaagtaatcgagtgttagtgctagctgccgagaatagaaacaaaggcaatatgacaccttacgagtacttaggcggtgctcaaaacaatgtacgctggattgaatacgtagcctttgtgaactcgaacaaaacttatcgccaagccaaacgtaaccggttattgcgtaaagattttggtgaggaagccgccaaagagtttagtgagcgcaatttaaacgatacccgttatatttgccgcttttttaaaaactatgtcgagctctatctcaaactggccgatgaaagtgatgcaaaacgctgcgtcgtcgtcaatggtcaattaacctcgtttctgagagcacgctggggtttagttaaggtacgttcagactccgaccgacaccatgccttagacgctgccatcgttgcagcttgtagccatagtatggttaaacgcttggcgaactactcaaggcgtaaagaacttgaggctgcgcgtgaaggttttgtggacctaaccacgggtgaaattgcaaatcacgcaatgtatgctcaactcgagcaacactttccattcccttggtcgcactttaggcaagagttacaagcaagattgttcgcagatgatttacaagctatgcgcaatgagctggaaaatatgggctacgacgctgatgcactagatcacgctaaaacgttatttgtctctcgtgcaccgcaacggcgcaatggtggcgcagcgcacaaagagaccatttatggtcaatctgaaaagttagcaacaactggcagcgtcacccaaaaaatagtcgtgacagatttgaagttatccgatctggataagctcgttgaaccacatcgcaatcaaaaactttatgccgaaattgcagagtggctgaaaggaaaggacgagcgagaaaagcgcgtgaaagaaattgaaacgagcctaggccgaggtaaagataaacgtgaaatgactgctgaagaaaaagcagaagttgagcgactaagagctttaccacgcaaacctaccaatgacgggtcgccagggcctgtagtgcgaactgtgacggcagtgattgataaactatctggcattccgattaggggcggtgttgcgaaaaatgactccatgttgcgagtggatgtatttagcaaagcaggtaaattttatcttgtgccggtgtatgtgcatcatcgcgtcacaggattaccgaatcgggcgatattacaagctaaagatgaggcagaatggacattgattgatgaaagttttgctttcaaatttacgctatatcctaatgattatgtatgcctcattcaaaaaggaaagtcacccttatatggatattatgccggatgcgacagaacaaccggcaatattgacttatggagtcatgaccgaaacagattaattggtaaagatggtttattacgaagcttaggcgtaaaaacagccattagtttagagaaatacaatgtcgatgttttaggcaatatctatcctgcgccaaaggaaactcgaagtgacttggcgtagcgttgttatctcccaaccagccaagctacgacgtgagcatttctcgctagcgattgagcaggcacaaaccgcatttgtgccttttgaagatattgcggtgattgtgctaaacaaccgggagatcacacttactcatcctgtgctttccgcgtgtggtgaatatggcatcagcttattttcaaccggggacaatcaccaaccaaatggcatttttctgccatacctttcgcattcacgcgccaataaatggatgcgtttgcagttagattttcctaaaccaaaatccaagcaaacctgggcagccatcatacggcgcaaaattgctaatcaggcaatttgcttgcgcctttcgggccgggatggggttgagcgcttagagtcttatgtgggacgcgttcgctctggtgatattgaaaatatggagggtcaggcagctgctttttattttccactgttatttggcaaaggctttaagcgtatgcaagagagctttaccaatgctgcgctggattatggttatgccattttgcgcggcacgattgcacgtgggctggtcgcgcacggcatgatgccagccatgggggtttttcatgccagtgagcaaaatgcgtttaatctggccgatgacctgattgagccttttcggccattggttgatttgtgtgtgaaaaatatgccgctacccgcaaatgatgttttgacgcctttacacaaagcagggttggtgaacttgctcaatattgatgtgagtatgccacgcggcactatgtcggtgttatctgcaatagaacaattagtcgaaagcttggcacgagtactcgatggtggcagcccagagatgttggaactgccggttttaatagggttggagcaacatcaactagagtattaactatgagtggggagaacagacgatatatgcgactgctagtattattcgacctcccaacggtgactaaagccgaacgtcgtgcctacacgctcttcaggcgttttttaatcaatgacggctatgacatgattcaattttctatttacggtcgcctactcaatggcaacgatgcgcttgataaacacctaaaacgattagtcgataatttgccgccagaaggctctgtacggtgcttaagtgtcacagaaaaacagtatgcaagtatgaaactactggttggactaccgctttttcaggaaaaaaaggtcaaatcagaccaacttcttttgttttaaatcagtgttttcaaaaattaaacccgcaccagttgttagctggtacgggtttggtgagagcctattgtagatcatccggggtgagagagggagctacaacttgcacatttgcgctaagtgggcttggcctattgtagatcatccggggtgagagagggagctacaacccgaccaccaagtcagtccgcgacaaccttattgtagatcatccggggtgagagagggagctacaacccgaccaccaagtcagtccgcgacaaccttattgtagatcatccggggtgagagagggagctacaactggtaatacaaatcatatttacgttcgatgattgtagatcatccggggtgagagagggagctacaaccatgcgcacagcgtcagtatggtcagatgaattgtagatcatccggggtgagagagggagctacaacgcattgcgttgaaactggagagcttccaacattgtagatcatccggggtgagagagggagctacaacggtggaagagttgcggaagcccataattgaattgtagatcatccggggtgagagagggagctacaacggcgtgaacgtcgaccctctcgatcatcaaattgtagatcatccggggtgagagagggagctacaacgcctgccgcatcccatgacttacttgacgcattgtagatcatccggggtgagagagggagctacaacccacggggtcagcaagacctgtaattgtaaattgtagatcatccggggtgagagagggagctacaacgactgaatataaggcgtgacatccgcaccgattgtagatcatccggggtgagagagggagctacaacacggtgatcgcgtattgatcggaagcacgaattgtagatcatccggggtgagagagggagctacaacagcaagcgcgaccatacttgaattgttgctattgtagatcatccggggtgagagagggagctacaactaaccaggatgagaaactcactcaagcataattgtagatcatccggggtgagagagggagctacaaccagcatcttttaatgccctttcttcatcggattgtagatcatccggggtgagagagggagctacaactataagggaaatacatcatgtctatcaataattgtagatcatccggggtgagagagggagctacaacgtttcatgacgtgggctgcatgggttttagattgtagatcatccggggtgagagagggagctacaacaaaagcgatcctgttcaggacttggttcgcattgtagatcatccggggtgagagagggagctacaacttatacactgatttacagcaaagacgatgcattgtagatcatccggggtgagagagggagctacaacatgagaagagcatctgcttgagtgcgggccattgtagatcatccggggtgagagagggagctacaacgctggcactaggcgcatgcttgaacgatttattgtagatcatccggggtgagagagggagctacaacaccaccactaacaatagaagaaccgaaaccattgtagatcatccggggtgagagagggagctacaacgcttcatgaacacatcgcatagcccagacaattgtagatcatccggggtgagagagggagctacaacgtcaacgctggtctaatcattggcaataatattgtagatcatccggggtgagagagggagctacaacattgcgcgctaatgtaagcgctcgctctttattgtagatcatccggggtgagagagggagctacaacgcaggattgatgagaagtgcgcctctagttattgtagatcatccggtctggtaaatatgaagaaaagcgacccgtgcatagagtcgctttatggctcagatttgagggcttatgcacagccacagcttcatcaccatgcgaaaactatacgttcttaaaagcttgatatcaaccttttaccaaaatcacgagataaaacagtaaaaagcccattttaaatgcgcaatcgatttattcagccaaaatagcctctattcgcatcgccacttcatccaacacaaagcttggcgcagcctctttaaacttagcttggcgcacgcgccaatccagtgactttaactgatggcaatgtactgcaccctgtgtttctgtaccacttcccatcaatgtcaccactgtgccatgcgttctggccgctgcggctgcgccttgcgagatagggcagatcattgccaggccacgctggttgaatagctttgcactgacaaccaaaccgaaatgcgggcctttcatctcctgaccggaggatgggtcaaactgcaagtgaacaatatcacctcgtgcaggcacataagccattacaacgcctctttgcccacagcgggcaactcatcccagccttcaaccagaggcaggccatctggcatctcatccagcaatgtttttaagtcataacgctgcttgcggggtgctttaattttcatctggtcaccttctagcaacaactctacctgtgatccttctttaagctgattttggtcaataaaagccttgggcaccgtcatcaccaaagagccaccagcgcgccttaatgtttgttgcatagttaacctccaacagcaaaagttttattttagtaggatatttaggtggcgacaagcgataatctacataaaaaagcccattcaattgaatgggcctttaatttaacgcgtaatcggtttgtagcgaatgcgcttgggcttagcgccttcttcacccagccgctttttcttgtcggcttcgtattcctggtagttaccgttaaagaaggtccattgtgaatcgccttctgcggccagaatatgcgtcgcaatccggtccaaaaaccaacggtcatgcgaggtgaccagtacgcaaccggcaaactctagcaaggcgtcttccagtgcgcgcaaggtttccacgtcgaggtcgttagacggttcatccagcaacagtacattggcgcctgaaatcaaggttttggccagatgcaaacggccacgttcaccgcctgagagctgtccaaccactttctgctggtcgccgcctttaaagttaaagcggccgatataggcgcggcttggcatttcgaacttgccgacagtcagtatatccagaccaccggaaatcgcttcgaatacggtcttatcgttatcaaggccttcacggctttgatctaccgctgccaattgaacagtggggccagtgacaatttcaccgctatctggctgctctttgccttgcaacatgcggaagagggtggacttaccggcaccgttagggccaatcacaccaacaatcgcacctggtggaatagtgaatgacaggttatcgatcaacagacgatcaccaaagcctttggagacgttattaaactcaatcacctgattgccgaggcgttcgcctggtggaataaagatttcctgggtttcgttacggcgctggtactcgacgctggacatttcttcgtaacgggccaaacgcgctttacttttgctttggcgtgcttttgcaccttggcgtacccattccagctcttgcttcatggctttgcggtgggcatcttcctgtttttgctccaaggccagacggtcttctttttgctccagccagttagagtaattacccttccatggaatcccctcaccgcggtccagttccagaatccactcggccgcattatcgaggaagtaacggtcatgggtgacggccaccacagtgcccggaaagcgcaccaggaactgctccagccattcgacagactccgcatccaggtggttggtcggctcatccagcaatagcatgtccggctgcgataacagcagcttacacaaggcaacacggcgtttttcaccgcccgacaaggggccgactaaggcgtcccaagggggcaagcgcagcgcatcggcggcgatttccagctgctgctcgacgtcactgccgctggcagtcaggatattttcgtatttggcctgctcttcagccagtttgtcaaaatcggcatccggctcggcatacgcggcgtagatttcttccagtttttgcttggcttccataatcgcgcccagcccggcctcaacctcctgacgcacggttttgtcagggtctagctgtggctcttgcggcaaatagccaatcgacagatttggctgccattgcacttcgccttcgtattctttgtcagcaccagccatgatgcgcaacacggtggatttaccggagccgtttaaccccaacaggccaattttggcccccgggaaaaacgataaggaaatgtttttgataatttgccgctttggcggcacgattttgctcacgcggagcatggacatcacatattgtgccatgacgaatgggttccagagtcttgatcaaagcgggtattttaacccagagcgtggtttaaaaacggttttgtttttgccgcagatgaacatgaataaacgcagataagaaatctttatgattatatttactaggccaatacagtgattaccgcgtcggcggaaaaccagtgaagtagcccattcattttgcttcaataaatcatatgcaactacgtcaaccaagcaacatctgcatttatccgcgtgcatctgcggcgaggaggtttaaaaataaaaagggcctgacggccctttttatttaatcacaacctaggctgcaacacgttgatcaataaacgtcgtattagtttgcgcttgcgtgccaatttgaattttgcgcggctttaacgcctcggggacttcgcgcaataaggcgatggtaagcaagccattctcaaggtgggcgccggttactttaacatggtcagccagctgaaatttatgttcaaaatcacgggtggcaatgccacgatgcaaaaaggtgttttgctgttgttttttcgcctgacggccagtgacacgcaacgcctggtgttcggtttctatttccagctcatcttgctggaacccggcaaccgccatcacaattttgtaggcgttttcgtctaccagctcaatattatagggtggatagctgatttcgttttcactgcgctggttttcattcagcattttggccaagcggtcaaaaccaatggcagttctatagaaagggcttaagtcatacgtacgcataggttgatccttgtaaaaataaagcgattaacatgattgacagacctcaaactgcaagcatctgtattttcaatatgggagtgcgctttattttttcaaggctttgcaagcagcttaaatacccaaggcctccgtccatgccaatgcatccatatggcactggttgaccttatcagggtttaattgcagcatcgccgccaattgcagaatttcttcactattggcatcttcgcaggcttcggtcaacttaagaaaggggccgaaaatacctgcgcgctttgtgagcgcgtctacaatcggctccggcaattgcaatttttccagcaccgtttccatggggactttaagcatcacatccagcaatgaaaacacccccaccacaaacaaattgtcacggtcgcgcttttcaaaaaatggctcgcccagtagttcggtgagtcgaccacgggtgatggatgttttcatcagggctggcgagctactattattacctgcagtgaccatgagtagcgttaaccagcgatagagctggttgcggcccaaaatggtcagtgcatggcctatggactgcacctcgcaagacaaaccaaagccaacagaattaatgtaacgcagcagcttgtagctcagcgtggtgtcgcgcttaaagccattttcaatggttttgttatctgcctcctggctcaccaggttcaacaaatgcagcacgccgtcaaaactggggttaatcactttgctagtgagattttcaggtttggcgtaaaagtagccttgaaactgttgataaccagcgtctagcaagctggtaaattgtgcattttgctctactttttctgcgatcagcttgcaattggtggtttgatatttttttaaccaaagcgtggcctgcgcaatatcaacatcacgcatatcaagcttgatgtaatccgcgtagggaatcaacgcttccagttgcgggtgatgctgcgggttatccagcgcaattttaaatttagtttctttgagctcgcggcaacgggcaatgatttctggcgtgacatccaccgtgtgtacaatttctagcactgttttttcggctggcatcagctccagaaacacgctattaagcatgacatggtcgacattgataaaggccatttgttgccctagcagccaattctcctgcatctcatcaatggtggtagagagtattttggcgcaggtttgaatatcctcttcaaagggcgcattgccacctgggctatcgtttctgaaaaagaattcatagccaataatttcttgttggctgttaacaatcggctggcggccgataatactgtgttgcgacgtggtcatgactgcctttctgatgagcatctactctcagtataagggaaactagcctttttcttatttgaaaaaagccccgaatgtcgaggctttttaggtctttattgcttattcaacggtcacgctcttggccaggttgcgcggtttatccacatcagtgcctttaagcaaggcagcgtgataagccagcaactgtaccgggattgcatgcaaaataggcgagagcacaccaacatggcgcggtgtacgaatcacatgcacgccctcagactctttaaagtggctgtctgcatctgcaaacacgaacaactcgccgccgcgcgctctgacttcttgcatgttggattttactttttcgagcagggcatcgttaggcgcaatcaccaccaccggcatattgctgtcgaccagcgccagcgggccatgttttaactcaccggccggataagcctcagcgtgaatataggaaatctccttgagcttgagggcaccttccattgcgattggaaaatgcacgccacggcccaggaacaaggcatgctctttgtcaccaaagcgatgcgcccattcgcggatttgcggctccagattcaaggcaatctgcacgccacctgtcagttgacgcaagtcggataagtattgctgctcttgtgccgcactcagtaagccacgtgctttgcttaaggtgactgccagcacaaacagtgcgatcaactgcgtggtgaatgccttggtactggcgacaccaatttcagcaccggcgcgcgtgtaaaaaatcaatgacgaagcacgcggaatcgcactttcctgtacgttacaaatcgccaggctatgctgatgaccaagcttttgcgcatgtttgagcgcttccatggtgtctagcgtttcacccgattgtgaaatagtcacgatcagctgcttaggattaggcacagactcacgatagcgatactcactggcgatctcaaccgaggttggaattttggcgatgctttccagccagtatttggcggtgaggccagcataataactggtgcctgccgccaaaattaatacgctatcaatctgtgaaaaaatgttcgcggccgattggccaaacaactcactcctgaacgcgccatcatcaatcagcgcctcaatcgtgtcactaatcgcacggggttgctcatggatttctttttgcataaagtggctgtaagggccgagctccagcgaggccagtgacacatcactcatatgcactttgcgctgcacaacatcgccgcgtttatcaacaatcaccaccgcatcggtttgcagggtggccacatcgccgtcttcgaggtagatcactttacgggtggcagaaagtaccgctgacacatctgacgcaacaaaattttcgccatcccccaaaccaatcagcaatgggcagcccaggcgggcaacgaccatctgatgtggctgattaagtgcaatcacgctgatggcataagcaccgctgagttcggtaatcgctttttttactgccgcaaacaggtcttgagtttgctgataatagtaatgcaccagatgtgcaatgacttcggtgtcagtttgggaataaaacgtataccccagcgcttgtaggcggtcgcgctgttcgtcgtggttttcgataatgccgttatgtaccacggctatttgcgcctgatcttgcgttggcgatacatgcggatgcgcattttgctctgtcacgccgccatgggttgcccagcgcgtatgaccaatgccaatctggctgtgcatgtcttgcgctttaagctgcaatgcagccacgcgcccaaccgcgcgcgcgcgttcaatggtttggttgagaatcgcaatccctgctgagtcgtagccgcgatattcgagacgacttaagccctcaatcaggagtgaaacgatatttctgtttgaaaccgcaccgataatgccacacatacgcttattttttcaccttttgcggacgtttccatccctgaattgaacgttgttcgcgggcacggcacaaggtcaagctctctgccggcacgtttttggtaatggttgaacctgctgcaatggtcgcaccgcgacccacagtcactggcgccaccaattgtgtgtcagagcccacaaacacatcatcttcaatgatggttttatgtttgtttgctccatcataattacaagtgatggtgcctgcgccgatattcacattggcgcctatgctagcgtcgcccacatagcttaaatggttgaccttgctgccatgcccaactgtggcatttttaatttcaacaaagttacccacatgggtgt

SEQ ID NO: 2854 - DNA, 23489 bp, synthetic construct
  source 1..23489: mol_type = other DNA
  misc_feature 1..23489: note = Synthetic
tcatgacgaccagattcagaccggaaccattactgtaatgctcgtccgcggtgaactgccggtagttggccgtgagctgaaactggccttcttccaggaagggactcgattgcgcgccaagcacgggcgctgtggttcgcgtcaggatgcaaccctgggcatgcactgacaacggaatcgacaaacccgcgagcatcgcaagacacgctgcaaatccgactgccgatttgaaaaccaaattgcgcacttgcactgttgaaatcctcgcgttgatgcttcgtaataaatggaagacggatgaatgcccgaaaatgccgcggaactataaagaaggcgcccttcggtaacaaacaagacttttctatcaacagcgagcggtaatgagaaaattccgataactccggattatctatggcagggaaattaattacggtttttcgtgtggatatcggctggtattaccatgaagaagatgcgtgcaagcgtgtccggtcattcaggcataggcatcattgagatgccgtgacgcgataaccatgctttgcagttttcggaaggcggtctcggcgtcattcacgcagcgttgcgcgaaacagccaaagccgcaatcgggattcaggtagatggcctcgggccggaaatggcgcatggccttttccacgctcgcgatgatggcttgcggatcctccgcctcggacgtgcgcggattgcagacgccgagcccgatctccttgtgccccagcgcctggcccacgatctcgatctctccggcccggggcgtggcgtattcgagcacgtactgatcgacacgcatgtccgcgaaggccggcaggagcggggtgtaatcgccggagagcagcacctcctccttgcggctccagttgccccggcagacatggatgccggtcttgatgccatcgatgtcatgaatgaccgcgttgatcagctccgccgcgtatctcagctccgaacccgcgtcacggcgggtcgccagcgtcgctcacatgaaggtgcggcggttgttctcgctcgaaaacaccacctcggtgaggaccggttcatcgaactgcacgaacccgcagccggcatcgcgcagggcgatgacctcggcgcgcagcagtctgacgatatcctcccccattgccaccttgtcggcataggcctgcccggtgaaggcccccacccacatggaacgggtgagcagataaggccccggcagggttaccttcaccggtttatccgtatgctcgcggacgaagcgatagtcgtccagcgcgaagggcagccgctgggagagccggcccacgcaggtcgggttacggatcgcggaggccggcacatccagggtctggaggatctcctcgaagccggatttgtcctccacgatatccagcatctccgcgagcgacatcaggcgcgtgccatccagtttgtcggtcacgaaggaatagaaattgtcccgccgctgttccccgtcgacgacgatatcgacgccggcccgcaactggtagtcgagacacttccgcacctcgtcatccgcaatgcggttgaaggcggcggcgtcgatctcgcgtttctgatgggcgcgcagcgcccttaacaagtctttcgatctcggccacgagccgacctgggttacttcaaacatgggctgtcatcataaaaaatatcgctaaatgatgttcatctttgtggtgatggctacaccttttttcaacgtctggctgatgggacaccgcgagaccgttacgtcccacgcctccctaaccgttgcgggatccgcgaaggtggaggcataacaggtcaggtcgatggcggcgagcgacgggtcccctttctcgatgccgagatgggcaagtatattgtggatgcggccctgcacgctgatctcgatatcgtcgaccgcgatgttgcgttgtgaacacgcgaccctgaaggccgtgcacaaggcgccggccagggcccccagcagatactccaccgccgacgggttggcgtccttttcctcgaagctcgccggttgaccgaccgggaaggagaaattgcggcaataaaccgtgcttttcaggccatcgttggagcgggagcgcaagcgccagagatattccctggccttgcgtttgtcttcttcgagggcgttctcttcgcgctgcgcgcgctcggtcccgcccttgcggatgaaataggccgtggccccattttccttgcgcgaaccgagcagggtatgaccgaccatgccgcaccacggcggcagatccagcgccacggtcggctcgctgctgcgcagttccaggataccctcgatcggcacccgactcatgtgttcacggatgagcaggaccagcccggagccgcaatccaggttaccaccgtcgaaaacggcatcgactctcgcaggcaggccgtcattcgcgctcatcaataggtgacgcagggcgctccattggagaggaattcaaccagggtggcgccgcccaccggcgtggcgcctgggatgagttgatcgtcagtgatattgcgctttttcagacagggggcgcagaccaggatcttgccgccattgccgacgaacttgtcgatcagttccttcagcggggcgaagggcgcgccctcgttgattttttcggcctcgcccttcacggccgcccagacgccgtcggtgctcagaaacgccaccgtctccttgtcgctgccgagcgcggcattggccacgacgaaaccgacggtgacgcggtcggtatccttgcggcagttcgtgatggagacacaaaatgttttcgacatgaattgattacctccaggttggaacgatcactttctgatggtcacgtaagccccattcacttcaatgagggtatggttgcgcatccggcaccacgcttcgagatcgcggggcgcgcccgagtcataggtcttgatgcagacggtagtgccggtcgcaagactgtcgaagaggaccttgaggtagatcagcaactggccgcagccgttgcctccggcatcgtacatgacatcgtattttttctgcggctgcatgcctcgtggcctctccggcgctggctgtttgcgtttttggattaaacggttaatgctagggtaaagacccgtcgatatctaatcggaagttcctttcgatcgcgtggttgcgatttgaaaaatcgattaatgcctaatgcctggcgctgattaatgtagcctggatggaatgcaatggaatccaggatcagattcccccggatttcgctgcgctacatccaggctacgaaagttataaaactcctcgaatggcggcagagtagtttttcagaacgggtaatgctgctccccaagctggatggtaatccacttcaactccgtcatttccgccatggaatagtgaccgccctcgcgcccgaagccgctgttcttgaccccgccgaaggggacatgcgcctcgtcgaggatggtggtgctgttgacgtggaccatgccggcctccagtttgagcgcgatgtccatcgccttctggagatcgttggtcatcaccgcggaggagagaccataggccgtgtcattggcgatccgcagggcatcgtcgctgtccttcgcggccatgacgccaatgaccggaccgaagttttcgatatcgtagcagtccatctcccgggtgatgtcggccagcaccgtcggttcgaagaaattctctttgtgtccgccgccgatcaaaaggcgcgcgcccttcgccttggcgtccgcgagttgtttggcgatgatctcgcactggcgcgcctggatcagcgggccgatgaccgtatcgtgctcgcggggattgcccatcttcagggtcttgaccttcgcgaccagtttcttgaggaattgctcgtagacaggttgctcgacgatcacacgcgtgccggccatgcagatctgcccctgatggatatagacgccaaacgccgccgtgttcacggcataatcgaggtcggcgtccgcgagcacgatgagcgggttcttgccgcccatctcgagggtgatcttcttgaaatggggactcgccttctgcgccaggatccggcctaccggcgtggatccggtgaaggtgacgagtttgaccctgggatcgctcgtgaggacatccccggcgagctcgccgtccgcgggcaagacgttgatgacgccagccggcaggcccgcctgtttgaggaggtccgcgagtttgaagcagatcaccggcgtatgcggcgagggcttgagcaccatggtgttgccggcggccacggcgaaggcgaccttcttcatcgccaggatcaagggaaaattgaacggcgcaatcgcggccaccaccccgagcggttggcggatgctgaaggagatcatgcctggaatatccgagggataggtctcgccgaacgtgcggcggcattcgccggccacgctgcgcagcatcccgatgacgaagcctacctcgaacatggacttgccgaagggcgcgccgccttcatcgatcaggacctcggaaaactcctgcatgcgggtctccaggatgtccgccgcccggcacaggatcttctcgcgctccgccggcagcgaattcttccaggtcgcgaaacgggcctgcgccacggcgagcgcccgttcgaggtcctcccgcgtcgcctgatgcacccgcgcgtacaccgaaccgtcggcgggattgatgtcgtcttcgatgaggcccttgctcgaggccacccattgatcgtcgatgtagagtttgtattcgttcataagcttgctgcgctcctctcacagtgtcgaaattttttatccgcccggtccgggtagcggatactctatcacgagatttccatgccggacatgacagctctaccggcaaaatacttcccgtgcgcggacaattcatgcaacatattgcaaccgtgatggatatgacgccaagccatgaataaaaccgaaaaaaacagggagacagcggcaaaagcggaggatgcgctcgcactcaaggtgggtgagcgggtccgcgccctgcgctcccgacggggtctgacccggaaatacctcgcccaacactccgcggtctcggagcgttatcttgcccaactcgaggcgggcgaggccaatgtctcgctctccatcttgtcgcgcatcgccagggcgctcggcgcgcggttgggcgaattcctgccccggacagaaggcgcgcttgccctctacgaaccgttgcaggaatttatcggcacgctctcggcggaaaaacagcgccaggcctttttattgttgcgcaacgccttcagcaaatcccgcacgaaacgccggggcgtggccctggtcggcctgcgcggcgcgggcaagagcacgctgggcaatcttctggcgcggcattaccaggcgcccttcgtccggctggatgagatgatcgcccagctttccgggatggatatcggtgaactcatctcgctgcgcggccaggatgtctaccgccgcttcgagttgcaggccctggagcaggccatcgccgattaccggcaggtggtgatcgagaccggcggtagcctgatctcccagtgggagacctacggcaaactccgcgacaattatttcaccgtctggctgcgagcaaccccggtggatcacatgcggcgagtgatggaacagggtgatctgcggccgttcgccgggagcaatgccagggccatgcaggacctcaaactgatcctagacgaacgcgagacggattacgggaaggcggattatgcaatgctgacttcggaccgctcgatcgaggactgtcttgaagaactcgtccgcgcctgccggccgtaccttgcttcgaattgatcggatctcgccaagagcgccaagagaaccacattaatcttctttgcggtctttgcgtgtggcgagattccgctgcgtctcccttccagccgatattatggttcttgacaccataacatttcatggcatgattcacacgatggaagcgaaacagttgtttcgatacaaaggagtgcaaggcgatctgacgatcgagatggcgctatggcaattacccatccgcacgatagatcgcctgcatggattcaagtatcgattgtactgcggtcgcaggggtgaatgtgtagtacgttatgacaatgaaaccggaaaaggcgatcaccgccactatggcgatctcgaagaaccttatggctttgaatcgttggagaaactgatctcggatttccgatcggattgcgcccgcctggccgggtggaggtggtaatgaaccgtattgaaatcgaagtactgagcccacgacaagcgctcaccgccttttcgaaggcatggcgcacgtctgccaagggcaagaccgcaacttcgcgtctggctttcggcagtctccgtgaactgttttccgccatcaccgagaaacgcctggagttactgcgctatattgcagcgcatgaagggttgaatacccggcaactcgcgcaggaactcgggcgcgattacaagaacatccacacggacgtgactggtctgactgatctgggtctgctggaaaaaaattccaagggggcgctatcggcgccattcgacgagattgtcattcacgccgggattcgcagcgacgcggcgtgatcaaggcagcgcgaagacgaacaacccctccccggtcggacctgactgcgcggccggaggcccgaaacctgcggcacgggccgccaccaccgcgacgtactgcttcctgttcttgccctgataggtcatcgggatcgcggtgatgttgtaatccattttttgcgcccagagttccgcgccggtgcgcgaatcgaaggcacgaaagcggctgtcgctggtagcgccgatgaagaccaacccgcccgccgtgaccatggggccgccataaccaggcgatccggccttctgcttgccctccggcaaggtttcattcaagcccaatggcgcttcccaagcaatgtcgccagtcgcggcgttgaccgcgaacaatctggcccagggcggtttgtggcagggccacctgacattatcgcccgttccaggcgcggcgaattcgggaccgctgccacgggtgtacggcacctgcgcgtaagccgtatcctggttgtagcgtgggttcggaatggtccaacccggcgcgctctcgtccttggaatttacgaagacataaccgagcttgggatcgaccgccgtgccgccccagttgacgccgccggacagggtcggaaagagcagcgtgggcggcgtgccctcggccttgaggttatacggtgtatacggccccgcgttgtagtacttgtgttcctcccacaaggcgcggcaggcgtcggcgtgttcggccgtggtgtccgcagcggtgacgatatcggccgcggtgaaactgacgcgcgcgagcggcggcggtttcacgggaatgggctgggtcggtgaataccactcgcctggcacgttgcccgccggtaccggagtctccttcacttcgaataacggttcgccggtcaagcggttgaggatgaacatgaagctggacttgccggtctgggcgagtgcggggatggtttccccatccttcacgagatcgaaaaggctcggggccggcggcaggttgtaatcccacagatcatgatggatgttctggaagtaccatttgaccttgccggtttcggcatcgagcgccacggtggaattcgccggttcgttgttgcccggacgatccccgccgtagaagttcgcccccggcgtgctgaccggcatgtagacgatcccatgctccgcatcgacggtcagggcgaaggcccagacattattaccggtgcggtccttccaactttccttgccccaggtctcatgaccgggctcgccgggtccggggatggtgttgtactgccacagcttctcgccggtgatcgcgctgtaggcccgcgaatccccgtcctcgccgcgcgggtctgtcaattgcggcccgatgtgggtttcgccgggtccgaaaaagttcgcgccaacaataatgatatttttatagatcgccggcgcgccgctgtaggccacgcccagatcgatctccccgttcttgccgaaaccagtggtgcgttcgcccgtctccgcatccagggcgatcatcttgcgcgccgtggtgaagaagatgcgcggctgatgttccgcatcgcccggccagtacgaaaccccgcggaaggaggcgatgccctccgcaagttcatgcacccagatctcttttccggtctcgggttccagcgccacgacccgatcccccgccggcaggtacatgatgcccttgaccacgatcggcgtgatctgctggaacagctcgaagtggctcggcccgctgatcggcttgtgcccttcccggttgaatcgatacgtccaggcggatgcgagcgatccgacattgccggtattgatctgatcgagcggcgaataacgagtcccggccagatcgcggttgtacatcggccagtcggcggccggatcgaggacctggtcctcggcagcagcgccgccggaggcgagacaaaaactagcaatcagaagtgtgagctggttacgcatacgagtacggaatatacacgcgatgcgccggttagggaattacgcggaacccttcagcctgaaaatcgttatccagagcgagggcaagagcgatgcgcaaacagatgttccattaatccacggctttatttttgtacaggaaccggtcatggtccttaccgcaggcttctgcgtcctcgccaatccccgaggttgaagcgagcttgcgcttccggcgcgtgggtttaatatcaaaatgctctacaccggcgcgacgggccgctttcatgacattcacatccagggtcgccagaggcaagccatcacgcagagccagttcgagataggcggcatcgtatgccgagagttgataccggcgcgccaattgcagggtactgccccaggccctggaggaagtctctccatcgaccacgatattcagacgcgaaagcaacccgataaagacctcgctgcgcgcctccgtgaccagagctttcgcttcggcccgggcaagcacattggccacctccaaattccaaatgtccggtactctcgcttcagcatctttcaatgcctccagcacgcgcgtggcataagcgagatccgcgggtttgccatcgccgaaataccagcgcatgacgacggaattatccagcacgaagttcatgcccggccttcctcaatcaacgccttgatgtccactcccttcacacggtgtcccgtcatgaaacgctccatctcctcgaccgccgccacggtatcctggcctccaactcccttcacgggcaagaggtcagcaatcgccgcgccccgatgcgtgattgtgtaacgcttgccgctctgcacaccgcgcagcaactcgggcaatttggttttggcttcataggcgcccacttcaatcttcatctcatgctccagggtgagtcacacagaccagtatacagaccagtctcattcagggaaacactgaacaagcacccaccgttcgggctgagcttgtcgaagccattgatgttacgagtgagcatttcgacaagctcaatgcgaacggacgtaaggtatctctgcaagagtgtatatcccgtcttgccgggcttgacccggtatccagtagacaaccttttttaactggatttcgtcatgcgccctcatgtcgacttacggaatttagcactcgttcagagattccttcgtccgatagtacgggtcgcatctttggaagttaatggtggacaagattggctttaatccgcttgtaaccaagcgaaacaccacagtggaaggggaattgaaaacagaactggccattgccggcaagtgataggtgggcgtatcctttttaattatggggaaataataaagcccggcgggtgttatcccgtcgggctggatacagaatctttcgattctttattgtagcaacggctctcaccccggatgagctacagatggattatcaaggagaaatgggatgactggcaagcagaaagtggatggcccgatcaccatcgggcttgatattggaatcgcctcggttgggtgggcagtgctgggggaaaaccggatcatcgatcttggagttcgctgtttcgataaagcggagaccgccaaagaaggcaatccgctcaaccttgaacggcgaacagcacgattgatgcgacgtcgcctccgtcgccgtgcctggcgtctcaccaagctgaccaggttattgaaacgcgaaggacttatccctgatgtgaacgtcctgaagcaaaaacctgtaaaaggcttcaagacacccaacttgtggaagctgcgcgtcgcagcccttgaccgaaagctggaaagcgaggaattggcgcgtgttatctatcatctatgcaaacaccgaggcttccactggatcagtcgcgcggagaagaaagctgctgaaagcgatagcaaaagcgagggaggacgagtcaaagatggcctcgccaaaactgaaaggctaaaggaaaaataccgcactgcggcagaaatggtctggaaagaatttttcaaaccacgaattgataatgatggtgagcctgtaagaacgagaaaaaccaacgaggaaatctttgatggcgttgctcgtaacaaacagggcgattacagcaaagcgctttcacgcgaactgctcgccgacgaactgaaactgttgttccagtgtcaacgtgaatatggcaacactcatgcaagcgcggagttggaaactgccatccttagcaacggcgacaaaaagagcggcttattctgggaacagaagccagcactatccggagagaatctcctcaagatgcttggcaaatgcacgtttgaaagatttgaataccgcgcacccaaggccagtttttcagcagaacgccacgtctggctgaccaggctcaataaccttcgtatcgtggaggatggcaagctccgtccgctgaacgaacaggagcgacgatttgccttgccgctcccctaccagcaagccagcgatttctcctataagcagctccgcaacaaactggttaacgcgggatatctgaccgatgccttccgtttcgcgggactatcctatcccagctcacgacaaaaagaggacgaaaaggcaaaagacccggaagctgaaaagctcgtcaaattcacgggctggcaaacactgcataaaacgttaaaggatgctggtctcgaaagtgagtggcagcagatttcatgccacgcactggaaggaaatgcggaactgctagatcgattaacatgggtactgagtgtctacaaggatgacacagaagtggatgcagaattgcgcaagttacccatgcccaatctggagaagatggttgttgccttgctcgatattcgtttcgataaattcagcaacctttcacttaaggcgctatacaacattctgccgcacatggaagcaggcttgcgctatgacgaggcctgcgaaaaagcaggctatcaccacagtcaacttcacaagattggcgaaggtgaacataaattcctgcctccattctactccgggcgtgataaagatggccgcctgaaattcaatgaagaaatggatatcccgcgcaacccggttgtacttcgcgcgctcaatcaagcacgtaaagttgtaaacacgatcatccgcaaatatggttccccgcatgatgtgcatattgaaatggcgcgggatttatcaaagccattcgatgagcgtcgggaaatcaagaaggcccaggaggaatatcgcgaacgcaatgagaaagaccgaaccgcattcaacacagaattcaatctgaccggggaactgaaaggcaaggactttgaaaaatggcagctctatcgggagcagcagggcaaatgcgcttactccatagatcccatcgatattcatcgcctgtttgaacaaggctacgttgaaattgaccatgcgcttccctattcacggagtttcgacaacagcaagaacaacaaggtattggttcactcaagtgaaaaccgtaacaagggcaatcacacaccctatgaataccttgatggccagaataacagtgaacgctggcaacgcttcaaaggctttgtcgaaaccaataaagcctaccgtcaggcgaagcgcaaccggcttctcaaaaaggatttcggtaatacggaagccaaggatttcagggatcgtaatctctatgacacccgctatatctgtcgtttcttcaaaaactttgtcgagcgctacttgcagttgcacgaagacagcgcggcaaaacgctgtgtcgtggccagcggccaactgacttcgttccttcgcgctcgctggggactgctcaaattacgcgaggaaagtgaccgccaccacgcccttgatgcagcggtagttgctgcgtgcagccacgggatggtcaagcggcttgccgattattcccgccgcaaggaactggaggccgtacgcgatggtttcgtagacctggagaccggtgaggtcatcaatcccgtgatgtatcagcgtttgcaggagcattttcctgatccctggccacatttccgtgatgaacttcaagcgcgattgaagatagataatccggcattgttacgcgaggagattgaaaaactcgggagttatccgcccgaggctatggaatcgttgcgtcccctgttcgtctcacgcgccccgcagcggcgaaacagcggtgcggcacacaaagagacaatctatgcgcagccggagagcttgaaagccaaaggtggagtaacgcagaaggtcgccatctgcgatctaaagctggctgatgtagacaagctggttgaccctcatcgaaacgaaaaactttatgctgccctgaaggactggctgacgacccgtgatgatcgggaaaagcgcgcaaaagacatcgaaaaaatcgccaaggatgccaaacgcgaattgacgacgtatgagaacgcagaaattgagcgactacgcgccttgcctcgcaaacctgataaagaaggtaatcctactggaccagtagttcgaactgtaacgatggttatcgacaagctttccggtatccctgtacgtgggggcatcgccaagaacgataccatgctacgagcggatgttttcaggggcaaaaaagacgataaattctatctgatcccagtgtatgtacatcacagtgtggcaaaagtgttgccgaacaaagcggttgtatcaaagaaggacgaaagccaatggacagtcatggacgacaattacgccttccacttttcactgtatccaaatgacctcgtccaattagtaattgatggggaatccatccttggctatttcatcggggtcaacatcaatgacggtggattaaagtattatccgcatgaccaacgaagaacaggtagcttaaaaaagagaggtgtatctggcgcaaaattattcacaaaatttcacgtagatattctaggcaatcgctatcccgctccaccggaaatacgccgtgacctggcgtagcgtcgtcatctcgcgtcccgcccgaatcaagcgggaacattattcgctggccatcgagcaggtgcggacggcctacgtacccttcgaggatatagctgtaatcgtgctcaatcaccacgagatcacccttacccatcccgtgctctcggcctgcggggaatacggcatcagcctgttctccaccggagatacgcaccatcccaatggcgtgttcctacccttcctgcaacactcacgcgccacacgctggatgcggctgcaactggatctgtcccgccctgtcgccaaacaaacatgggcagcaatcgtgcgcagaaaaatcgcgaatcaggcgatctgccttcatctggcaaaacgcgacggggtatccaggctggaatcctacgtccgccgagtgcgttccggcgatggcgaaaacctggaaggccaggcagcgttcttctattttctccagctcttcggcaggaattttcatcgccatcaggaaacttttatcaatgccgcgctggattacggttatgcagtgcttcgggggaccatagcgcgcggattagtcgcgcatggcctgatgccttccctgggtatattccatgccagcgagcagaatgccttcaatcttgccgatgacctcatcgaaccctttcgtccgattgtggatctatttgtctccacactcgtcaatcctccggaaaatgaattaaagccggaagataaaacagccttgatcggattactgaacgtggatgtggaaatgcctcgcggcgtgatgtcggccttatccgcgatcgagcagtcggtcgagagcctggcccgtatctatgacggcggcaatgaaaccctgctggaattacccaccctcatcggcctggagcaacaccgcctggagggctgaggcgtgagcaaggagacccggcgctatatgcgttttctggtgttcttcgacctaccggtggtcaccaaggccgagcgtcgcgcctataccctcttccgccgcttcctgatcaatgacggatacgacatgattcaatattccgtgtacggccgtatcctgaatggcaatgatgccgaggaaaagcatatgaaacggctggtcgataacctgccgccagaaggatcgatacgctgcctgacggtgaccgagaaacagttcgccggcatgaaactgctggttgggatgccgctttttcaggaaaaggctgttaaagccaatcaaatgctgttgttctgagcttgttttttcaaacggaacgcccgccagagtcaatctggacgggcgtttccgcagggccgattgtaactcgtccggggtgagagagggagctacaactaatggttccagaacgtcaccgggttaatgattgtaactcgtccggggtgagagagggagctacaacgatgaagcagagtgaccccccaaaaagattgggggccactctgcttcatcgttctcgcttcgcgagtaggttaataaaacgaaaaagggaaaaccgcattggtggatgtataaccttcgtctgaaggcgaggggtgtatggcgaactttcaccctctccccagccctcccccgtcgagggggagggggaaccaatacctgccatcccacttcgattatgatccttaattctaataacaagtggtgtattcggatccaccatcgtggacataaaatacttcgccagttatacattgtttatctgatcttgcggaagcatgtctttggtagtaaggtcaatgcatgatccgtgaaatcgataggagaaacatgcctggtcttcgactgctgaacctggtgccgctgaggacagcgttggcgctgctgatcgttatctccctcctctggacctccttttacacggtacccaccgactcggtcgcggtcgtacagcgttttggccagtttataagggatgacgtgctcccgggcctgcacatgaagatcccgttcggtgtcgatgcaatcaccatcgtgccaatcaaacgccagctcaaggaggagtttggcttcgagacgcccggcgcctcggacccctaccaggtcccgcgcgaggcggaggcggagacgcagatggtcaccggggatctcaatgccgcgctggtggaatgggtcgtgcaataccgtattgccgaaccgcgcaagtttctgttccagatccgcgaaccccggaacaccctgcgggacgtctcggagtcggtgatgcgcgaggtggtcggcgatcgcaccgtcgacgaggtcctgaccatcgggcggcaggagatcgagatcgaggcgctggcgcggatgcaatcgctcgcgaccaagtacgagctcggggtcagcatcgatcaggtgcaactcaagaacgtcaatccgccgaaaccggtgcagggatcgttcaacgaggtcaaccaggcgcagcaggaaaaggaaaaactgatcaacgaggcgcggcgcgaatataaccggatcatcccgctggcggagggcgagcgcgaccagcgcatccgcgaggccgaaggctaccggctggcgcgcgtgaacgaggcggaaggcgatgtcgcccgtttcaacgccgtgatggcggaatacctgaaggccccggaggtgacgaaacgccgcatctatctcgagacgctgcaagaggtcctgccgcagttgcgttcgaagatcgtcctcgacgaggccgggcaacagatcctgcccttcctgcaactcgattccgggaaggtcgattccggagtcccacaaccatgagcgccctgcgaaatatcctgatcgtaattctggcgctcgccgcactcgtgctgtcatccgggtccatgtacaccgtgaacgagatcgagcaggtgatcatcacccagtttggcaagccggtcggcgaaccgatcgccgatgccggactcaagctcaaggtccccctcatccaggacgtgaaccggatcgagcggcgcatcctggaatgggatggcgccacgacggacatgcccaccaaggacaagctgtacgtctccgtcgatctgttcgcccgctggcgcatcaccgacccgatgcagtatttcctccgtctgcgcgacgagcgcagcgcccagtcccgcctggacgacatcctcggcagcgagacccgcagcgcggtggccaagcatgaactcatcgagatcatccgcacgacgaaggatcgcacccccttgcaggatgaatccctgcagaacgcggggagttccgtcggcgtgctggtgcccatcaagaagggtcgcgaggcgatcgaacgcgagatctacgaggccgccgcgcccaaggtgggcgtattcggcatcgaactgctcgacatccgcttcaagcgcatcaattacaacgagagcgtacagccgaagatctatgaccgcatgatcagcgagcgccggcagatagccgagcaattccgttcccagggcaacggcgaggcggcgcgcatcaacggcaaccgcgagcgcgacctgctgcgaatccagtcggaggcctaccgcaaggtggaagagatccgcggcgaggcggatgcccgcgccacggagatctatgccagcgcctacaaccagagccccgcggccgtgagcttttacgaattcacgcgcacgatggaggtctacaagtcggtcatcacgaccaacacgacgctgatcctctcgacggagagcgatctcttcaagttcctcaagggcgtcgaaccggaccagtaacttacgcacgcaaaccagggtatgccgcctatgctgaaatcactccatatcgaagcggaaaaatgcacgggctgtctgcaatgcgaactcgcctgttcctatcgcggcgaaggcgtcttcaatcccgcgaagtcgcggatcagggttttcacctttcacgacgaaggccggttcgcgccctatacctgcacccaatgcgccgaggcctggtgtctgcatgtctgcccggttgaggcgatcatcgacaacccggcgaccggggccaaggaggtcgtcgccggacgttgcgtgggctgcaaggtctgcaccatcgcctgccccttcggcacgatcaactacaaccaggatcgcaagatcgtacacaaatgcgatatgtgcggcggcgatccggagtgcgtcaagtcctgcccgacgggcgcaatcctctttctcgacgcggatcaaaccggcctctcgcgcatgcgcaaatatgccggtcaacagattcacagttaggggggcgattttatggcgtggactgagaagatcctgcgggtaaacctgacccagggcacggtcacccctgaacccctgaacatggactgggcgatgcagtatctcggccagcggggacttgccagcaaatatctcgccgcggagatcgaccccaagtgcgatcccctgagcgcggacaacaaactcatcatgacgaccggaccgctcacggggacttccgcctcgaccgcggggcgttattccgtcgtcaccaagggcccattgaccggcgcaatcgcctgttcgaactccggcggtttcctcggggccgagttgaagaacgccggctgggacatgatcatcttcgaaggccgggccaagtcgccggtctacttgtatgtggaaaacgagacggcggagatccgacccgccgatgcgctctggggccgcaccgtgtgggagacggatgccatgttgcaccggaaacaccaggacccgctgttgcgcatcgccaccatcggccgcgcggcggagaagggctgcctgtatgccgccatcgtcaatgacctgcatcgcgccgccggccgctcgggcgtcggcgcggtcatggcctcgaagaatctcaaggcggtcgccgtccggggaacgcggggcgtcggcaacctcaaggacccggcacgctttctgcaaagtacagccgccgcgaaaaaactcctggccgagagcggagtcaccggcaagggactccccaccttcggcacccaggtgctgatgaacgtcatcaacgaggtgggggcattgccgacccgtaacggcagcgccgttcagttcgatggcgcgagagacatctcgggcgaggccatgcgcgaaccccgcaagacggatcaccggccaaacctcaccaccaacgccggttgcttcgcctgcaccatcgcctgcggccgcatctcgaccgtcgatcgcggccatttcaccatcagcaacaagccggaatactggggcgcctccggcggcctggaatacgaggcggcctgggcgctcggcaccgacaccggcgtgtccgatctcgacgccctcacctacgccaatttcctctgcaatgaggatggcatggatccgatctccttcggcgcgacggtcgcggcggcgatggagttgtaccagatcggcgcgttgaccaagacagacaccggcggactcgaactgaacttcggctcggcggaggccctggtccgggcggcggaactgacggcgaaaggggaaggcttcggccttgagctcggactcggatccaaacggttgtgcgcgaaatacggtcacccggaattttccatgacggtcaagggccaggaattccccgcctatgatccccgcggcatccagggcatgggcctcacctacgccacctcgaaccggggcgcgtgtcatctgcgcagctacacggtctcctccgagatcctgggtctgccggtgaagaccgatccgctggccaccgagggcaaggcggaattggtcaagacctttcaggacgtgaccgccgccgtcgactcgatcgggctgtgcgtattctccaccttcgcctggtccctcgcggacatcgccccgcaactcgatgccgcctgcaagggcgagtggaacgcggcgcggctgctcgaggccggcgagcggatctggaatctggaacgggaattcaacaacgccgccgggtttacgaaaaaggacgacacgctgcccgagaggatgctgaaggaaccggccggaaccggacccgcgaaaggcaaggtgaataatctcgccgcgatgctgccggagtactacaagctccgcggctggacggaggaaggagtgcccacggcggccacgcgccgccggctcggtctcggcgcgtaaagactcgcatgcggcatgtcatcctcggggcgggccccgctggcgtcagcgcggcggagatcatccgtgttactgagccggacgccgagatcaaactgattggcgcagaaccggagccgccttattcgagaatggccctgccatatttactcagcggcaggatcgatgccgccggcactcacctcagaaagacaccgggacattacgccgccaacaggatcgaggtcattcatgaccgcgccactcgcgtcgatccggcgaatcacaccctcatgctcgcagcgaacggaaatatccgcttcgataaattattgattgcgacgggcgcgagtccgatcatcccggccctgcccggcagcgacagcgaaggcgtttatccctgctggacgctggcggatgcgcgcaacatcatcgcccgcgccaaggccggcgccaaggccgtcctgatcggcgccgggttcatcggttgcatcctcctcgaggcgctcgtcacccgcggcgtcaggttgcaggtcgtggagatggcggaccggatgatcccgcgcatgctggaccggaccgccgcggggctgttgcggcagtggtgcgagagccacggcgtcgccattcatacctccgcgaaattgtcggccatcgatcaaaccgcgggaaggctcgcggcgcaactcgaaaacggccgcgcgctcaaggccgatctgatcatcatcgcggccggcgttcgcgccaatacgcaattcctgcaaggcagcggcatcgatatcgacactggagcgctggtgaacgcccatctgcacaccagcgcggaggacatctatgccgcaggcgacgtctgccagggccgtgatttttccacaggccagtacgacgtccatgccatccagccgaccgccgtcgaacacggccggctagcagcgctgaacatgtgcggtagaaacatcgcacatcagggcagcattaatatgaatgtgctggataccctgggactggtgtccgcctccttcggccagtgggatggcggcagcgactccgccgaattcagcgaccctgccggctatcgctatctgaacctgcaatttcaggaggatgtcctcacaggcgcgcaggcggtggggctgattgagcatgtcggaatactccgtggcttgatccagtcgcgcctgcggctcggtaaatggcaggcgcggctgctgcacgatccgacccggcttatggaggcgtatatcggggcgtccagaaatatttcattcttctcccgcgtttagtctcttgcggctcacgatcaaactctacgccggcctggagcgccatctgccggagaacgcgaaagacaatgcggttattgtatcgatctccaatcgagcctcggtgaacgacattctccggctgtataacgtccccatggaccaggcccacctggtgttgcgcaacggggtttatattccccccgcgcagagggacgcgtcaggtttcttcgtggacggcgatacacttgccatctggccacccgtcgccggcggataaatggaatttggggtcaggtcttgcaataacacaagagcatttttccacaccgactcaggtccaggtacggcattgcaagacctgaccctgtgacctgtgactctgctgatactactgacagggaagcagtgattcgggcagtgggagttccggtggtccaccggccgggggcttaccggaatcagccagctcgaaatccgcgacgaacagaaatgggtggcgtggcagcttgttgccttcgcagaagccaaccgtccggtcaaaactcgtgttctcagcatcctgcgtgtcccggtgcccgtggacccagcggtacggattggcgttgccggcgataaacgactggttgccggtgaggatggtgttcgcgaccggcttgcggagcaccagcgatcgaaagcgggtcccgatgatgactgcctgctgcgtcgcagcgcggccgaaaaatctgttgtccactatgatattgccatcatcttcgacccggatgccgtaagtcacatcgcggaattcattgtcgcgaacgacattgtcgcgggcgtgatccaacactaaccccggcaagtacgcggaatcgctgcaatccataaacaaggtattctcgctcatgcgcgaagctatccacacaccgtttttttcaccctcgatggtattaccttcaatgagattgccatccgcgccatagcggcggcgaaaccagttctctggccgccggcgctcgtactcgccgcagttcttgtagaggaagatcgccccggccgagttacccgcgaagtgattattcaagatgcggttgttgcgtgatccatcgatggccaatccctcgcgaccggtcccccacaaccagaaacttatgccggcgaatctaaagggccggccatccggcccgttcaccccatacccgttgttgacgatccggttgcgttcgatgatgttgtctttcgatcccgcctcaagataaataccggtgctgcccgatccttcaatgtgcagattacgcagcgtcactccgctcacgtaaccgtcgatgaaaacccccgcgccacgggaattcaggaacgtactgtcctcaaccatgatatccgagaaggcatggtcgtattctttaccttccgggagattgcgaaatccctgacgggttatccgcacattgttcaggaatccctcgacctgacagttgcgcaccgtgatgttcgacagggacgcagtaaccggggcagtaatcaggattccgatgcgcccgtcggtggtcacgaggcgtgcgccctggcaatcgaatattacattggaagcggtgatctcgattccacccgtccatgcgcacgatggatcgagccgggtgcttgagtctatcgtcaatcgcgcctctgcctgattgcattcaagcagatgcgatgcaggctcgctcactccgcgctcgtcggctgacgcaatgtacaccatggcgagcgcaagcagcctaatgaagatggatttcgacatatctcgcagatttgttgaacacttaatattgataaaattgtaagacagatcaggttcgtcagcccgataaataccacaaatatgccttatgcggattgacgatctgttttggatatgtatgggagagcacgctgacgcagatgggttggtttttcaccaaggcggcactgttgaccctcgtcggcagctgggtcaaggcgccgcgttgcgcggacgcgactggtgaaataacagtgccgaatccgtacgccggtaaatatcggcatccaatccggatgtaccgcccgcagggcggagacggctattgcgccggaatatattgaccgtgcgaattactgtggtcagtctttcggcgagacatcgcgcgactggatgagccattcgccattcacgcgcacgatttcatccaccccgcgcccggatgcggcgatgcgcggcggagtttccggtccgccagcgccgaagaccgtcatccagtaggaatgatatctggcgtgatccgcatccacgaattcgatgtatgagttggggatcatgtgattcatcggcgggaccggttcgccttttgccgcccgctcttcgcgggatttcttcagatcatcgaccatcttcttcaaggccgcgcggccctgggttacgccttggttgccgctgcgaaattgtccatcctccgtaaacaccgcggcataggcctcgccattaaaggaatcgagcgcgcgcacatagcgccacatcaatccctggatctcggcgcgatcctgcgactcgcgcaacacatcggcatccgcggcgaaaacgagggtcaggtgcaggccgcaaaaaaccagaatggcgtaatttaataattttttcatcgttcgctcctcctccaaaaggccaggggatgataactcaatcgattcaaatactattcactgaacaaacgcatttgggcctcgccggt

SEQ ID NO: 2855 - DNA, 23462 bp, synthetic construct
  source 1..23462: mol_type = other DNA
  misc_feature 1..23462: note = Synthetic
ggcgatcgacaccgtcacgcccttgcgctcggtcatgcggtggtaggtctgccagaagccccgatagcggtcgtcgtgctcgacgttgaccacgtcgtagtcacgcccttcctgcaggcgcaggccgaatttttcgatgcgctgggcgatgatggccgggcgcccgatgagcgtggggcgcgcgatgcgctcgtcgaagacgatctgcgccgcgcgcagcacgcgctcttcctcgccttcggcaaaggccacgcgcttgagctgcgcctggcgcgcggccatgaacacgggcttcatcatcgtgcccgaggcgtagacgaaggtctgcaggtggtcctggtaggccgcgatgtccggaatcgggcggctggccacgccgctgtccatcgccgcctgcgccaccgccggagcgatcttcatcatgaggcgcggatcgaagggcttgggaatcagataggtgggtccgaacgagagctgctcgcccgcgtaggctgcggccaccacctcgctctgttcggcgcgcgccagctcggcgatcgcgcgcaccgccgcgatttccatctcggtcgtgatcgtcgtcgcgccactgtccagcgcaccgcgaaacacgtaggggaagcacagcacgttgttgacctggttggggtagtcgctgcgtccggtggcgatgatggcgtcgccgcgcaccgcctgcacgtcctcgggcgcaatctccgggttgggattggccagcgcgaagatcagcggcgtcggcgccatcttgcgcaccatgtcctgcttgagcacgccgccggccgacagtcccagaaaaatgtccgcgccgtcgatgatgtccgcgagctggcgcgcgtcggtcttctgcgcgaaccaggccttggcttcgtccatcagttcggtacggccttcgtagacgaccccgacgatgtcgctgacccagatgtgctcgcgcggcagcccgagcttgacgagcagccccaggcaggcgagcgccgccgcaccggcgcccgaggccacgagcttgacctgcgtgatgtccttgcccgccacctgcagggcgttgagcaccgcggcgccgacgacgatggccgtgccgtgctgatcgtcgtgaaagaccggaatcttcatgcgctcgcgcagcttgcgctcgacgacgaagcagtccggcgccttgatgtcttcgaggttgatgccgccgaaggtcggctcgagcgcggcgatgatctcgaccagcttatcggggtctttctcgttgatctcgatgtcgaacacgtcgatgcccgaaaacttcttgaacagcacccccttgccttccatcaccggcttgcccgccagcggcccgatgtcgcccaggcccagcaccgccgtgccattggtcaccacgcccacgaggttgccgcgcgcggtgtagcgaaaggccgcagccgggtccttgacgatttcctcgcacggcgcggccactcccggcgaatacgccagcgacagatcgtggcggctcaccatctgcttggtgggatggatggaaatcttgcccggcttgggatgctcgtggtattcgagcgccgcgcggcgcagcatcgcgcgcttgtcggcatcggaagagtcggaggtggggttcgtcatgggagtcatggggcgactttaaccaagggcggcggcacgggtgtgcagccatcgggaataatttgcgtacgatcaaatgggcacgtcaagcgaccacgcctgcggcacgcaactggttgcgcccgccctccttggccgcatacagcgcgcgatcggcaccgcgcaggagggtgtcggcatcggtcccgtccccggggcagctcgccaggccgcaggacatcgtcgcttgcaggcgcgccccttcgtggacgacggtgagcgcctcgaacgcccggcacagggcctgcgaccgctcccaggcgggctgcagcgcggcgttctccagcaccagcaggaattcctcgccgcccatgcggcacgccatgtcgccttcgcgcacctgcgtctgcagcagccgcgccagcgcctgcagcatcgcatcgcccgccgcgtgaccatggcggtcgttgatctgcttgaagtggtcgatgtcgatcatcaccagcgtgagcggcgtgccctggcgggcgcagcgcgccagggcgccgggcagggtgtccgacaggtggcggcggttgtacaggccggtgagcgggtcgcgcagggccgcctcacgcagcctggcctgcagcaggctgatctcctcgagctggcgccgcgcctggctccggctctggtgcaggcccagcgcgcgcagatagccgtcgcgcgcgaacgagatcaggaacgtggtgaacaccgccatgcacatgcccgtgaccagcaggctggtgtcgggccgccagcgcagcgggtgcgccagcaccgcgcccagcagcacgcccgccgccagaaccagcgccaggcgccacaggccctgccagcccatgaagacgacgaagttcaggcacatcgccgcgaacaggatgaagctcggccacagcgggaagcccagcaccgccgaccacagcgcgaacaggagggcttcgaggtgcatgacccccagctccgcgcgccgctgccgcgccgaatcacgctggcgcgaggcgtagccgtagaccagctggggaaacagcaggaactgcacgagcatcagcacccaggtggcggtgtccgcctgcacctcgcgcagatgcaccgcgaacaccggcaccagcacggcgcagaagatgctgcggttgcgccagttcatccgcaccatccagtgcacgcgctccgctgcgggagcggccgtgcttcgctcggcgccgggattcagcggcgttgtgtctggcggcattttttcatcaaatgcgggctgagcctttgcacagcaagcgctggcagctacctatgcaatagcatcagggggcttccgtcagcgcatcgccgagcgcgccgacgaggcgatcgagctcggcctcggtgctgatgaagggcggtgcgagctggatgctgtcgccgccatagcgcacgtaaaagcccttgcgccagcacgccatggcgatctcatacggcctgcgccccggttcgcccggcatctgttcgatcgtcaggcccgccgccagcccatagttgcggatgtcctgcacgtgcggcgcgcccttgaggccatgcacgaggttttcgaacaccggcgccagcgccttcacgcgcgccggtgcgtcttcctgctccagcaattcgatcgtcgcattgcccgccgcgcacgccaccggatgcgccgaataggtgtagccatgcgcaaattccagcaggtactcggggcccgcggtctgcatgaaggtgtcgtagatgtccttgctcgccacgcagccccccagcggctgcgcgccgttcgtgacctgcttggcgaagttcaggatgtcgggagtcacgccaaacacctcggagcccgtccagccgccggcgcgcccgaaaccggtgatgacctcgtcgaagatgagcaggatgttgttttgcgtgcagatctcgcgcaggcgctgcaggtagccggcgggcgggatcaccacgccggccgaacccgagaagggctcgacgatgacggcggcgatggtgctcgcgtcgtgcagcgcgatcacgtccagcagccggtcggcgagcgccttgccatcgagcggcggcgtgccgcgatgaaacgagcccagcggcggctgcgtgtgcggcaggtgatcggcctcgatgccctgaccgaaggccttgcggttgcccgccatgccgccgaccgagatgccgccgaagttgacgccgtggtagcccttttcgcggccgaccaggcgcgtcttgcccgcctgcccgcgggcgcgccagtaggcgcgcgccatcttcagggacgtgtctgccgcctccgagcccgagcaagtgaagaacacgtattcgagccccgcgggcatgcgcgccttgatgcggttggcgagctcgaacgacgccgggtggccgaactggaacgcgggcgcgtagtccagcgtacccaccgcctggctcacggcctgcgtgatttccttgcggccatggcccaggccggtggtccacaggcccgagaggccgtcgaagatcttgcggccgtcggcatcggtgtagtaggcgccctgcccactcacgatcatgcgcggctgcgccttgaaattgcggttggccgaaaacggcatccagtgcgcctcgagccaggccgcgtcacggcgcggcgaggcagcggctggggcttcgtccatcacggcgaaatgcatgggggtctccttgaaatggcctccgggccgggcagcgcccggcagagacggtaaaaacggtgcttgtgtcccgacattgtgcgtcgtggcatgctcgcgtgcatgccaggggcacacaaggccatcgccgccatcgatcccgaccgctgcaccggctgcggctggtgcgtggccgtgtgcccgccgcacgtgctgtcgctgcacgcgcagggcgatgcaccgggcgcggccaagcgctcggtgctcgacgatgccgatgcctgcaccggttgcgccctgtgcgcgctgcgctgcccgttcgacgcgatcaccatggtgcgccgggacgcgccctttcactgaccaggcctcaaaacgccgccgggcgccacttgagcaaccggccttccaggcgcgtgagcacgaagtccgccaccagcgccacggccgcaagcaggatcatggccgcgaacacgccgctggcgttgaatgcgccttgcgccgtggcgatgagcaggcccatgccctgcttggcgccgaggaactcgcccaccaccgcgcccaccagggcaaagccgaagctcacgtgcaggctcgcgagaatccacgacatggccgacggaatcaccaccgccgtcgtcacctggcgcggcgatgcgccgaggatgcgcgcgttggcgatcaggtatttgtcggcctcgaccacgccctggaaggcgttgccgaagacgacgaagaacaccatcaccaccgccagcgccaccttggacgccatgcccaggccgagcgcgatcacgaacaccgagccgagcaccacgcgtgggatcgagttggcgatcttgatgtagatgctgaacacgtccgcgagcagcttgttgcgcccgagcaggatgccgaagacgatgccgcccgcgccgccgatcaggaagccgatgacggtttcctccagcgtcaccgcgatctgcacccacagcggcccctgcgaggtgccgtcgcgctgccactcggcgatctgctcccagatcagcgaaggttgtgagtagaagaacgggtcgatccacttgaggcgcgccagcagctcccagccgccgagcacgacgaagagaaacaacaggcgcagcgaaatgatgatccagcggcgccggcgcaatgcggcctgcgcgcgcgccgattcgcgcgccaatgcttcctcgctgagcgaggcgggcaccgcggccagcgagggaagaacggcagtattcatggtggtgctcttcttcagtgaatggcgacttcttcgcgcagatcggcccagatgcgcttggacagctcgatgaaggccggctcgtagcgcacctgcgccatcacgcgcgggcgcggcagatcgaccgggtagacggccttgagcgtggccggacgcgccgagagcacgaagacgcggtcggcaagggcaatcgcctcctcgatgtcgtgggtgacgaagaccaccgagccgccgctcgcggaccacaggccgagcagctcgtcctgcatcagcgtgcgcgtctgcatgtcgagcgcggaaaacggctcgtccatcagcaggatttcggggtggttgatgaaggtctgcgccagcgccacgcgctttctcatgccgcccgagagctggtgcgggtagtggtgctcgaagcccttgaggcccacacgctcgatccactgcaccgcctcgtcgtgcgccttcgcacgccccgcgccgcgaaagatcggccccgcggccacgttgtcgatcacgttgcgccagggaaagaccgcgtcggcctgaaacacgaagccgatgcgcggatcgattccgcccaccttctggcccatcacgtccacctcgcccacggtaggacgcaagagcccggtgatgaggttgagcgtggtcgatttgccgcagcccgtgggcccgacgatggcgacgaactcgccgcgcgccacgctcatgctgaagttgcgcagcgtgacggtggccgtgccgtcgccagagatgaagcgcagggaaacgtcgcgaaagtcgatggccgccgagctgcccggcgcggccgtgctggtcactgcatccatgtcacttggccgcgggcaggtaggtgttggtataggtcttggacaagtcgatgttcttggccttgacctgcggcttgaaggtggaaagcaccttgagcacggtctcgggcccgccctcgggcatgcggccgtcctgggtgaacatcgacagcgagctcttgagcgcggccacgtacagcgccttgtccttgccgtagtagtcgcgcggcatgtgctcggcgatctcctcggcgctgtgggtgtggatgtagttcatcgtcttggcaaacgcgtgcgcgagccgagtcgcctgctccttgtgcgcttcggcccaggcgttggagacgtacaggctgggcgccggatacagcccgcccagcgccgcgcgcgtaccttcctcggtgcgcatgtccaccagcacctgcgcctcgccggtcttgagcatctgcgagaccgtgggctcggtcgtcatgcccgcctgaatgcggtcttgctgcatcgcggcgatgaaggtgttgcccgcgcccacgggcagcagcgaatagtccttggactccacgccctggcgcagcgccaggtagcgcgtgagaaagtcggtggacgagcccagcccggtcacgcccagcgtcttgcccttggcatcggccatgctcttgaacgtcggcgcggccttggtggacaccagctccacctcgcccggcaccttgccgaagacgacgatggcctccacctccttgcccttggcctgcaggtcgatggtgtggtcatagaagccgaccacgccctgcaccgcgccggcgatgagctggttctcggcatccacacctgcgggctgcgactgcagctcgacctgaaggccctcgtccttgaaataacccagggcctcggtcagcttggccggcaggtagatgatcttgttgatgccgcccaccatgatggtgacggtgttcgcatcggccgcgtgcgtgagcggtgcgcccagcatgaagagcgagcccagcagcgcggccagcagcgtgcgacgggtgggggtgtgcatggatttctccttggtgtgcgaatgaggacacggtgactctaggaggcacactctttcaacgcgctttcgctgcatcgcagcatccgtaggtgaaaaccctgaaattcaatgatttaaaccaaatcggcctccagcgcttttgcagcaagcgctgatagctatcaaaatggatagccatgggacgcccccgatgaaacttctgctgatcgaagacaacctggaactcgcgcactggctggttcaattgctgcgcgagcaggccttcgtcgtcgaccacgtggccgatggcgccgcggccgaccagctgctgcgccagggccgctacgacgtggtgctgctcgatctgaacctgccgctgctctcgggcaagggcgtgctgcggcgcatccgcgagcgccaggacgcggtggcggtgatcgtgctcacggccacggcctcgctcgaccagaaggtgcagtgcctggagatcggcgccgacgactatctcgtcaagcccatcgaggtgcgcgagctcgtggcgcgcatccaggcgctcatgcgccgccagatgcctggccgggccaacctgctgagctgcggcgacctgcactacgacctgcgcacgcgccagttcgagtgcgcgggcgtcgagctcgcgctgccgccacgcgagcgcacgctgctcgaaaccctgatgcgccacacaggcgaagccgtctcgcgccaggcgctggtgcagagcctctttggcgtggacgaggacgcgagcgccgacgccatcgacctgtatgtgcaccgcctgcgcaagaagctcgaagccagccgcgccaccatcgtcacgctgcgcggcgtcggctggttgctgcgcgcgcgcagcacatgaaaagcctgcgcctgcgcctggcgctgtggctgctggtgccgctgtcgctcttcgtcgccgccagcagttggctcagctggcgcaacgccgccgccgtggccgactatgtgcaggaccacgatctgctcgcctcggccaaggtgctttccgaccgcctgatctgggaggacaacgccgtgcaggccagcgtgccgccttcggcgctgagcctcttcgcctcgcccgatcgcgaccgggtgtatttgagcgtcagcagcgccgatgggcacctgctggccggtacaccgggatttcccatgcccgcgcagcgcaagcccgagggtcccgatcgcgcgcagtggtacgacacgcagtggcagggcgcgccgctgcgcgccgtgctcgtgacgcgctcgatgtacgacgtggacggcgcgcgagaaatcaccatcgccgtcggcaagaccacgggcagccgcgaccagatgctcgcgcgcctgtggcgaccgacgctgtggtatctgctcgcggccctcgcgctcacggtgctgatttcggcgatcgcgctcaccatcgaactgcggccggtgatgcggctgtcgcgccagctgagggcgcgcgacccgctgcacctggacctcttcgtcgacgcccgcgcgctgcaccgcgagctgcgccccgtggccgacaccatcaaccagtccacccgcctgatcgccgagcattcggccgcacagcggcgcttcatcgccgacgccgcgcaccagttgcgcacgccgctggcgctgcaggcctcgctgatcgaatacgcgcgcagcagcgaagacagtgcattgtgggaaaagctcgcggccagcaaccggcgcctggtgaaggtgaccaaccaattgctgctgctcgcgcaggccgagcgcagcgacgtgcaagcccacctcaccaccatcgatctggccgctgctgcgctggatacggtcactgaatttgatgcgctggcggcaagccgacacatcgacctgggactggacgcgccccttgatgcgggtgccgtactggtgcaggccgaacccgccctgctgcacgcgctgatcgccaacctgatcgacaacgcgctgcgctatacccccgaaggcggccacgtcaccgtgggcgtgcacccgggcagtgcggcagaaccaactgtcacactgaccgtcaccgacgacggacccggcatccccccagaagcccgcgagcgcgtgtttgagcgcttctaccgcatcgcaccccacgccagcgaaggcagcggcctggggttggcgatcgtgcgcgaggcggccagaagcttcggggccgaggtgtcgcttgcggcccatccattgacagagtctggtaccgagatcagcgtcaggtttgtggcgaaaccagtgccgccgatcgtggtggtcgccaactcgaaaaaaccgtgaagaggttggtggcggcgatgctttcaaccgtcgccgttttgtctacggttgctgtcgtagcgcaaactgtcgggcgctgtttaccatctgcgctgcgcgtttcaagcgtacgattttttcgtaaggtttatctgagtccgcctcctgtatgaatttgcacttgaggtcaaaccgtatacgcgcatgaaatgctggcggtcgttaaattgggtgtgtcgtgcaccatacaacgtaaacgcactaccaaattcacagaaccataggttgattgattgacgcgcaacaccaggtgcattgaaatggaaaggcctgacaagttaccttgtcaggcctttgggtacggacggggtcttgcgacccctccttattgcagcaacggctctcaccccggataaccacaatcggggacgagtatagcaagggaggcttcatggcgcagtatgttttcgggctggacatcggtatcgcttcggtcggctgggcggtgctggatgcgcagcgcattgtggacctaggcgtacgctgttttgacaaggcggagaccgccaaggagggcgacccgctcaacctcacgcgacgccaggcacgtctgctgcgccgccgcctgtaccgtcgcgcctggcgtctgacacagttggcgcgcctgttcaagcgcgaaggcctgattgacgacgccaagctctttgcgaaagccccgtcgtggacggaaaacgcctgggagctgcggctgcggggcctggatcatctgctcacgccgctggaatgggcacgcgtcatctaccacctgtgcaagcaccggggctttcactggaccagcaaagccgaggaagccaaggccgaaagcgatgctgaaggtggacgcgtcaagcaggggctcgcgcacaccaaggccttgatgcaggtgaaaaactaccgcagcaccgccgaaatggtgctagcggaatttccgggcgcccagcgcaacaagcgcggtcaatacgacaaagcgctgtctcgcgtgctgctgggtgaggaactggccctgctctttgccactcagcgccgcttgggcaatccgcacgccagtgagcattttgaacaactgattttgggtcatggcgaccgcaagagcggcctgttctggcagcaaaagcctgcactctctggcgccgacctgctcaagatgttgggcaaatgcacgttcgagaagactgaatatcgcgccccgaaagccagcttctcggccgagcgccatgtctggctgacacggctcaacaacctgcgcatcgtcgtcgatggccgcgcgcgccctttgaacgatgcggagcgccaagctgcgctgctgctgccctaccagaccgaaaccttcaagtacaagaccctgaaagccgccttcgtcaaagtcggcctgtggggcgatggcgtgcgctttggcggcctggcctaccccagccaggcgcaggccgaggcagaaaaggccaaggacccggaagaccagtttctggtcaagctgcccgcatggcatgagctgcgcaaggctttcaaggcggcggggcacgaagccctgtggcagcagatcagcatgccggcgctggaagaagacccgacgctgctcgaccagatcgccacggtgctcagcgtgtacaaggatggtaccgaagtcgtacagcaactgcgccagcttgccctgcccgaacccgatgccagcatcgccgtgctggagaagatcaggttcgataagttctccagcctctcgctcaaggccttacgccgcatcgtgcctctgatgcaaggcggcctgcgttacgacgaagccgtggcgcaaataccggaatacggccaccacagccagcgcatagaccccggcgcgaccaggcatctatacctgccgccgttctacgaggcacagcgcaagtacgccggcaagggcgaccgcatcggctccatgcagttccgcgaggacgctgacgttccacgcaacccggtggtactgcgcgcgctcaaccaggcgcgcaaggtcgtcaacgcgctgatccgcgaatacggcagccctgtcgccgtgaacatcgaaatggcgcgcgacctgtcgcgcccgctggacgagcgcaacaaggtgaaaagggcgcaggaggaattccgcgatcgcaacgacaaggcgcgctccgaattcgagcgggattttggctacaaacccaagggcgccgtgttcgagaaatggatgctctatcgcgagcagctcggtcagtgcgcctacagtcaacagcctctagacatccagcgcgtactcgacgaccccaactacgcccaggtcgatcacgcgctgccctactcgcgcagctacgacgacagcaagaacaacaaggtgctggtgctcacgcgcgagaaccagaacaagggcaatcgcacgcctttcgaatatctcaccagctttccaggcggtgaagatggcgagcgctggcgcgcctttgtcgcctgggtgcagggcaacaaggcctaccgcatggccaagcgaaaccgcctgctgcgcaagaactacggcaccgatgaatccaggggcttcatcgaccgcaacctgaacgacacacgctacatctgcaagttcttcaagaactacgtggaagaacacctccagttggccgcacgcaccgatggcgacacggcgcgccgctgcgtggtcgtcaacggccagctcaccgccttcctgcgcgcgcgctggggcctggccaaggtgcgtggcgacagcgaccgccaccacgcgctggacgccgccgtggtcgccgcctgcacgcatggcatggtcaaggcgctcgcggactactcgcgccgcaaggaaatcgcctttctgcaggaaggctttcccgacccggagacgggcgaaatcctcaacctcgccgcattcgaccgcgcacgcgagcactttcccgagccttggccccatttcgcccacgaactaaaggcgcgcctgttcatcgacgacctggtcgcgttgcgcgaggacatgcagcacttgggtagctacgcacaggatgacctagaccggctgcgcaccctgttcgtctcgcgcgcaccgcagcggcgcaatggcggcgcggtgcacaagggaaccatctatgcccagcctgaaaacctgaaacaacaaggcagcacgattgaaaagatcttgctcaccggcctgaagctgcaggacttcgacaagctgctcaatcccgagagcagcgaccacttcgtcgaaccacaccgcaacgaacggctgtacgccgccatccgccgacggctggaagagttcggcggcaaggccgataaggcctttggccccgacaagccgttttacaagcccgacaaaaacggccaacccaccggccccatcgtgcgcagcatcaagctggtgcgcggcaagcaaaccggcatacccattcgcggcggcctggccaagaacgacagcatgctgcgtgtggacgtgttcaccaaggcgggcaaattccatctggtgccggtgtatgtgcatcaccgggtgacgggcttgccggatcgggccatcgtggcgttcaaggatgaagaggagtggacgctgatcgatgaaagttatgcattcttgttctcggtttatcccaatgactttgtgtgtgtacagcaaagaggaaaaccgctgatagagggctattacgcaggcttagatcgcgccaacggaaacatcaacgtatgggcgcacgaccgcgccgcttcggtgggcaaagatggtctgattcgcggtataggcgtcaagaccgccctatcccttgagaaactgaacgtcgatgtgctgggccgcatctaccctgcgccaccggagacgcgccgtggtctggcgtagcgtcgtcatcaaccggccagctaagctcaggcgcgaatatttcgcgctggtggtggagcaggagcagagtgcgcgcgtaccattcgaggacatcgcggtcatcgtgctcaaccaccgcgagatcacgctgacgcacccggtgctctcggcctgcggcgaatacggcatcggcctgtacagcacgggtgacaaccaccagcccaacggcgtgttcatgccctttctgcagcacagccgcgccacgcgcatgcagcgcctgcagctcgacctggacaaacccagcgccaagcgcgcctgggcgcacatcgtgcaggtgaagatcggcaatcaggcgcgctgcatggagttgctgggaacagcgggcgccgaccggctgacctcctacgcgcgccgagtgcgctcaggcgacggcggcaacctggaggcgcaggcgagcgcgtactactttccgcaggtgtttggccgcagctttcaccgcagccagacggggtggagcaacgccgcgctggactatggctacgccgtgatgcgcggcgcctgcgcccgcgccctggtggcgcacggcatgctgcccagcttcgggctgtttcaccgcagcgagcagaacgccttcaacctggccgatgacctgatcgaaccctaccgcccggtggtggatctgcatgtggcccaacaccgaccagccgatgaagacgccgaactccaacccagcgacaaggtcgccctggtgggcctgctgaacgtggacgtggccatgccgcgcggccagatgagcgtgctggcctcgatcgagcaggcggcagagtctctggcgcgtctgtacgacggcggcagcgaacaggcgctggagttgccgcgcctgatcggtctgcggcaacatctgcccgagatgtagcggcgcacgccatgggccgggacacgagacgattcatgcgcatgctggtgttcttcgatctgcccgtggtcagcaaaggcgaccggcgcgcctacacggtgtttcgacgctttttgctcaatgacggctacgacatgatccagttttccgtctacggtcgcatcctcaacggcaacgacgcggccgaaaagcacatgcaacgcctgctcggcaatctgccgcccgaaggctcggtgcgcgtgctaacggtgacggaaaagcagttcgccagcatgaaattgctggtcggcctgccgctgtttcaggaaaaaaaggtcaacgctgcccagattgcgctgttctgaacggcgttttgaaagaacgaaaacccgcgctccgctaagcggggcacgggtttcgcaggggcctagtgtagctatccggggtgagagagggagctacaacgcaggctcacggaccatgcagccgcacgagagtgtagctatccggggtgagagagggagctacaacctttgcaccggactgcttcgcagccggtgaagtgtagctatccggggtgagagagggagctacaactcgcgccgcctgctggtcgaccaagtatccagtgtagctatccggggtgagagagggagctacaacgctcaggccgatgcgtgggcgcgcgcgatcagtgtagctatccggggtgagagagggagctacaaccacgccacccgcgccgggggcgagttggtcagtgtagctatccggggtgagagagggagctacaacatggtgggctacgacctgttcctgctgcagagtgtagctatccggggtgagagagggagctacaacccacactttgcctgcaaagccgtttccaaaagtgtagctatccggggtgagagagggagctacaacggcctgatcggcagactctgattgatgtgaagtgtagctatccggggtgagagagggagctacaacactcggctgcagcggcgctatcgccacgggagtgtagctatccggggtgagagagggagctacaacggcgcgggcggcctggtgctcacggtgaacagtgtagctatccggggtgagagagggagctacaacttcacagcgtgcttctcaacaccgacgccaagtgtagctatccggggtgagagagggagctatgacctcggatgggtgggataaacccacccatccgaggtcagcgcttcgcgcaagttaatcaagaaaaagtttctcgaccgtaccatcgatatttcgaggaacgggcctgtcagaactttcgcgcctgatgggacgcggatgaccgggacttccaccagtgttgcatttgagacccccgacataaaaccatatgccccaatcggagtgtgtgaaaacacttgaccactacattgaggtttcaatccaaagccgctgatgatgtccggcttcaaaccgtccacacaattcccatccatgctggctacatttacccaagccacgcgatcacccgaatcccaacgaaagctctcttcaccgctcgcagattaatatactgtctaaaaatacagttcaacaaccttgacgttcgacccatccctcgcccaagcggccctgcaacaattcaacgccatcgtgcagtccacccccggcctgcgcgtgcgcgaggggcagcagcgcatggcgcagcaggtggctgagaccttcgcgcagacccggcttcgcagtgaagcggacgaggcggagggcgacactcccgagcactccatcgcagtcatcgaagcgggcaccggcgtgggcaagtcgctcgcctacgccgcgcccgcgatccagatggcgctggcgcgcggcacgcgcgtgctgatcgccaccgccaccgtggcgctgcaagaacagctcgtgcacaaggacctgccggcgctggcagctgcgatgcccgagcccttcacctttgcgctggccaaggggcgcgcgcgctacgtgtgcaaactcaagctggagcgcctggcgggcgacgaaggtttcgatgaagacggcctcttccccgaagaaaccgatacacagacgggcacgggcactgcagccgcgcaagagcgccacagcttctacaagggcctggccgatgacctcgcaaccggcctgtgggatggcgaccgcgaccaacttgccatgccgcccgatgccgcgctgtgggccccagtggccgccgtcgcgcacacctgcaccggcaggcactgcccgctgttttccgtctgcacctattacgaacgtcgcaaggagctcgtggccgcgcaggtgatcgtggccaaccacgatctgctgctgtcttccatcggcgcgcggctgctgcctgagctgggcaactgcctgctcatcatcgacgaggcgcaccatctgcccaagacggcgctgtcgcaattcgcctgcgagatggatctctcgcgcctcgcgtggctgcagcagctcgccagccgtgcactgcgtgtgagcgcgcaagtgcagctcgatgacgccacggacctggctgcgtgcgtcagccggctgcgcacggcgctgcaggatgccgagcgcctcgtcatcgacctgtacggcatgcccctgcgcggggctacggcccgggcgcccgccccgggcgcaagccaccgcgcacgcgtgccgcaagggcagctgcccgaggcgctgtccgaggccatcgcgcaggtgctgcaacatgcgggcgagttcctcgaggggctgcgcgccgttgccaaggcgctgcgcgaacacatccgcgacgaaccgcaggacgcgcggcgcctgtcgcagctctatgcccaggtggggcagctcgcgccccggctggaggccatccatgccaccgcttccctgctgctgcaggagcccggcgagggcggcgccccggcagccaagtggttcacgctcaccgcggacccgggcggaatcgtcgtgcgcgctcacgccagccccttgctgcccggcgccgcgctcgcccggcatttgtggtccagcgtgcgcgcggcggtgctgacctcggccacgctcaccagctgcggcagcttcgattttttcctgcgcgaagcgggcctcgcgaacgagccgggcgtgacgacgttgcaggtggctagccccttcgactatccccgccagggcaccttgaccgccagcagcacgctggccgcgccgcgtgaagtggccgccttcaccggccagatgatcgaggccttgctggacgacctcacgcaggtgcaaagcggcgcactggtgctgttcacctcgcgcgagcagatgcgccaggccgtggagcaactgccggatgcgctgcgtgccacggtgctggtgcaggggcagcggccgcgcctgaagctgctggccgcgcaccgcgagcgcgtgacgggtggacaggcgtccatcatcttcggcctgcagtcgtttggcgaagggctggatctgcccggccggctgtgcgagtcgctcttcatcaccaaactgcccttcagcccgcccgacgagcccgtggacgaggcgcgcgccgagtggctgcgcgccagcggcggcgatccgttcatggacctcgtggtccccgccaccgccatgcgcctggcccaatgggtgggccgcgcgatccgcagcgaagacgaccgtgcgcaagtgacctgctacgacaagcgcctgctgcacacgggctacggccgcaggctcctgcgcagcctgcccgccttcacgctgctcgagcgcccggcaagcgcgcacgaaaccggatagagcgctgccatgtccacgccacgcgccacccgccatgttcttcacgccctggccctgggcatggtggcgctgctgctcggctgcgcaagctccgcgcccacgccccgtggcgaagtcaagggcagtcctgcaaatcacggggaactggcccaatccgagctcaaccgcgctgccacgctggcgatgcgcgacaacctgcacagcctgatgcggctcgcgggcaagctctaccggcgcaacccgtcgcagtggcgcacgggtggagccaccagccgcgagcaggcactcgcgcgcatccagagcgccatcgatctgcagcagacatggccggccctgcagggccggcgagacatcgatgccatggcgttcgccatgtcccgcgagttcatgggcgaccgcgtggccgcgctcgtcatggccaccgtggacatgctagtcaccgcccatggtggcaagacggcgttctacctgctcgacaacatcgacgcgcaacacatctacaacgcggcgcgcaacgtcgaaattgccgcgtggattcttgcgcagcggcgcgacgaccgcggcgcgccgctgctgctcgcggacgacatcgcggccgacggcacgcgcaacctgagcttcgagcgcgaattcggcaagatcatcgcgcgcctggacctgctcgccgagcttgccgacgagcgcctgcgccgtgccgcgatcaactacgtgcagagcctgctgggagccggcctgctgcagttcctgccggtgcgctgagcagactgcccaggatttcttgcgcggcagatcgtagagcacgagcaggacgatcgcgccaacaactgaggcgccccagtccgccgacgcctgcactgcagcgcgcgccgctcatcgataaaattgacctttgttttcaaggagcgctgcagcgggccatccagtgcctgtcaggcttgaagacaccggttccctccaacggcgctcacctgttcatgtcgcgcacgcccccgcgcaggtgagatcgatgtctgtcgttgccccccctcccatgaagctctccggcctggagccggtcgtaatcggcgacggttcgctgttcgtcaacgtcggcgagcgcaccaacgtcaccggatccaaggcgttcgcgcgcctgatcatcgccgagcagtacgaagaggcactgtcggtggcgcgccagcaggtggaaaacggtgcgcagatcatcgacgtgaacatggacgaggccatgctcgacggcaaggcggcgatggtgcgcttcctgcgcatgctcggctccgagcccgacatcgccaaggtaccggtgatggtggactcctccaaatgggaggtgatcgaggccggcctgcagtgcctgcaaggcaagggcatcgtcaactcgatcagcatgaaggagggtgtggaggaattcaagcagcacgcgcgactggtcaagcgctacggcgccgccgccgtggtgatggcgttcgacgaacagggccaggccgacacctacgagcggcgcatcgagatctgcgagcgcgcctaccgcattctggtcgacgaggtgggcttcccgcccgaggacatcatcttcgaccccaacgtctttccgatcgccaccggcattgaggaacacgcgaagaacggcaccgacttcatcgaggccacgcgctggatcaagcagcacctgcccggggcgaaggtttcgggcggcatctccaacgtgagcttttcgttccgcggcaacgacccggtgcgcgaggccatccacaccgtcttcctctaccacgcgatcaaggcggggctggacatgggcatcgtcaacgccggcatggtcggcgtctacgacgacctggagccgcagttgcgcgagcgcgtggaagacgtggtgctcaaccgccgccccgacgcggctgagcggctgctggaaatcgccgaaagcgccaagggtgccgccagggacgatggcaagaagctcgaatggcgcggcacccccgaggcgcccgcgccggtggcgcagcgcctgtcgcatgcgctggtgcacggcatcaccgatttcatcgtcgccgacaccgaggaggcctaccagcagatctgcgtacagggcggcgcgcggccgctggcggtgatcgaggggccgctgatggatggcatgaacgtggtcggcgacctgttcggcgcgggcaagatgtttttgccgcaggtggtcaagagcgcgcgcgtgatgaagcaggccgtggcccacctcgtgccctacatcgaggccgaaaaggcggcgcagaaggcggcgggcatcgatatttccagcaagggcaaggtggtggtctgtaccgtcaagggcgacgtgcacgacattggcaagaacatcgtcacggtggtcctgcagtgcaacaacttcgaggtcgtgaacctcggcgtgatggtgccctcccacgagctgctggccaaggccaaggagctcgatgccgacatggtcggcgtctcgggcctgatcacgcccagcctggaggagatgcagcacgtcgcctccgagatgaacaaggacgagtacttcaccagccgccagattccgctgctcatcggcggcgcgacctgctcgcgcgtgcacacggcggtgaagatcgcgcccaagtacaacggtcccgtcatctacgtgcccgacgcctcgcgcagcgtgggcgtggcgcagagcctgctgggcgagggccgcgccgaatacctggcggaaatccagaccgactacgcgcatgtgcgcgagctgaacgcgcgcaagaagcgcgtgccgctgtggacgatagcgcaggcacgcgccaacgccaccccggtggatttcacgaactacacgcccacggtgccgcgctttctcgggcgccgcgccttcgtcaatttcgacctggcggaaatcgtcaaatacctggactgggcgccgttcttccagacctgggacctggccggcgcctaccccgccatcctgcaggacgaggtggtgggcgaagaagcgcgcaaggtcttcgccgacggccaggccatgctcaagcgcatcatcgagggccgctgggtgcaggccaacggcgtgatcggcctgtacccagccaaccgcgtgggcgacgacatcgagttctacaccgatgaaagccgggaaaaagtgctcatgacctggtacggcgtgcgccagcagaccgagaaaaccccggtcaacggcgtgatgcgacccagccggtgtctggcggacttcatcgccacgaaggaatcgggcatcaaggactacgccggcatgttcgccgtcaccgccgggatcggcgccgagaagaaggaaaaggaattcctggatcagctcgacgattattccaacatcatcttcaagggcctgtgcgaccgcttggccgaatcattcgccgaatgcctgcacgcgcgcgtgcggcgcgacctgtggggctacgccgccgatgaaacgctggaccgcgacgcgatgatcgccgagaaataccagggcatacgccccgcccccggctacccggcctgccccgaccacacggtcaagaaaaccctgttcgacacgctgaacgcgcccgaggtcgggatcgaggtgaccgacagctttgccatgattccgccttcgagcgtgagcggcttctacctggcgcacccgcaggccacctacttcacggcgggccagatcggcgacgaccaggtgcaggacatggcccggcgccgcggcatagacgtcgatgaattgcgccaccggctggcgcagaacctggcatgacggccaaggctcggggtcagacgtccagggtgtccacggtctgcagatccacgatctgcagatcgaaaccgctttcgagcgcgcgcacctcggccaggatggtggcgccctcgcttggcttgaagtgcgaaagatagatgggaaacgcccccttcggctgaagctgcgccaattccctcgcaagccccgcgggcgacaggtgcccgctcttgcgcgccagggcctcttcctgattgctgaaggccgtttcgatcaccagtgcgcccacccccggcgcctgggcctgcaaggcattcacgcgcggccagaaggcaggctcctgcccctgcgtgtctccactgaagacccaccacgcgccatcaccgcgcgccgcatagccgacggcgggcacgctgtgacgcgcgggcagcacttccagcgtgacgccggccaccacgaagacatcacccacgcccaagggttgcaactgaaccatgggagcgccgggatgcggaatgcgggtgaaatcgggccagatcacgttgttgaacacgtgctggcgcaaggcatcgagcgtctgcggcaaagcaaacacctgcaagggcgctgcgcgacgggtacccacggtatcgagcaacaggggtagcgcggcgatatggtccaggtgcgagtgcgtgagaaagacgtgggtgatggcgcgcatgtcccgcaccgtgagcccgcccacgcccgtgccggcatccacgaggacatgctcgcccaccaggaaggcggtcgtgcggcagccccgggcgatggaaccactgcatccgagcacgcgcactttcatggcatgtcccgcgtcagcgcaagagaaattccatttccacgtccgccagcaggatgcgatctccggccttgagagcttgcggttccagcaccggccgtccattgatcacgggtgcgacggggccatcgacccgggtcagcacgaagccatgcggccggtgcgtgaccgaagccacgacctcgccgggttttcccagggtggtcaccaccttcgtgagcgccacctcgcgccccgcccccgggccggtcaacacgcggacaaaggcatctcttcgcaccggcgcaggcgagggcgccgacgtgcgctcctgcgcatccgcggttttcgcgaagcgctggcgcgcatcggcgaaacgcacctcgtacttgccgatgatgacctggtccccatcgtgcagcacctgccgctcgacgggctgaccgttgacgaaagtgccattggtgctgcccaggtcctgcacctccaccgtctgatccagcaggtgcagcgccgcatgctcgccactgacggtgaggttgtcgacaatgatgtcgttgttggggcgccgcccaagcgtcgtgcgaggcttgacgagttctacttccttcaccaccgcgccatcaagcaggaaaaccagactgggcatgcgacatttcctcttttgattcattatcggggatgacccgcatccacggatgctgcggcaccggcacgaaccaggagcgcactgatgttgtcacgcccgcccaacgcgttcgcctgctgcacgaggcgctcggtcagtgtgggcaggggtgacggatcccgcagcagcacggcgagc

SEQ ID NO: 2856 - DNA, 23447 bp, synthetic construct
  misc_feature 1..23447: note = Synthetic
  source 1..23447: mol_type = other DNA
taatcatgacgcgttggcgagagaactgctggcagcgggtgaaggcgcgcaggaccgtgcctggcacatgccgatgctggaagactaccaggggcagctggatagtaatttcgcagatatcgcgaatatcggtggtcgtgcggctggcagtattactgcagcctgtttcctctcccgctttgccaaaaaatacgattgggcgcatctggatattgccggaactgcctggaaatcaggcaaggaaaaaggttcgaccgggcgtccagtacctttgctgacagagttcctcaagcagcgtgcggcaaaggcataactggcagcatgacccgcatcgaattcttctttaatgttgaagacaagctgaagaaagtcgccgagctgagtgaaaaagctacggcgaaaggacggcgattgatggtcttcgcaccggatcaggatacggtgcgggcagttgaaaatatgctctggtcgcaatcgcctaccagttttctgccacactgccatacaacgcatgagcttgcagcggatacgccgattattctggattggcaggcagatcagctgccacaccatgatgtgctgattaacctgcaatctgattacccgccgtttttcagtcgctttacacgtcttatcgagattgtcgggcagcaggaagaagacaagataaaggcgcgggtacgttacaagttctatcgtgatcggggttatgagatgcgttcgtttgacgcaagtggagccgctttatgagccagattacagcagagccgggcaagccgcttagtgatgtgctgagccgcatccatgccttgacgcagcaagaccgtgcaagacctgcgttaccggaagacaccatcccgcgcttgatggagtcttatgacggacatcaatctttgcagtttattgatgttgccaatacgcaattgccggcgctgagtgatgcggtggatgaggctgaaccgggtgagtgccagtcacaggctacggcttatcaatccagtccaggcgaaacgcgtactcatgacatgctgacaactgctcggcagcagcaattgctgagtgaaatggaacctgacatcaaggccgctatacagaaagcaatattgagcgagctggttgtcatcgagaaggcgctgaagacgaaactggaacaggatctcatggaggcgctgaagcagcgcatatcctccggtcagtattgattgctggctctcttgtttactgcaggccgattaattggcggtaagcttcggcattcaataattggggcgcatccgtctgccctgcctcaaatttgaagatccagctggcgtatggatcgtcattgatttgctcggggtggtcctgcagtgtttcattgatggccactaccgtgccgttgagaggcgcatgcaggtcagagccggtttttaccgattccaccaggccgcagacttcattttctttcagtttggtacctagggggggaatatccacaaagacaatatcgcccagcaagtcttgggcgtagtctgtgatacccgctagccaaaagccactttcctctgatttgatccagagatgttcggcactgtatctaagattttctggtatgttcatagcatttcacttggggatagtcatcactgtttgttattttcgcatactgtgctgttcaagttgatgagaaagtgtagtgatttactctaatattttttttaactaaatatgctatcttgatgacaaatcagtattttttgattagtatttggcgtaacgtagtaaaaattgcaggggaggatcggctatgaaacgaaaaatcatcatgttgcttgcaacattgtctttcattgcaccatctttaagcgcaacagcagcagacaaatccatacagaatgttgcgacgggtaaaattgccggccagaaaagggttagccatacattggcgccaggcaaggcctctgctggtcaaaataccatagatgcagacctgtttaatacagaggcattgcagttgggttcatccaaggcgctcatcatcaatcaggagacaggggaggttctctatgccaagaacaccgacacccctacgccgattgcttccgtcaccaagctgatgacagccatggtggtgctcgatgccatgttgccgatggatgaatatatcaccgtcagcgaagaagacatcgaccggctgaagggcaccacttcaagactgcgtgtaggcaccagtctgccacgtgctgaaatgttgcgattggccttgatggcttcggagaacagggcggcttcggcacttgcccggcattatcccggcggaatgaaggcgtttgtccaggcaatgaactacaaggcctatggattggggatgcaccagtcccgctttgttgatcctaccgggttgaatagcaataatgtatctaccgcagaagatctggtgaaactggtgagtgcggcctatgagtatgaggaaatacgccaggagagcactactgcgtcacaggcagtttcgatcaatggcagtcgcaatccgatgaattttatcaataccaatgctttggtgcgcaagggtgactgggccatcggtctgtcaaaaaccgggtatatcagtgaggcaggtcgttgtctggtgatgcaggcggaagtaggtgggcagcccttgattattgtattacttgattctgcaggcaagatgacgcggatcggagatgccaaccggattcgtaaatggattgagaacagctacatgactgcacgtatgggttaaccgtacagcattgtcaaataagtgcatagaaataaaaaagcggccaatggccgcttttttattaggcaattacgcgcttactcgctgccagtcttttttgcagaagctttcctgccggctgttttgcgtgtggttgatttagtgccggtcttttttgcaggcgccttttttgcagcgggctttctggcagttgcttttttcgctactgttttcttggctggggctgctttcgccgccttgcttgcaatcagttccagcgcttcttccaatgtcagcgtttccggctcctgacttttactcagggttgcccggatcttgccatgttgcacataaggcccgtagcgacctgaatagacggcaatcgcaccgcctgcaacgggatgttcacccaactccttgatcggtgccggaccgctattggcctgtgccagcagttcgactgcgcgagtcagatcgatagcgaagacactatcagattttggaatggacttgaattttccgtcgtgattgacataggggccgaagcggccgatgttggcgacgatcttcttgccggtttccggatgctgacccaggtcgcgtggcaggtcgatgagtttctgcgccacggccatgtcgacatcagccagcgggatatctttcgggatgctgacacgtttgggttttttcttctcgccttctaccggcatgccgagttgcaggtaagggccataggggccgttgagcaaaaggatgtccttgccgcttgttgcatcgctgccgatgagcttgggctccgcaggggctaatccttcattggtgttgcggagatagtcgcaggcaggataaccggtgcagccgataaacatgccgtacttaccaagacgcttgctcaaaggtttgccgcatttcgggcagtcctcgccagtcagttcatgcgtcatatcggcacggtcgatattggctttttctttcacctgctggttgaaatcgccccagaattcctggaggacaggtatccattcgcgcccgccctcagcaatctcatccagttcgttttccaagttggccgtgaaatcgtaatccacataacgcgtgaaatgctgcgtaaggaacttgttgacgacgcggcccacatcggtcggtgtaaagcgctttttatccagcaagacatattcgcggtcctgaagtgtcgagatgatgctggcgtaggtagatgggcggccaatgccatattcttcaagcactttgaccaaactggcttcggagtatctgggaggtggttcggtgaaatgttgatcgccgaaaatcttgctaacatccagtacttcgcccgtctccagcaatggcagtttgctttcgccttcctcttcttcatcatcaatgccttccatgtacaccgcgataaaacccgggaataccatggtttgaccagtggcacggaacaggttggcatcggaaccgacagccaaatctacgctaacagcatcgaatttggcctgcgtcatttgacatgccagtgcacgcttccagatcatttcgtatagtttgaactgctcatccgtcagaaaggcacgtacgctggctggtgttcgtgagatatcggttgggcgaatcgcttcatgcgcctcttgcgcattcttcgccttggttttatacatgatgggcgatttcggcagatattcggcatcaaaggttttcttgatgtaatcgcgaatctgcatcaccgcttcagtggccagactgaacgaatcggtacgcatataggtaatcagacccacagtaccgccgcctacatcaataccctcatacagttgctgtgcgatgcgcatggcccgactggtagtgaaacccagtttacgtacggcttcctgttgcagcgtcgaggtggtgaatggtgctgccgggctgcggcttttttgtttcttttctacgcgtgaaaccgttgtcttgccggcactggcaactaatagcttgccaacaatttcttgctgctgctcatggttgatgatggtgaattgctcaaccttattcccattcaacagcactaatttggccccgaaagcgtgctgatgcttgcgcgactcgagatggatagtccagtattcctggcttttgaaagcctcgatttccagctcgcgttcaacgatcaagcgcaacgccgggctctgtacacggccggcggaaagtccgcggcgtatctttttccagagcaatggcgacaagttgaagcccaccaggtaatccagtgcgcggcgtgcctgctgggcattgaccagaggcatggaaatatcgcggggtgtagcaatggcttcgttcactgcgcttttggtgatttcgtgaaacaccacgcgtttgaggatcttgtctttgaccagttttttattcttcagaatttcggcaatgtgccaggaaatcgcctcgccttcgcggtccgggtcggtggccagatagatggcatctgcctgcttgacggctttggcgatggcatcaacgtgtctggcgttgcgctcgatcacttcgtatttcatggcaaagtcgttttcggtatcgaccgcacccgatttgggtatgaggtcgcgcacgtggccataggaggcgagcacttcgaaatccttacctaaatacttctttagcgttttggctttagagggtgattcaacgattagcagttttgacattcggtttagccagagtgactatttaatgaaggatgcggcagataataagagcaaacgcgccgctatggaaggggcatctggcgagcaatggataatttcatagtggaaaatcgtcaaaaacacagggtatgatgctagccatgagccgctctggacaacatcgctatgcctattacctggctattctgattttattggttttttttggcgaaattttttggctcaggcttttttccccactggagaaccgtctttccgatgcactgattgcgcatcatgcgcaaatcccgcaagcacaattccagccggaccctgatattgtcatcattgatatcgatgagcgcagcctgggtttgctggcagaaagtgtcggccgctggccttggcccagagcccttcatgccgaactgctgcaaggcctggagcggcaacaacccagagctgtgatttttgatgtgctgttcagtgaccccgacctgacacggccagaaagcgatgcctatttttctgagattgttgccgccagccgcaacagctttttccccatgttgcgcctggatggcgctgatcatgcacagggtattcctctggcgcaatatggtgcatttcttggtgtagtgccaggcgagcatgctgacccacaggccagagtggccatggtgttgccgctacctgccatgctggaaaccggcaggctcggtacgcataatgccgtcgcagatggtgatggtgtggtgcgccgttatcccatgtatttcgatgaggccggctggcagttgccatcactgccattgaccgttgcccggcagctgcaatttgaaaacctgccgcatcaggcagacatcattcttaactggcacggcaccgccttgtcgtaccggcgtgtcagttatgtcgatatttacgaagattttcagcgtgcacaacccaatcgtgctgtggacgaattcaccggcaagattgtcatcatcggtgccacggccaatggtctgcatgatgtacggcaaaccccggtggcggcttttcatcccggggtggaaatactggcgacagcaatcgacaatctgaagaatcaaaatcccctgcttcgggtgcctgtctatgtccagacagccgccgctgtgattctgctcgggctgctggcgtttgctttcgctgcctgtcgccgtattttctggatcggtctggcactggcttttaccactgtcagtttgattctcgtgcaattctgggtcttgcgctggcaatggctattaccgttgctgacagtcgtgatctttgcctgggtttattatgtcgccgctgcaatgatcgaatatctgcatgagcgcaaggcacgtcaacgggcggttgagaccttcagcaggtttcttgacccgcgtgtcgtgcaggcgctggttgaaaaaggcgagaccaccgaatcgttgagcggcaagagtcagcagattagtgtgctgttctccgatatccgcggcttcacgacactatctgaaaccagcagcccggagcagattgttgaattgctcaatcgctactttacgctgcaagccggtgctatattcaagcatcagggtactctggacaaatatataggcgatgccatcatggctttctggggtgcaccggccgagcagccggatcatgccctgctggccgtggccgccgcgctggaaatgagcgagcgccttgagcagttccgtactgaggcgggagaactggccagcgaacttgatatcggcattggcgtgcatagcggcaaggcggtggtcggttttatcggctcggataaccggcaggattacactgccattggagatacagtaaacttgtccagccgtatcgaaggcttgaccaagggcgtggccagagtgctggtttcggaagacaccatgaagctttgcattcagcgcggggaggcttgccctttcgagtttgaggacaagggcagttttgctgtaaaagggcgagcgcaggcagtgcgtttgtatgaaccgaggaaaaaacaatgatcaatctcaaatcagtaaaactttatcttcttgtgttattgctggggacattgtttggctttggtcatgttgcgcagttgcaggcggctgaggccggcagaacaatagtagctgcagaccttaagcagcagccgtttattgatgcagtcacagttgtcaatctgcctgccaacactatgctggaagttctcacgcgccagggtgcctggatgcaggtgaagtcaggtaccggcgagggctggttgaaaatgaccgcagtgaagctgggcacaactgcagcgacccaagaaaaaggtgctaacgggctgagcacgctggttaacctggcaaccacaggccgctcgggaagtagcggggtgacggtgacgaccggtgtccgtggtctgggtcaggaggatttgaagaacgcccagccgaacccggaggccgtaaaaaaaatggaaagcttcaccgctgccagaaacgagacagcagcctttgcttccggcgccaaattgcagtcgcaaacacttgaatatctgagtgcgtcagcggcagtatctgccagttccaattctacgactaactttggcggggggcgttaatcatgctgaaacgtattgctctggcttttacgcttatgctggcctgtactgctgtccatgcttttggccttaatctggaaaaactgactaacatcatcagcaaaacccaggagctgaaaccggtagagacccagagtgaagtcgatatcggcaaaggggtggcagccaatctgctgggcgcggctcctctggtcaaggatgacaagctgcaggcctatgtcaaccggctgggctggtggctggtgcagcacaccgagcgcaccgatcttgtctggcatttcggcgtgctggataccgacagcctcaatgcttttgctgcgcccggcggctacgtcttcattacgcgtggtttgctgctgaacatgcgcaatgaggcagaactggctggtgtactggcgcatgagatcgcccatgtgctgcaacgtcatcatctggctgcaattcagaaaaatgcacagaccggcatcattgccgatctggccagcatagccgccgaatcttcccagtacggcgcggttgccgataaagccatcagcgccagcaccgagctatatgccagaggtctggacaagagtgacgagtatgaggctgaccgcatgggggtggtgattgccgcccgtgcaggttacgacccttacggcttgccagccgtgctacagacgctggatggcatgaacagtcaggatgcagggttggccctgatgttcaagacccacccgacaccacaaagccgcttacagttgctggatagggcgatgaccggcaaactcgaccagctgaaccagcagaagcaggcggcagaccgctttgtaaaagtcgtcggggcttatgccgggaaataatgcgcgagtaaataacgactatgctggcaggcttattcggccatggctggtttgcgtacgaactcgatgcggttctcgctggcgctggctagcgacagcgccggttcctgcgcaatatcgccaaacagcggatcttcatcttccggctgcgcagtgctcagattcttgaaatcataaagttcggtatcacacaaatgcgatggttccacattcgccatggcacggaaaatattattgatacgtccgggctgttccaactcccaggcattcagcatctccttcaccttttgtctttgcaggttttcctgcgagccgcaaaggtcgcacggaatgatagggaactgcatgccgcgcgcgtaactggcaatatccttttccgagcaataggccagcggacgaatcaccatgaactcaccgcggttggttgccagtttgggtggcatgcctttcagttttgcaccgaaaaacatattgaggaacaaggtctgcacgatatcgtcacggtgatgccccagcgcgatcttgttggcgcccagctcctgtgccgtacggtagataataccgcggcgcaaacgtgaacagagcgagcaagtggtcttgccctcggggatcttctccttgacgatggaataagtgtccgcctcgacgatgcgatattccacacccagcttttccagatattcgggcagaatgtgctcaggaaagtttggctgcttctggtccaggttcatcgcaatcagcttgaaattgaccggcgcacgttcctgcagggccagcaacaacatcagcatggtgtaagaatccttgccgccgctcatgcagaccagaatagtgtcgccatcctcgatcatgttgtaatcgccaatcgctttgccagtagcgctgatcaggctgttgcgcaacttgaggaagttgccggagacgttgtcggggtaatgtttcatggcgtgcagacaaactacaaagcaaatgggagtgtaattttaccggaatgacggcgatttgctgaaaaatcaatcgaatgggtttatatttgagttaaaaatgaaaagcccagcatattgctatgctgggctggatacagaatcttacgattctttattgtagcaacggctctcaccccggatgagctacagaacgaataataaggaataagaaaatgcaaggcaatcaaaatctaggcccgctcaccatcggattggacattggtattgcttcggtaggttgggcagttttaggggaaacacgcatcattgatcttggcgtgcgctgttttgacaaggcagaaactgccgacaggggagagtcactcaatctggcacgtcggtcagcgcggttgttgcgccgtcgtttgcgtcgccgggcatggcggttgaccaaacttgcgcggctgttgaaacgtgaagggttgattgcagaggtaagtgtgctgaaacaaccgccatcatcgggattcaaaactcctgatttgtggaaattgcgtactgaagcgctcgaccgcaagctcgatgctgaagaatgggcgcgtgtgctgtatcacctggtcaaacatcgtggttttcactgggtcagcaaggcagaagaaaagaaagctgatgatgataaagaaggcggggcagtcaaaaaaggcttggccggcacgaaaaaactcatgcaggagaagcattaccgcactgctgccgaaatggtgattcacgaatttccagatgcgcatcgcaacaagcgtggcgattatagcaagtcactatcacgtgtattgctggctgacgaaatgatgagactttttgagcgtcaacgtcagttaggaaatccgcatgtcagcgagaaattgcaaaaagtcctgctcggccatggagacagaaaaagcggcttgttctgggcgcaaaaaccgtcattgtcaggcgaagctttgctcaagatgctgggcaagtgcacttttgaaaaagacgaataccgcgcacccaaggccagtttcactgccgagcggcacgtgtggctgacccggctcaataatctgcgtatcgtggtggatggcaagatgcgaccgttaacctccgcagagagaaaggtcgcattgcttttgccctatcagcaagcgactgatttcagctacaagcaactgcgtaaggtgctactcaaggcgggcttgtccgatgagttccgttttgtcggactggcttatccgagcgaacggcagaaaacggaagaaaaagccaaggatccggaggatgaaaaactggtcaagctgcctggctggcagacgttacgcaagacgctcaaggatgccggattggaagccgaatggcagcaaatctccgtcacagcattggacggcaggccgcaactgttggatgaaattgctcgggtacttacggtttacaaggaggacgaggaggtcgagcgtgagttgtccgggctggatttgtcgaacaaggaaagggtaatcgcagtgctgctgacgacccgtttcgataaattcagcaatctgtccctgaaagcgctctacaacatcctgccgcacatggaggcgggaatgcgttacgacgaggcctgcttgcaggccggttatcaccatagtcaattgtatgaggtcggcgctggcgagcataaatacctgccacccttctatgccggacgagacaaggatggacgacttaaattcaacgaagagatggacattccgcgaaatccagtcgtgttgcgggcgttgaatcaggcgcgcaaggtagtgaatgcactagtcaagaaatacggtgcgccacatgaggttcatatcgaaatggcgcgggatttgtcacgtaattttgacgaacgacgagatatcaaaaaggctcaggatgagttccgcgataaaaatgaaatcgtgaaaaagaaatttgaagaattttacaaaaaacctgccaaaggtcgggatttagagaagtttcagctctataacgaacagcaaagtaaatgtgcttattctctgcgaccgctggatatcaatcgcttgtttgagccggggtatgtcgagatcgatcatgcgttaccctattcgcgcggctttgacgacagcaagaacaatcgtgtgttggtgctggcaaccgaaaaccgcaacaagggaaacatgacgccatttgaatatttggatggtaaagagaatagtgaaaattggcgccaatttgcagcctatgtgaattccaacaaactctatcgtcaggccaagcgtaatcgattgctgaaacgagacttcgacgaaaaagaagcgcagggcttccgtgaccgcaacctcaatgatacccgctatatttgtcgtttcttcaagaactacgttgagcgttacctcaaactacatgacgaaagcgaggtcaagcgttgcattgttgtcagcggtcaattgacttcatttcttcgtgctcgctgggggctggtcaaagtgcgagcggactccgaccgccatcatgcgttggatgcggctgtggtcgcggcttgcagtcatggtatggtcaaacgcctctctgattactcacgccgcaaggaactggaacaagtgcgcgaaggcttcatcgatatggaaaccggagaaatcatcaaccctgccatgctagaacgattggaacagcatttccctgcactttggccacatttccgtcaagagctattggcaagactcaacgaggacaatctggctgccctgcgtgccgagatcgaacaccttggcagttatccgccggaggcactggacgaactgcgcccgctgtttgtctctcgcgccccgcagcgccgaaacagcggtgccgcgcacttggatacgatttattcagtgccaacagccgataaagaaaaacctggtatcgtcagagcagatagcgccatacaacgaattgctgttaccaggctaagtgagaagcaactggatgacatcgttggtcgtcatgatacccgcaatgccgacatgattgcagtattgagaatttggctgcaggaaagggaggccagagaaaagcgtgctaaggaaattgaggccggaacaggtcgcgggaaagaaaaacgtgaattaaccaataatgagaaaagagaaatctcccatctacgggagctgcctcgcaaaccaacaaaagatggctctcctgggtcaataatccgagcggttaaagtcaatattggcaagatgagcggtatctctatccgcgatggattggctgcgcaaaaatcgcttctgcgagtggacatattcaccaaggcttaccgtttttacttggtgccattatatgtagcggacatcgtacgaagaaatcttcctaaccgaacagcggatggcgaaacaatcattgacgatagcttcaaatttcttttttctctccaccctagcgaccttgcaagagtggcgttgaaagggaaaggttcgattcttggctacttcaggggatatggcggtcctccaaacccttacaacatcacgctccttatacatgaccgtaataagaatgggcatgaacgggctaacgacaaaggagaaatacccagcataggcatcaagaccgcattaaacattgaaaaattcaacgtagatatcctcggcaatatctacctcgccccgccggagcagcgccgtgacttggcgtagtgttgtcatctcacgtccggccaaactgcgccgggaacattactccctcgccatcgagcaggaaaatacagcatttgttccgttcgaggatatcgccgtcatcctgctcaaccaccgcgaaatcacgctcactcaccccgtgctttccgcctgtggcgaatacggcatcagcctctttgccactggcgacacgcaccaccccatcggcgtatttctgccctacctgccgcactcccgcgccacgcgctggatgcggcttcaactggatttgcctcgaccggttgccaagcaggcctgggctgccatcgtgcgtcagaaaatcgccaatcaggcagcctgtttaaatttggcgcaacgtgaaggcgcagacaggttggagtcttacgtcactagagtaaggtcaggtgatgcggaaaacatggaaggacaggctgccgctttttattttccgcagttgttcggtaaagggttccgtcgagccgaggatggctttgtcaatgctgcgctggattacggctacgcagtattgcgcgcggattggtggcgcatggcatgctgcctgctttcggtatttttcacgccaacgaacagaacgctttcaacctagcggatgatctgatcgaacccttccgcccgctggtggatttgtgcgtaaaaaatatgagccctccgcccaacgataaattgcagccacaagacaaggcaacgctggtcaatctgctcaatgtggatgtcgccatgctgcgaggtagaatgtcagtgttgtccgccattgaacaggccgtggagagtctggcaagaatctacgatagcggtgaccccggattgttggagttgcccatattgattgggctggagcagcaccgcttagagtattgaatatgagcggggagaacaggcgattcatgagactcatggtattttttgatctccctgtagttaccaaggcagaacgtagagcttacacggtgtttcgtcgttttcttatcaatgatggttacgacatgatccagttttcggtatatggtcgattggtgaacggcaatgatgcattggaaaagcatatgaagcgactggtggataatctgccgcccgaaggttcgatacgctgcttgagtgtgacggaaaagcaatatgccagcatgaaactgttggtcggactgccgctttttcaggaaaaagcggtcaaatccgaccagatgttgctgttctgataacggatttttcaaacaaaacgcccgccagatggttgtctgacgggcgttttgttgaggtctattgtagttcatccggggtgagagagggagctacaacgcgttaatcatctcactggctgcgctatggattgtagttcatccggggtgagagagggagctacaacgccaccaccgcccttgccgccgccacctgcattgtagttcatccggggtgagagagggagctacaataaacttactaaaagccggcccgatattgcgcagcagtatgctgtgcaatatcgggcaaattttttgaacctagagattcagcgacctgccaccatccaccgcaattacttgcccggtcatgaacggcgcatcttgaatcagaaagcgtacagccttggcgacatcatcgccttcgccgatgcgttttagcagggtctgcgagatgactctttttcggtagacctcatcgaattgcgggttgtcttctggccacatgacaggcccgggggcgacggcattaacgcggacatgcggcgccatttcatgggccagggacctggtcagggtgaccaggccggctttggcgacactgtagacgatataaccttttttcgggcgttccacatgcatgtccgtgatgttgacaatgcagcctttggttttggtcagctcgctggaagccgcctgcgacaggaacagtggcgctttcaggttggatccgatcaggtcctgccattgatcgtcgccgatctctcccagttcggtagcgtagtagctcgatgcgttgttgatcagtacgtcgaggcgaccgaaatgattgacggtttccttgatcagctttggcagcacggccagattaagcaggtcgccatggatgatggcggcagaattcggtcgctttagattgagttcagcctgtagtgcacgtgcttcggcagcggattgtcgatagtgaatcatcagattggcgccgccggcgtgcagcatgcgacaaattgcggcgccgacgcgtttcgctccgccggtgatgaggatgactttgtgcttgagatgattatctgtgctgacgctcacgctgatttccaatgattgttttcgctttcaaaaaaactggctttgcttgtaagccattataattccagtctatgaaccctaccttacctgcgcccgagacggaagcccttgcacacagcgaattgctggcgcaaagaatcagaacggagattgccgggaatcagggctggatcgattttgcccgctacatgcaacttgcattgtatgcgccgggactaggttattacagcggaggggcaaaaaagttcgggcatggcggcgattttgtcacggcaccggaaatatcaccgctgtttgcgcaatgtctggcaaggcaggtggcacaggttctggacgctacgcaaggcgatattctggaactgggtgcaggtaccggcagcttggccgccgagctgttgcttgagctggcttgtttggagaatctgcccgggcaatatctgatactggaagtaagtgcttatttacgtgagttgcagcagcagacgctggcagcaaggttgccgccagcgcttttaagcagggtgcagtggctggatagtttgcccgagcacttcagcggcatgattctggctaatgaggtgctggatgccttgccggtgcatgtcgtcaagacttcggctgatgggccgctggaacttggtgtcgttgccagtgagcagggttttgtctggtcggagcagacccttaagcatgaggtgttgcaggatatggttgtctcattggatttgccagtcggttatgtcaccgaactctgcccggcggcgagcgggctggtgagtagtctcggccggatactggatgcaggtgtaatgttgttgatcgactatggttttccgcgccgcgagtattatcatccgcaacgcaaccagggcaccttgatgtgccattaccgtcattatgcgcattctgatccttttctctatcccggtttgcaggacattacggcgcatgtcgatttcagcgctgtcgcacagactgcattggcaaatggtctggaattgaagggctattgcgggcaggcgcagtttcttatcaactgcggcattacagagctgctaagtcgtgtttcaccgcaggatatggcccgttatgcgccgcttgcatcacaggcgcagaagctgctctcgccggccgagatgggtgagttgttcaaggtggtggcgctgggtaaagcgtgtgagtgctcgctactcggcttcgtgcggggtgatcgctcgcatacgttgtagcggagcaatcgacaaaaacgccccgaatgactcaggtataatcgccgccttattattgagcgcaggtcatcatgtccgaaaaagacgacacccaaaacgaggatttgaagcgtcggccgatacgcagttttgtcttgcgtcagggtcgtctgacgcctgcccagcaacgggcgattgaaaccagtctgccgcgttttggcgttgcctatacaccagaactgctggatctgaatgcgttgttcggtcgagcgggtagtcgcaaggtgctggagattggctttggtatgggcgacagtacggcgacgattgcagcagccaatccggatatcgactatctgggtatcgaggtccatggccccggcgtcggcaatctgctcaggctaatcgaggcatcacagttgagcaacttgcggttgattcagcacgacgcagtggaagtgctgaacaacatgatcgccgatgcttcgctggatggcgtgcatatcttcttccccgatccctggcacaaaaaacggcataacaagcggcgtttgttacagtcagcgttcatcagcatgctgtgcggcaagttgaaagcgggtgcttacattcatgtggcaacagattggcaggcgtatgcggaatgggcgctggaggtattgcaagctgagccgttactggaaaataccgtgaaggattatgcgccgcgaccggattaccggccgctgaccaagttcgagaagcgcggcctgaatttaggccacggtgtctgggatctgatctttattcgcaaataaccactggccgatgatcttctcggcttcttccacaccttgcttcttcagactggaaaagagttgtaccgtgcaatttccccaggtctcgaccagctccttctttaccgcctgcagggtctggttggcggcgttgcgcgagagtttgtcggacttggtcagcagaacatgcaccggtttgccgctggggcagaaccagtccagcattttccggtccagaggtgtgagcggatgacggcagtccataaccagcaccaggccgcgcaaagaagagcggtaactgaggtaggatgaaagcgtcaactgccagtgctcgcgcatggcctgtggtactttggcataaccgtaaccgggcagatcgaccagaaagcgctcgtcgcccagagcgaaaaagttgatcagctgcgtgcgcccgggctgtttactgacataggcaagccggttgtggttggccagggtgttgagggcgctagatttgccggcattggagcgccccgcgaatgcgacctcgatacccgcagggggaggcaggtcacgcaggttgtgcgcggagatgtaaaagctggcattttgaaacaggggcatgagagataaacttataaagcgctgaaagagtggaaaatgctatcacgatatgtcgcttttcgataaaatagtccgattattgttatgtaaccatttctgtatcaactgttgagtactgaggagtcgggtatgagtttccgtatatttgcggcatttgcgttaggtttgttcagtgccgtttctgccaatgctgctggtgatgcggccaagggcgccactattgctaatcaggtttgcctggcttgtcacggtgctgatggcaacagcacgattgccatgtacccgaatctggctgctcaacatccggaatatattgccaagcagctgaaaaacttcaaatccggtgaacgtaataatgcagtgatggccggcatggtcatgacactgacacctgaagatatggataacctcggggcgtactatgcaagccagacagccaaaggcggcgcagcccagtccaatggcaagggctctgctggcgagaaaatattcaaggcgggcattgccggcatgggtgtgccggcctgcgcatcctgtcatggacctgcaggtgctggtgttccggttcagttcccacgtatttctgggcagcatgctgaatacaccattgcgcaattgaagacctttcgctccggtgaacgtgccaatgacgcggccaagatgatgcgcatgattgctgccaagctgagcgatgaagatattgctgcagtcgctgattacattcagggcttgcgctaagcgaacagatatcaatgaggtgatggttaagggtggcgtttgccgcccttaattttattcagcgttacgcatttcaagcgctgatcatttgatactgctcgccaggcaactcatgggcagcaagattgtcctaaaccagattaccgaaactcgactgaaacgatcaaaccttgaagtcacgccaaactacttccaaacgcatttatgagctattaagttccatgcgcttcgccgtcagcctgttgacggtgctgggtatagcttccatcatcggtaccgtgctcaagcagaacgagccctacaccaattacattgtgcaattcggccaattctggttcgagctttttgaagttctgggactttatgatgtttatcacagcgtctggtttctgctgattctgctgtttctggtcatttccaccagtctttgtgtgtatcgtaattcccccaccatgttgcgcgagatgcgtgtctggcgcgaacatgccactgagaaatcactgcgcgctttcagtcatcagcacgaatatcagacgagcgctacaacggaagaaatcaaaacaaaactttcacgttttctgacgacacgtggtttccggtttaaaacggtacagcacgaggatggcggcgaactgatcgcggcaaaagcgggtacttatcaacggctgggctatatttttacacacgcggccatcgtcgtgatctgtgtgggtggcctgatagatggcaatgtgccgttcaaggtgcaggaactgctaggttacaaaaaggttgaaacgctggatgttgccgcttcggaagtgccctccgaaagccgcctgtctgtcgcgaacctgtcatttcgtgccaatatgaccctgcccgagggtagcagtgccgatgttgctttcatgcgcatgcgcgatggttatctggtacaggagctaccattcagggtggcgctgaaggattttcgtatcgaacactatgccactggccagccaaaatcgttcgagagcgacctggttatcaccgacccggacttggcagaaccgctggaagccaccatccgtgttaacaagcctttaatttataaaggtatcgcgatctatcaatccgactttcaggatggcggctcaaaactgaatttcaatatgtggggactgttcagccatcagcaggcgccgttaccggtcaagggcactatccaccaggaagtgacgctgggtgaaggcgatgccgcactcacgattgaattcgacgatttccgtaaattcaatattctgaacctttctgccgatggcaagggcaagccgcagaacgtcggccccaatgtcacgttcaaggtgcgtgatacacaaggtcaggcgagtgagtatgtgagttacatgcagccgctgaagctggataatcgacactatttcgtttccggcatgcggcctaatctgcaggaagaatttaaatatttgcgtatcccggtagatgaagatttcgagattgagggttttatgcgcttgcgtgcggtaatgatggacgcagcctcgcatgccgaaatcgcccgtcgactctctgccactgctttgacaggcgatgccgccaatgcagacatgaaggaaaagtttgaatccagcgttcggcaattgctcgatgcctttggcaaaggcggatacacgcggattgccagcctgattgaagagtcggtgccggaaaaagagcgcgataatgccgcgcaaacatacatcaagattatccatggggcggtatttgaagcatataacctggctcgtcaacgggcaggtaaatcaccagcaccagcggacgaagaaaccatgctgtttctgcaggacagtctgaatagcctgagtgacctgttcttttatggggcaccgttctatctggaattgaaggaatacgaacagcgggaggccagcggcctgcaattgacgcgttcacctggcaagaatctggtctacagcggttctgtcctgctggttctgggtatttttgccatgatctatattcgcgaacgccgaatctggttgttggtcaaacccgataatcgtgtattgtttgccatatcctccaatcgcaaaaatcgcgacctggatatcgaatttgcgcgctatcaagagcaactgcaacgcctgctgacatagcttgccaatctatttttggggaataccatggataacgtcttgattaatgatgagccaatcccgctttttaagcgtctggactggaaagactggctatatgccatcgtgctggtagctggagccctctttgccttcaatcaatataaccatcatatggatgtttatgagcagggctttctatttggcgccgcactgactttcagctggcttggctgggtctggaagccggcgcgtattctggtcatgggtatcggtgcggtcagcctctttgccatttttctctatgatgcggatttgcagagagcggaacaggtctttttcctcaaattcctgatctcaagccagtccgccatcatgtggatgaatgtgttgttcattctggctacggtgacttattgggtggctctgtataaccgctctgaattcaccgggaaatttgcctcagcacttgtctgggctgccgtgttgatgggctttgtcggcttgatggtgcgatggtatgagtcctacctgattgcgccggatgtcggtcatatcccggtcagtaatctctacgaagtttttatcctgttctgcctgattactgcgctcatgtacctctactatgagcagcgttacgccacccgtcagttgggcggttttgtcatgctggttgtcagtgctgctgtcggctttattctttggtatatctttgatcgacaagcatatactatccagccgctagtgcccgcactgcaatcctactggatgaagatccacgtgccggccaattttatcggctatggtacattttcattggcggccatggtcggtgctgcctacctgctctcggccaaaggcatcctcacgtcacgtctgccgtcgcttgataccatggaagatgtgatgtacaaggcgatcgccatcggcttcgcttttttcacgattgctaccattcttggcgccatgtgggccgcagaagcttggggtggttattggtcatgggatcctaaggagacctgggccctgatcgtctggctcaactacgccgcttggctgcacttgcgtatggtcaagggtatgcgtgggccgattctggcctggtgggccgtcattggactgtttgtgacgacctttgcctttatcggcgtcaatatgttcctttctggcttgcattcttacggcgagctataaaagaacggcaataaaaaaccaggcatcttcgcctggttttttattgcgctgcaaagcctttaatgattagagctcctgcgcaagcctgaaccttacttcaccatcctgattggtaaccaggctcagcaagtagcctgcctgccgcgcttgtctggcggcatggtagagcccgattcccaagccattttcagagcgtacatggtttttgaacaagcgatctgccttgtcttgtggcatggccttgccgctatctgaaacttcgatgctgaaatgctctcccacgcccagttcgacttcaatctcgatatttgcctcgttgcgggatttctcgatggcattctgcagcagattgtccaccacgctatccagcacttcatcatccacttcggtatcagatggttttccggatagaaatttgatcttggtttgatgataccgctgttgcagattgggccaccagtccgacaactttacccgccgattatttgtgctgtttggtgcctgcagcttgaccagcgtcagtgcaagacgttgattcattttcggtaactggcggcgaatcaggtctgccagaagggcgtcgtcatctgttggtgtgagctcggcggcgctgcaaagagcgctcatggattgcacgatattcttgatgtcatgtgtcaggcgtgcgccggtttcataaaccgcctgcatataagcgttttgttgcagggtttcttcacggcgttttgcttcgtagaattctcccaatacctgcgtcagcaacttcaggtgcagagagagagctggcgtcagtgcaaagcgggtgtagagacgcagatgcacaccatgaaaatcgatattcgagtagtgtttacttagcacccccagttctccgctgccttcggcagtgtcccaggtgatgccgctgacccatggcagtgtggcgatctcttgcatggcagagtcaataaagtcttttggtgtattcttctgttccgccagttctgcaacattcttcaaccattgctcgaatggcaggcccagactcagcaggtagcgggaaagcaggtggccgataccggcaaagcctgcacgcggattccata

SEQ ID NO: 2857 - DNA, 23441 bp, synthetic construct
  misc_feature 1..23441: note = Synthetic
  source 1..23441: mol_type = other DNA
cttccgcgccggcgacgcggtacgcaaggatcctctcgtgctgaacttcaacggcaccgcggcgcagctttccgatcgccgcttcagcttcgacctcgatggcaacggtcgcacggagaatctcgccatgctggccggcggcagcggttacctggccatcgatcgcaacggcaacggcaagatcgactcgggtctcgagttgttcggccccgctacgaattcaggctttggcgaactggccgcgctcgacagcgacggcaatcgctggatcgacgacaacgacagtgctttcggcgccttgcgcatctggacaccggacgcgcagggtaacggcatgctggaaactctcgcccaacgcaaggtaggcgccctggccgtggatcatgtcgccagccccttcgagttgcgcggcgccggtaacggcaatctcggtgcaatctcggcaagcggcatctatctcaccgaagacggccgcgccggcagcgtccaggaagtgctcctgaccgtctgattgctccctgctgcctcgacttattccgtttccagatcatttgtgacgcgaaaacgagccgcagacagtgcaaatcgcacggcaaggcgaagttggcaaagtcacggatgatctggaaacggaattattccaagcgcagggcgccggagcgaatcaactgcataagatcggcggccggcatcggccggccatgcaagtagccctggaacacctgacaacccgccgtttccagaaaatccctttgcgcttccgtttcgacgccctcggccaggacttccatgttcagattgagtccgagcgccaccaccgcccgggaaatcgccttgtcgctttcgtcctcgggcaaaccacgcacaaatgcctggtctatcttcaggcgatcgagcggaaaagtcttcaggtaggccaacgatgagtaccctgtcccgaaatcgtcgagcgcggtacgagtgcccattgcccgcaacccgcgcaggacatccactgcctcttccgggtccacgatcagcaaaccctcggtaatctcaagctccagcagggcactgggcagaccggtttcgtcgaggatcagttgcacggcagccagcagatccctgctgcggaactggcgtgccgacaggttgatggagacgggcacgtcccggcccaggctacgtcgccattcctgcgcatcccggcaggcctggcgcatgacccactcgccgatcggcatgatcagccccgtctcttcggccacggaaatgaactctgatggagacaccggtccgcgatcggaactgttccagcgcagcaaggcttcgactccaaccagacgtccgtcaacggcatccacctggggctggtaatgcagctcgaactcgtttcgctccagcgcaaggcgcagcatgcgctccagtgtcaacaactgaacgccgtccgcgttcatgccctccgagtagaacttgtaacaccccctgccatcctgcttggcgcgaaacattgccgcttccgcgttgctttgcagcgttccgacgtccttgccgttgtccggatgaagcgccacaccgatgctgatcgagacatgcagctcatgcccgtcgaccatgaatggcatcacgaatgcgttcagcaacttctcgcaaataatctccatgctgcgcggcgacggcacatgatcgagcagtatcgagaagcgatcaccgccgggtcgagaggccgcatcctgacggcgcaagacatttcgaatgcgatccgcggcctccaccagcaccatgtcaccgatggcatgactgagagaatcgttgatcaccttgaagcgatcaaggcccacttcgagcagggcgaactgccgcggccgtacctgcgcatccgcaaccgcatgctccagggaagccagccaggcattgcggctgagcaggccggtcagggaatcgaaggtgcgcaattgttctacctgtttttcagcacgttttcgcttgctgatatcgacgatcatgccaacgtagttggtggttacgcctttcaggtccttcaccgcgacaatcgacagcaagaccggatagttctcgccagtcttgcgccggttccagagttcgccttcccaacttccggactccagcagcttctgccacatatcggcatacatcttctcgtcgttgatcgacgatctgagcaatctggcatgcttgccgacgacatcttccctcgtatagcccgaaatccgcgtaaacgaccggttcacatcaacaatgttcgattgcgcatccgtaatgacaatcgattcgacgctgttaccgaatacggtggcggccagatgcaggtctttttccgcgaccttcctgccgcgacgcacctgcagcagcaacattccaccaagcaggaaggaagccagggccgacagggcgctgacaaccaggccggcacttgcaccctgcttcaattcgctggcgctatgcttgaccgaaccgctgatgacgtgctccaactccttcatggcgtcgattttctgcgaagaaacctgaaaccacctttccggactcggcaagttctccaccgacgccgcggtgctgtggccggcagcgatcacgcgacggcggattgcatcgccctcccggatgaaaggcttggccaggatggcctcgaaacccgccttggcatcgtcctcggcaaattgcaggaaacgcttgacggccaactcctcgatggcgcgaattcgatgcagggccgccatgcgggaaaaggaaccgaagtcccccgaggagagaatggcggtaagcagggcccgttcctggccggccatctcctttgcctgcaaaaaggccatgaaggccagttgcgggcgcagcgttccgttgtcggtgacaaggctcgcattcatctcgtcaaacagcatttcgatcatggccgagtagcgatctaccgtcacgtcgcgcgaaaccaccagttcgctgacgagttgccgaaggttcctgatctgctgcagatcgctcaatgccgaaatgtggcccttgtcgttcgccaggtgcggatgcacatccgagaacaggatcggcgtcacgaccgtcagggcctgatcggtctgctttccctgcgccaccaggatgtcggcaaagaaccgccccccggatgcaatgtagccgcttgaaagcccgcgttcgagctgcagatgatggatcagggcgctgatgcccgtgtttgtctcggcccattgatagacgaatccggcacggacttcgtccgcgcgtttctcgtagatgttgcgcgcggagaaaaacgacaacacaatgaaaaaagccgcaagcagccacaacgagtggtgcttgacgaggcgggcggacgcggcttgcgaaaacgggctattcatctttgaagcggcgcctcctgcaggtggcgctttcgccatgcataagctttccagtgtattcccatccttatacccattaattgacttgggacaggtacacttcacaaaaatcgtgcaaacatggcgcccggcgggagcatgccgccagtttgcgcggataacccagggtctccccgggttagactgtttcaatggacacggattgacggagcaactcgatggcgcgcatttctgacttgaaaatctggattcgcttgacgggtgccatctggctgatgctgctggtagtgtggtccggcatgattttctgggaaagccacgtcaaccggcaaaccgccatcgatcaggcgcgcgagttttccaactccatgcatgaagcgacgatggccgggctcacgggcatgatgatcaccggcaccgtcgggcaacgcgaggtctttctggaccagatcaagcaactcgccatcatccgcgacctcaaggtcatccgcggcgacaacgtcagcaagattttcgggccgggcactgccaaggacgctggcgcgctggatgccatcgagcagcaggtcatggccagcggcaaggagttcagcgaagtccagtccgacccaaagggcgaatacctgcgcgtggtgcggccggcgctggcgctgaagaattatctgggcaaggattgcatcgcctgccatcaggtgccggaacgctcggtactcggcgcggtgagcatgaaaatttcactgaaccacgtcaatgaggccgttgccgctcagcgcatcaagtcactgctcgccgccctgcttgtcagcctccccctgctggctttcatttacctcttcatccgcaacgtggtcacggtcccgctggacaagatggtcaggggtttgcgcgagatttccagcggcgaaggcgacctcacccgccggctggatatccgcagccaggacgaaatcggcgatgccgctgccgccttcaacgaaatgatggggaaattcagcgccctggtgcgccacgtcggagaatcggccatccaggtctcgtcggcctcccatacgctggcggacagcgcggggcaggtcgcggccagttcgacgcaacaggacgcaaagtcggcggccgccgctgccgccgtggaacagatgctctccagcatcggctcgatcgcacagggcatggaacacgtgcatgagcagtcgcgcgaaagcctgcgccgttcggaagaaggcaatgaaagcctgtcgagcctgatcggcgaactcgggcaggtggaagacacggtcaaggaaattgccgaatcggtggcccacttcgtccagagtaccgaggccatcaccagcatgacccgtcaggtcaaggatatcgccgaccagaccaacctgctcgcgctcaacgccgccatcgaagccgcccgcgccggcgagcaggggcgcggctttgccgtggtggccgacgaagtgcgcaaactggccgaaaaatccagcgcctcggccagtgaaatcgatgcggtgacccacaggctgtcccagcaggccgatatcgtgaagcagtcgattgaacgcggcctggagcacatcgcctccagccagaattcaatggaaacagtggctgaagtgctggcgaccgcaagcacctcggtcaacgaagtcgactccggtctcgacgccattgcccgcgccacggatgagcagcgccgggtcagcggcgaagtggcgcgcaatatcgagtcgatcgccgccatgtcgcgcgacaacgccgcggccgtggaacaaacggccgcctcggcccagaagatggaagtactggcggaaaccctgcaaagcaccgtggggcgcttccgaacctagtaccgagtaaagcctgccggctccgtccgtatcaggcttggctaccccgagaaaatatttctccgcgacgggcttgaagcctccggattcaccctcatatgcgtcgggtttcttccggagcccgacccatgcaggacaactcatctacctcgccagacactgaaaccgccgtaccgccagcgccgactacgggggataccgcccccggctccgccggaggcatgactcctgacgccgcacaggatggaacggtgatgcccagccttgaagaaatgctcaagacggccgaactcaaggccgccgagcatcacgatgcctggctgcgcgccaaggccgagaccgagaacgtgcggcgccgcgcgcaggaggacatcggcaaggccggcaagttcgccgtcgagaagttttccggcgaactgctggccgtcaaggacagcctcgaagcggccctgtccaatgaaaaccagagcgccgaaaacctcaaggccggcgtcgaactgaccctcaggcaattgattgcggccttcgaaaaatccggtctggccgagatcagcccgcttggtgaaaaattcgatccgcactatcaccaggccatcagccagatcgagcccccggacgccaccaccgaagccaacaccgtgctcaccgtcctgcagaagggttacgccctgcacggacgggtgattcgcccggcgctggtcgtcgtagcgaagggcaaggcttgaagccccccgcaatacccccatatcaggcatagagattcgccgcgggacattccgggcgagcaatatttttaaaggaaaaatcatgggcaagatcatcggcatcgacctcggcaccaccaacagctgcgtcgccatcatggaaggcggcaagcccaaggtcatcgaaaacgcggaaggcgcgcgcaccacgccgtccattgtcgcctacgccgacgacggcgagattctgtgcggcgccgcggccaagcgccaggccgtgaccaatgccaagaacaccctgttcgcggtcaagcgcctgatcggccgtcgcttcgaggaaaaggaagtgcagaaggacatcgacctgatgcccttcaggatcgtcaaggccgacaacggcgacgcctgggttgaggcgcgcggcaacaagatggcgccgccgcaggtctccgccgaagtgctgcgcaagatgaagaagaccgccgaggattacctgggcgaggaagtcaccgaggccgtgatcaccgtgcccgcctacttcaacgacagccagcgccaggccaccaaggacgccggccgcatcgccggactggatgtcaagcgcatcatcaacgagccgaccgcggccgcattggccttcggcatggacaagcaggaaggcgaccgcaagatcgccgtgtatgacctcggcggcggcaccttcgacatttccatcatcgaaatcgccgaaatcgagggcgaacaccagttcgaagtgctgtcgaccaacggcgacaccttcctcggcggcgaggacttcgaccagcgcctgatcgactacgtggtcaccgagttcaagaaggaacagggcgtcgacctgaagaacgacgtgctggccctgcaacgcctcaaggaagctgcggaaaaggccaagatcgagctgtcctcggcgcaacagaccgaattcaacctgccctacatcacggccgatgccagcggtccgaagcacctggcgatgaagctgacccgcgccaagtacgaatcgctggtggaagacctgatcgcccgcaccatcgaaccctgccgcatcgcgatcaaggatgccggcgtcaagacctccgacatcaccgacgtgatcctcgtcggcggcatgacccgcatgcccaaggtgcaggacaaggtcaaggaattcttcggcaaggaaccgcgccgcgacgtcaatcccgacgaagccgtggccgtcggcgcctcgatccagggcggcgtgctgcaaggcgaagtcaaggacgtgctgctgctcgacgtctgcccgctttcgctgggcatcgagaccctgggcggcgtcatgaccaagctgatcgccaagaacaccaccatcccgaccaagaccagccagaccttctccaccgccgacgataaccagaacgcggtgaccatccacgtcatgcaaggcgagcgcgaaatggccagcggcaacaagagcctgggccagttcaacctgtccgacatcccgccggcgccgcgcggcatgccgcagatcgaggtcactttcgacatcgacgccaacggcatcctgcacgtttcggccagggacaagggcaccggcaaggaaaacaagatcaccatcaaggccaactcgggactgtccgaagccgaaatccaggccatggtgcaggacgccgcggcccacgccgaagacgaccgcaaggcccacgaactggtcgacgcgcgcaaccagtgcgacgccatggtgcattcgatcaagaaggcgctcggcgagcatggcgacaagatggaagccgacgaaaaggccaagatcgaagccgccatcaaggaagccgaagacgtgctgaaggatggcgacaaggcggcgatcgaggccaagaccgaagcgctggccaaggcatcgcagaaactcggcgagaagatttacggcgacgcccagggcgctgccggtgcagcgggtgcggcgggcgccggtaccgggggcggtgaagcgaagaaggacgacagcgatgtcgtcgatgcggaattcaccgaagtgaaagacaagaaagcttagaccggacgctcatttgaacagctgagcgccgttctaactggccgagttgaagcgggcgacctcgtcgccccttgactcggcctttgctctgattagcctggaccgactgatatggcaaaacgcgacttttacgaaatcctcggcatcaaccgcgatgcgtcggatgatgaaatcaagaaggcctaccgcaagctggccatgaaacaccatccggaccgcaatccggacaaccccaaggcggaagagcatttcaaggaagccaaggaggcctacgagatcctgtccgacgcgcagaagcgcgccgcctacgaccagtacggccacgccggcgtcgacccgcaggccggcatgggccaggggggtgcgggcatgggcggtttcgccgatgccttctcggacatattcggcgacatcttcggcggcggcggacagcgcggcggcggacgctccaacgtctatcgcggcgccgacctgcgctacaacctcgaagtctcgctcgaagaagccgcccgcggcactgaaacccgcatccgcatcccgaccatggccgaatgcgaaacctgcagcggcagcggcgccaagaaaggcagcgaaccgaagacctgccccacctgcggcggccatggccaggtgcgcatgcagcagggcttcttctcgatacagcaaacctgcccgaagtgccacggcaccggccgctacatccccgacccctgcggcacctgccacggctccggccgcgtcaagcagcacaagacactctcggtcaagataccggtcggcatcgacgagggcgaccgcatccggctcaccggcgaaggcgagccgggcgtcaatggcggcccgccgggcgacctgtacgtccagatccacctcaaggcccacgccgtgttccagcgcgaccacgacgacctgcattgcgaaatgcccgtcagcttcgccaccgccgcgctcggcggcgaaatcgagattcccacgctggacggcgtcgccaagctcaaggtgcccgccgaaacgcagaccggcaaggtcttccgcctgcgcggcaaaggcatcaagggcgtgcgctccatcagccacggcgacctgctctgccacgtggtgctggagacaccggtcagcctcaccgaccggcaaaaggaactgttgcaggaattcgaggaaatcagccagggcaacgcccagcgccacaatccacgcgcgcaaagctggctggatcgggtcaaggagttcttcagtagctgaggtttacccaatattcctgaaagtcggcgctggcgatacggcgattttgcggctatagtctcagcatttgctacttttgtagcgaaccgattcgaggtgaagctatgagtatgcctgtccgcatcgacgacaccctttatgaccaggcccgcgcccaggcgcaggccgaacgccgcaccatcgccggacaaatcgagttctgggccatggtcggcaaggccgcgctggacaaccccgacctgccgaccgatttcgtccgcgaactgctgattgcccgcgccgaaggcccgaccctggcgacgccctttgtcgccgaaggaaagcgcgactgacgatggccgccgtccaggtactgcaagccgctgctttccgccgcgcttacaagcgcctgcaccccaaccagaaggccgatgtcgacgacgccgtacaggccatcgtcgccgatcccacgctgggcgaagcaaagaaaggcgacctcgccggcgtctttgtctacaagttcaagtgcgccggccagcttgccctgcttgcctacgaatacgaccccgccacccgactgctactgctgctcggctcgcacgagaatttctaccgcgacttgaagcgctcctgaaccatcgcccttccaccgctggcggaaggcgcctgaacaaatgccgatggcaaacttgacttgccctccggccattcgactcgcataatggaaaggcccgacgggtttccccgccgggcctggatacagaatctttcgattctttattgtagcaacggctctcaccccggatagccacaacggggacgattatgcgggaggaaactatgtcaggcaatacccacggcccgttgaccttcggcttcgacatcggcatcgcctcggtcggctggtgtgtgctcggcgaaaaccgaatcgtcaatcttggtgtgcgctgcttcgacaaagccgaaaccgcgaaagaaggcgaatcgctgaacctcgcgcgacgcaccgcacgcctgatgcgccgccgcctgcggcgtcgcgcatggcgcctgaccaagctagcgcgactactcaaacgcgaaggactgattgccgaagcttcccggatacacattccctccccggtttcgccgtggcgtttgcgtgtcgaaggaattgaccgccgcctgaccgatgatgaatgggcacgtgtcatctatcacttgtgcaagcatcgcggcttccactggatcagccgcgccgaggagaggaaagccgaaagcgacgccaaggaaggcggccgggtcaagaagggcttatccgatacgcagcggcggatgacggaaaaaggctaccgcagcgccgccgaaatggtgcttgccgagttcccggacgcccagcgcaacaaacagggcgactacggcaaggcactttcccgcatcctgctcagcgacgaactggcattgctgttccggcgccagcgcgaactgggcaacccgaatgccggcaatgaactcgaagccaccatccttggcaacggcaaccgcaaaagcggtttgttctgggagcagaaaccaccgctcgccggcgccgacttgctgaagatgctcggtagatgcacgttcgagaaaaatgaataccgcgccccgaaagccagcttcaccgccgagcgccatgtctggctgacccggctcaacaacctacgggtcgtcgtcgatggcacgacacggtcgctcgacgacgcggagcaccgacttgtcctgcccctgccctacaaacaagccggggatttcacctacaagcaattgcgaaccgctctgaccaaggccggtttgttgccggaagggttcaaattcgctggcctgtcctatccgaccggcagacaactcgacgaccccaaagccaaagaccctgaaagcgaaaaactggtcaggctgcctgcctggcaggaactacgcaaaacactcaaagacaaaaatctcgaaaccgaatgggaaggcatggcgggtgcggcgacgggcggcaaccccgagctgctcgacgaaatcgcgcgcgtgctttccgtcttcaaggacggggatgaagtcaccgccgagttgtggaagctgcccttgcccggcggcaaagcgatgatcgacgcgctgagcgaaatcagtttcgacaagttccatgcgctgtcgctcaaagcgttgcgcaagatcgtcccgcacatggaatccggcctgcgctacgacgaagcctgcgcggtcgccggctaccaccacagccagttgcacgccgccggcgcgggagaacacaagtttctgccaccgttctattcccgtcgcgacaaggatggccggatggtgttcaacgaggaactcgacgtgccccgcaacccggtcgtgctgcgcgcgctcaaccaggcccgaaaagtgctgaatgccctggtgcgtacttacggctcgccaaccgccgtgcacatcgagatggcgcgcgacctttctcgtccgctcgatgaacgcaacaaggtcaagaaagcgcaggacgaataccgcgagcgcaacgaaaaggacaaggctgcgttcgccgccgaatacggcattgcccccaagagccgggagttcgaaaagttccagctctaccgcgagcagcaaggaaaatgtgcctactcgctcaagtcactcgatctgcatcgcgtgctgcacgacatcggctatgccgaagtcgaccatgcactgccctactctcgcagctacgacgacagcaagaacaacaaggtgctggcactgaccgaggaaaaccgcaacaagggcaatcgcaccgcctacgaatacctgacttcattccccggtggcgagaacggcgaacgctggcgcaacttttcggtcgccgtcgaaacgaacaaggcttaccgcctcgccaagcgcacgcgcctgttgcgcaaggacttctcaggtcgtgccgccgaggagttccgcgaacggaatctcaacgacacgcgctacatctgccgcttcttcaagaacaccgtcgaacgcttcctgaagctggatgcaaaagtcggcgctggcgatacggcggaaatctctgccaagcgctgcgtggtgctgagcggccagaccaccgcttttctgcgagcacgctggggactgctcaaggttcgcgggaacagcgaccgccatcacgccctcgatgccgccgtggtcgccgcgtgcagccacggcatggtgaaacggcttggcgactattcgcgcaccaaggaactggccaaggtgcacgacggctttcccgacccggaaaccggcgaaatcatcgatccagtcatgttccagcaactgcatgcccattttcccgacccgtggccgcatttccgcgcggagcttgaagcgcggctgaatgttgacgataccgccgacttgcgcgcgcgcatggagttgttcggcacctatgcacctgaagcactggaaaccttgcgcccgctgtttgtctcacgcgcgccacagcggcgcaatagcggcgctgcgcacaaggacactatctacgcccagccggaacggctcaaggaacaaggcggcgtcacacagaaggtgccgctcaccagcctgacattgaaggacctggacaaactgatcgacccgcaccgaaacgagaagctctacgcggctattcgtgcccgactggaggcgcatggcggcaaggccgacaaggctttcccggcgggcaatcctctacgcaagcccgaccgcgaaggcaatccaacaggcccggtcgtgcgaaccgtcacgatggtgatcgacaagctatccggcattccggtgcgaggcggcatcgcgaagaatgacaccatgctgcgagtggacatcttccgccacaagaaggacggcaagttccatctggtaccggtgtatgtgtatcacgcagtggcgaaggaatttccgaatcgagcgattgttcaggcaaaggatgaagatgagtggacgctgattgatgacaagttcgacttctgtttttcagctcatccgaacgatctactcaaaattacgcaaaaatctggtgaaaccatctttggctattaccggggatgccattcaggaacagcagcaatcaatatcgccctgcatgatcgatatgcctacgccgagaagacaaccagccttgccttctcgaagaaaaatcctggcaaaccgataccgaacgacaagctcggcctcatcgaagggatcggggtaaagatggcagcgaacatggagaaattccacgtcgacaccctcggcaacatctaccccgctccaccggagcagcgccgtggtctggcgtagcgtcatgatctccagccccgccaaactgaggcgggagcatttttcgctggccatcgagcaggaacaaacggcgttcgtgcctttcgaggacatcgccgtcatcgtcctcaaccaccgcgagatcacccttacccatccggtgctctcggcctgtgccgaatacggcatcggcctctatgccaccggcagcaatcaccagccggctggcgtgttcctgcccttcctgtctcactcgcgcaccacgcgcatgatgcgcctgcaactcaagatcgccaaaccgaccgccaagcagacttgggccggcatcgtccgccgcaaaatcgaaaatcaggccgcgtgcctcaagcttggcggcaagaagggtacggaccggctcgcgtcctatgctcgccgggttcgctcgggcgatcccgacaacatggaggcccaggccgccgccttttacttcgcgcaactctttggtcaggatttccaccgcgccgaagagcgttggaccaatgccgctctggattacggctatgcggtgttgcgcggcgcaatcgcacgcggccttgtggcgcatggcctgcatcccacggtcggcctgttccatgacagcgaacagaatgccttcaatcttgccgatgacttgatcgagccctttcgcccgctggttgatctgcacgtcaccaagcatgcagccatgaccgagggcgacctgatcccggccgacaaacaagcgctggtggcgctgctcaatatcgacgtcgccatgccgcaggggcgcatgtcggtactgtccgcgatcgaatacgtggtggaaagcctggtgcgcgcctacgagggcgacacgaaggacctcgacctgcccggcctgatcggcttgcagccgcaccggctggagcattgatgtgggcgtcgagacgaggcgatacatgcgcttgctcgtcttcttcgatcttccgatggtaaccaaggccgaaaaacgcgcctacgtccagttccgtcgcttcctgctcaatgacggctacgacatgatccagtggtcggtctatggccgcatcctgaacggacgtgacgctgagacaaagcaccttgcgcggcttgtggaaagccttccgccagagggctccatacgctgtatgaccgtgaccgagaagcaatatgccggcatgcgcctgctggtcggcctgccgctgtttcaggaaaaaaaggtcgcggcatcccaaatgctgctcttctgaatccaaaatcaaaaagaaaaatccccgcccggcatagaccgggtggggatcaaggttcagccaaattgtagctatccggggtgagagagggagctacaaccctgcgagtatccgctggatgtcttcaactaattgtagctatccggggtgagagagggagctacaacgaggtggccagcggggcggcttacgagggtaattgtagctatccggggtgagagagggagctacaaccgtcgctgaacgcgaccatggaggaattcgaattgtagctatccggggtgagagagggagctacaaccgttttatttcgggggcagagtgcaagcataattgtagctatccggggtgagagagggagctacaactagacgaacgcgataagcccgataacaaagaattgtagctatccggggtgagagagggagctacaacctttgtctgccgcacaattattcgcaacgcaattgtagctatccggggtgagagagggagctacaacccacgatgcagcaggtatccaaggattcgcaattgtagctatccggggtgagagagggagctacaacaagaactcggagaggatgctatctacagcgtaattgtagctatccggggtgagagagggagctacaaccgttcttccagtttgcttctctctggtttgaattgtagctatccggggtgagagagggagctacaacacgttcggcgcgacttcttcaagctcggcgaattgtagctatccggggtgagagagggagctacaacagagatgaacgcaattgcttgtcgatttgcaattgtagctatccggggtgagagagggagctacaaccccgcgttgccttggccgcactgcgcgttaaattgtagctatccggggtgagagagggagctacaacggaccacgccaccggggcgcgatacgagcaaattgtagctatccggggtgagagagggagctacaactgcacgagcgcgaggacgttgttgatggcgaattgtagctatccggggtgagagagggagctacaacctcgtggctggaggccgcgcaaaaacgcgcagcccccagccacgaggttcctgcttcgcagggtctgcaggaatcggggcaagtgggccgtaacggccaaagaccgccaaaactacagaattacccttcttttcaatgtattaatcacatgaaaaacacttaaggcagcgcgacgcgtgccgttatatgggtcatgacggagggattcgatcatgacaattgataccgtacagcccactctcagtgtccaggcggtgcatcccaggcaggatgccaaggagcaatccggccgcgaatcccgccgcaatggcaagtcaggccagcccgaggaagagcggcaggatcaggaacagactttcctgaacgtcatgggacaagtcaccggcaagaccatcaatatcaccgcctgaacgcatccggcggcgggggatacctgatcaggcccggcgccaggtcgttccctgcggcccatcctccagcacgatgccggccgccttgagttcatcgcggatgcggtcggattcggcaaagttcttcgccttcttcgccgtggcgcgggcgccgactttcgcctcgatctccgcgttgctcaaaccaccttcgggcgcggcctggaggaagccttgcgggtcgcgctggagcaggccgagcacgccacccagcgccttgagctgcccggccagcgccgcttcgccgcgattcacggcgctcgccagatcgaacagcacggccatcgcttccggcgtgccgaagtcgtcgtccagcgcggccttgaaacgcacggcatgggcttcgctccagtccaccgccgcctcgccggcgaagctcttgagcgccgtgtaaagccgggtcaatgcgtgccgcgcgtcgtcgagatggacgtccgaatagttgagcgggcttcgatagtgggcgcgcaggatgaagaagcgcaccacctcggcgtcgtactgtttcagcacttcgcggatggtgaagaagttgcccagcgacttggacatcttttcgtcatcgacccgcacgaaaccgttgtgcatccagtaattcacgtactggcactggtgggcgccttcggactgggcgatctcgttttcgtgatgcggaaactggaggtcctggccaccaccgtggatgtcgaaatgccggccgagcagttccgatcccatggccgagcactcgatgtgccagcccggccggcccggaccccagggcgagggccatttcacttcggcgggttcgtcgtcccgcgcgtgcttccacagcacgaaatcgagcggatcatgcttgccggccatgacatcgacccgctcgccggcgcgcaggtcttccagcgacttgccggaaagcttgccgtagccgtcgaacttgcgcaccgagtaacagacgtcgttgctcccggcgacataggcatagccctgtttttccagcgtgccgatcatgtccagcatctgcgccacgaactcggtggcgcgcggctcggcgtcgggacgcagcacgcccagcgcgccggcatcctcgttcatcgccgcgatgaaacggtcggtgagttgccggatggtttcgccgttttcctgcgcgcggcggatgatcttgtcgtcgatgtcggtgatgttgcgcacgtatttcacttcgtagccgctggcccgcagccatctcgccaccatgtcgaacaccaccagcacgcgggcatgcccgaggtggcagaagtcatacaccgtcatgccgcagacgtacatgttgacgcggccgggctcgatgggaacgaagacctgcttttcgcgggccagggtgttgtagatcttcagcatggcggaaaaaatatgggtgcagtggaagccaaggtcggcattctatcggcgccggtatggcggccgtaacaaaaatcaccgaaacggcgggtttaagcaaaaaaatgggtacgaaaggccggcattatcggcccattcatcaaacgcttcaggttgtgggacaggggggcttcttgttagaatccgaggctgaatccagcatggtttgtccccgcgaaattcattttagtcacgaccgctacgcttaacgccgacaaagccgacgttactccactgaaacttcgtttacgggcaaccgtcaaagaaaagtccatacaccatgacccaaatccgcctcaatgccgcccgcctgctggcatctgccatgtccatcgcccttctggcactggcgcccgccgcccacgccgacgccctgcaggacatcagcaagctggtcaagcaggggcagcacgcccaggcgctggaacaggtggacaagtatctggcaggcaagccgaaggacgcccagggccgctttctcaagggcatcgtgctgaccgagatgaacaagccgaacgaggcgatcgccatcttctccaagctgaccgaggatttcccggaactgcccgagccctacaacaacctcgccgttatctacgcccagcagaagcagtacgacaaggccaagcaggcgctggaaatggccatccgcacccatccctcctacgccaccgcccacgagaacctcggcgacatctatgcgcggctcgccagccaggcctatgacaaggcgctgcagatcgattcgtcgaactccagcgcgcagaacaagctggccctgattcgcgacctgatgagcacggccaaccgccccggcaaggtcaccaagccggttgccgaggtacgcccgcccgaacccgtgaagattgccgaagcgcccaagccggccgcacccggaacggccgcacccgcaaccgccgcccccgccaccccggccgcggtgcctgtcgcctccccggccaagccggtcgaagcccccaagccggccgtggcgaaagccgccggcgacgccaatgccgaaattaccaaggcgatcgacctgtgggccgccgcctggtcgcgcaaggacgtgaaggcttatctcgccgcctacgcccgcgacttcaagaccccgtccggcgaatcgcgttcggcatgggatgccgaacggcagaagcgcatcgccaagccgggcgccatccaggtcagctatgagaacctgcgcatcgccgtcgatggcgaaaccgccacggtgaaattccgccagcattacaagtcggcgtcgctcaagacctccagcaacaaggtgctgctgatgggcaagcgcgacggcaagtggcagatcctgcaggagcgggtcggtagctgatggccggcctgtcgcgctcactggcgattgccacggcctgcggcctgctgcttgcggcaggcacggtcggcgctgccggcaaggcgcccaagcatctcaagaaggacgccggcggcccggcggtcgaggcgatctataccgattcgggaccggagccgctgctggccaaagtattcgacgccatcgaggccaaccggctcgacgtcgccatgcagcagacggaaatgctgatcaaggcctatccgaatttccgcctggcacatctggtcaagggcgatctgctgctggcccgttcgcgccccctgatgtcctttggcgagggcggcggaccggcggcgggagaaaagatcgccgacctgcgcgacgaagccatcgtccgcctcaagggctaccgcaccaagcccccggctgactacgtgccgcgctacctgctgcagatgcacccggagcagaagcatgcggtggtggtggatacgcagaaatcgcggctctatctctaccagaatgacaacggcacgccgcgcttcatcgccgactactacatttcgcaaggcaagctcggcgccgaaaaagcccgcgaaggcgacaagaagacgccgatcggcgtctatcacgtcacctccagcctgccgcgccagaagctgaccgacttctacggcagcggcgccttccccatcaactatcccaacgactgggacaagcgccaggggcgaaacggccacggcatctggctgcacggcacgccgtccgacaccttctcgcggccgccgaaggcctccgacggctgcgtggtgctggccaaccaggatctcgacagcctgtcgaaaagcctgcaggtcggcctcacgccggtcatcatcagcaacagcatcgaatggctttcactcgacgactggcagaacgaacgcagctcgctgctcaaggtgatcgaggaatggcggcaggactgggaaagccgcgacgtcggccactacgcgcggcattactcgcacaagttcaatgccgacggccagacctaccagggctgggtcgaacagaagcgcaaggtcaatgccggcaagagctggatcaaggtcggcaccggcaacatcagcatgttccgcaatcccggcaaggaagaacacgtcgtcgttaccttcgaacaggattaccgctccagcaatctttcgaaccagatgaagaagcgccagtactggatcaaggaaggcggccactggaagatcgttttcgaaggcgccgcgtaagaattcgcgtcccgcgcacgtttcacattccccattcacgttcaaaccccggaggctccatgcatcgcctgtttctttttgtctttgcgcttttgttcggcatcgctgcgcatgccgccaaccccatgcttgaggtgaagacctcgcagggcacgctgaccatcgagctgtatcaggacaaggcgccgaaaaccgtggagaacttcctgcaatacgccaaggatggcttcttcaacggcaccatcttccaccgcgtgattccgggcttcatgatccagggcggcggcttcacgccggacatgaagcagaaggaaacccgcgccaacatccagaacgaagccaagaacgggctgaagaacgaaaccggcacgctggccatggcacgcaccatggacccgcattccgccagcgcgcagttcttcatcaatctcaaggacaacagctttctcgattacccgggacgcgacggctggggctacgccgtcttcggcaaggtcgtgcaaggcttcgacgtagtgcagaaaatcgccacggtgcagacgacaaacgccggcccgcaccagaacgtgccggccacgccgatcctgattgaatccgtcaagctgctgcccgcaccggttccggctccggccaaaaaataatccacacaggacgacacaccatgatcaagctcaccaccagcctcggcgccatcacgctcgaactcgacgccgaaaaggcgcccaagagcgccgccaactttctcgcctacgtcgagtccggccactacgacaacacgattttccatcgcgtgatcgacggcttcatgatccagggcggcggcttcgagccgggcatggaccagaaaccggtccgcgacccgatcgagaacgaagccaggaacggactgcgcaacgagcgctacaccgtcgccatggcgcgcaccagcgacccgcactcggccactgcgcagtttttcatcaacgtcggcgacaacgacttcctcgacaatgacaaatgccaggatggctggggctattgcgtcttcggccgcgtcgtcgaaggccaggatgtggtggacaagatcaagtcggtgaagaccggcaacaagggcttccaccagaacgtgcccgccgaagacgtcgtcatcgagcgcgccgaagtcgtctgatagcccggcgcggttccatgctgaccatcgccggaaccgcccgcttcatttccgacctgcacctgcgggccgaacggcccgacctgaccgcgcgcttcgcggcctttctggccgataccgccgcggcaaagatcgaagccctgttcatcctcggcgatctgttcgaatactggatcggtgacgacgacctggccgatccgttcaatgcgcaagtctgcaaactgctgcgtgacctggcggaccggggtacgcggatatatttcatcgccggcaaccgcgacttcctgatcggcgggaccttcgccgccgccgccggcatgcgcctgctcagcgacgtcgagacagtcggcgctggcggtacggcgactttgctgatgcatggtgataccgtgtgtacggacgacattccctatcaggagttccggcgcatggtgcggtcgccggactggcagcggacgtttcttgcccgccccctggcagaacgccgtgccgaagtggaaaacctgcgccgccgcagcgcagaggcaatgcagggcaagacggccgcaatcatggatgccaacaatgcctcgatacgcgaggcactgacggcccacggctgcacccggctgatccacggccacacgcaccggcccggacacgaggtgattcagttggcgtccggcaacgctgaacgctgggtgctttccgattgggataccggacgcggtgacgccttggaaatcgacgcggccggcatccgccgcatcgacctgtcggcctagaccaatccccgcgccaggtcggccttcaggtcggccggactctccagcccgaccgcaattcgcaacaagccctcgcctatgcccgacgccgcccgcgcttcggcggtgatgcgtccgtgcgtggtagaggctggatgcgtgatggtggtcttggtgtcgcccaggttggcggtgatcgacagcaggcggcagttgtccaccacccgccatgcggcctcacgcccccccttgacctcgaacgagacgatggcgccgccgctggcctgctggcgcatcgccagcacatgctgcggatgcgaggccagtccggggtaatggacgcgtgccacctgcggctgggcttcgagccattgtgcgagttcgagcgcattcgccgattgcgccttcatgcgcaccgacaaggtttccagacccttgagaatcacccacgcattgaacggcgacaaggtcggcccggcggtgcgcaggaacttgaaaacttcatcggtcagtggtttggagccgcaaaccgcgccgcccagcacccggccttgcccgtccagatacttggtggcggaatgaatcaccagatcggcacccagttcaaggggacgctgcaacgccggcgtgcagaagcagttgtccaccaccagcagcgcgcccgcggtgtgcgccacttcggccaacgcggcgatgtcgaagacttcggtcagggggttcgacggcgtctcgatgaagaccagcttcgtggtcgggcgcagcgcggcgcggaaggcctcgacgctgccctgatcgacgaacgcggtctccacgccgaagcgcggcaggatggtgccgaacagttgctgcgtggcgccgaagatgctgcgcgaggcgacgatatgctcgcccgatttcatcagcgccattaccgtggacaggatcgccgccatgccggtggcggtggcgacgcaggcctcggcgccttccagcgccgccaggcgctcctgcatggtagtgacggtgggattggtgaagcgggcatagacgttacccggctcctctcccgagaaacgtgccgccgcctgcgctgcgttttcgaagacgaagctggaggtgaggtagagcgcctccgagtgttcgttgaactggctgcgttcctgcccggcgcgtaccgcaagcgtgtcgaaggaccagcccggattgtccggcacgctcatcccgcctgcaccaggttcaggtcgagttgttctccatccggcccgtcgaagccgtcctggtcatccgacgccggcagcggcggctgggaacgcttgtgctccatgttctgcaggtaggtcgcggtgacatcgccggtgatgtagctgccgtcgaaacaggaagtctcgaactgggtcaccgcgggattgatggcgcgcactgccgcc

SEQ ID NO: 2858 - DNA, 23426 bp, synthetic construct
  source 1..23426: mol_type = other DNA
  misc_feature 1..23426: note = Synthetic
ttctttgtaactttgcgcattggcaagcacctgctcgcgcgacaagggcgggcgggtggcgttcttgccggtgggatcgccgatcatgccagtgaaatcgccgatcaggaaaagcgcgtgatgccccaggtcctgcagttggcgcatcttgttgagcagcacggtgtgcccgagatgcaggtctggcgcggtcgggtcgaagcccgccttgatgcgcaggggccggccctgttcgagctttttgaccagttcggattcgagcagcagttcttcgctgccgcgtttgatctgattgaggatttcttgttgattcatgtcgaagaaccgcttgtcattatccagcccaatacccaagccggttttgagggctagccgctttctgttaaagtggcgcccgaaaattcaataagtcttgttgtgtgccgataaaggatctacgggcattcagcaagcactgccgctttgggagccgcgaatgttaccgcaaaacactttgtcacacgcacacaaaatgaagctccgatggttcgtcaccttgtccagcctgcctttgctcggggtggtgacagctttcggcatcatgccccagacggatgttttgtccaaaacgcaacaaaccgtaatcgaagatatctccctgccggtgactaccgccgtcgccagcaattcgacttctttctggcgcaatgagcgcatccagcgcggcgacaccgtcgccgaactgctgcgccgcctgaacgtggaagatcaggctgccagcgatttcctgcgcaggagcaaatccgccgaagggttgcgccaactggctgtgggcaaggaggttcaggcggaaacggatgccaatggcgcgctgctggcactgcgctatcccggtaacgatgccaatcaggtggtcatcgaaaaggatggcaacagcttcaagacccgcacactgcctgcacagaccgagaaacgcgtacagatccgcaccggcgagatcagaaccaacctgttcgccgcgaccgatgaatccggactgcccgaccctgcggccaaccaattggccgacattttcggcggcgatatcgacttccatcgcgatctgcgcaagggcgacaagttcacggtgatctacgagatgaactatgtgaacggtgagccggtgcgcacaggacgcatcctttccgcggaattcgtgaaccacggacatgcgttccgtgccgcgtatttccagaccagcgaagattcgggtgactattactcccccgaagggaagagcatgcacaaggccttcctgcgttcgccccttgaattctcccgtatcagctccggattcagcctgtcgcgattccatcccatactgaacaagtggcgctcacacaagggtgtggactacgccgcgccgatgggcgccaaggtcaaggtcaccagcgacggcgtcgtcgcctttgtcggaaagcaaggcggttacggcaatgtggtgatggtcgatcaccaaggccgcttctccacggtctacggccacttgtcgcgcttcgccagcggcctgcacaaaggccagcgcgtggggcaaggccagatcatcggctatgtcggcatgaccggcctggcgaccgggccgcatctgcattacgagttcaagttgaacggcgtccagcgcgacccgctgaaagtggcgctcccggacggcaagccaatcagcgatgcgcaaaggaccgccttcgccgatgcgacgaatcagctgttcgcacagctggatactttccacaatacccatatcgcaaacctggactgagtgagcctccctcccgacctctacatcggcatcatgtccggcaccagcctggacggaatcgatgccgcattggtcgatctctcgcaggctgcgcccgtcctgatcgccagccattaccagccttatgcagagccgctgaaggaggcgttgctggccctgcatcaagtctcgcacaacgaactgcaccagtcgcaactgatcgccaatcgcctggctcgagaatatgccgatgcggcgcagatcctgttgaagaaagcgggcgtcgcaaccggatcggtgcaagcgatcggctgccatggacagaccgtgcgccatcgccccgaacacggctatagcgtgcaactcaacaacggggcgctgttggcggaattgacaggcatccatgtcgtgggcgatttccggagtcgcgacattgcggcgggcggacagggtgcaccgctggtgccggcgttccacgacaaggtatcgcgccacccgaccatccaccgcgccattctcaacatcggcggcatcgccaacctgaccgatctcgcgccaaacaagacgacagccggcttcgacaccggccccggcaacctgctgatggacgcatggatcgcgcgccaccagggaaaatccttcgacaagaacgggacgtgggcagccagcggcaaggtcatcccggcactgctgcaaaaattactgaccgagccgtacttcgctgccgctccgcccaagagcaccgggcgcgacttgttcaacctcgcctggcttggaagacatctgaatggtgacgaagcgccagcagacgtgcaggcaactttgctcgcgctcaccggagacagcattgccgctgccatacagcgattctgcgcaggggcgaaagaaatctatctgtgcggcggcggcgcccacaacgagaaactcctctcgcacttgcagcacgcattaccgcaatgtcgtattcaaaagaccgaagtattggggatcgccgccgactggatggaagccatcgccttcgcctggctggcgcagcaggctttgcacctgcgccccgccaacctgcctgccgtcacgggagcgagacacccctgtgtgctgggtgcgatttatccctcataaaacaaaacggggcgctttcgcgccccgttcctgcaacaagaactgcccgatgcttatgccgagaacgacgagccgcagccgcaggtagtagtcgcattcgggttcttgatgacgaactgcgaaccttccagaccttccgtgtaatcgatctccgcgcctaccagatactggaagctcatcgggtcgatcagcaactgcacaccgttcttgctcatgacggtgtcgtcttcgttggcgacttcgtcaaacgtaaagccgtactggaagcctgaacagccgcctccgctcacgaacacgcgcaacttgagctcggcattgccttcttcttcgatcagttgcttcactttgtttgccgcattgtccgtaaacaacagcgggtcttgcatttcggtcattgcattcatattgcctcctaactggtttgattatgactcggcagaaccgagcttgaaagccactaccctatcctccgcttccgccaagtgaatcaatttaccctcaacgatcgcgcccaactgtatctcaagcgttttatagtgtacatcacctgtgaccttcgctttgctctgtagttccagatactccgccgcattgacggggcccactacagtcccgttcaccacaagatgggtaaccctgatctcgccgtccacgcgagcgtgctcgctcaataccagggtgctgggtttgctgagatcggcaatcacattacctttgatctctccatcgacgcgcagtccgcccgtgaaatggacgttgccttcaatcctggttcccacccctaccagcgagtcgatacgattctgcggtttactattccggctgctgaacatgcttgacttctcctttaggacggcaggtcgaccgtctgcttgatcttgggctcctgtatccctttttcgaatacacgaacctcaacgctatcgaccttcatctccggcggcaacttaaaccccttgtccacacgctggtaatacttgaaactcaactgataagctgccacctcggacggcgagtcctcctgcgggaattgtagcactactttcctgccgtcccgcagcccgttcaccaccagttgcagactgccctgaaatgccttgccgcgctgttgaacactctgtaccagcaacatgcggcacagatattcgccgggcaggctgtcaggctcgatcttcaggcgatgaatggacaattcggcctcgcgcgcaccggtcagcggcaagttctggaagaacagcaggtcttcctgcaaacgcgcattttcatcgtgcaggtttttcagctgcgcagctattccctgattggaagcctggtcgatctgtgcctgacgttcgtatgcggcaatctggttggcttgcgaagtattctggtcttccaggaaatgcacccgctcgcgcaattcgctcaattccttttccgactctccgcggtggaagccagccagctccagacccgagccatacgcccaccagatggtcagccctatcagcaggacgaaaggcactgcaatggcccagcgcacataccatggcacgtgcgggcgcactgacagccgcggcgcagagatactgaacttgcggcggaagcttcgtatcatcttcatatcaaggcagcaagggaaccacgttaagcccttcggattccggcaatccgaacatgatgttcatgttttgtaccgcctgccccgcggcgcccttgaccagattgtcgatcaccgacagcaccacgaccgtatcgccgccttgaggcctgtgcaccgcgatacggcacaggttggaaccccgcaccgaacgtgtttcgggcatgctgcccgccggcaacacatcgacgaacgcctcgttggcgtaacgctgctcgaacagggcctgcaaatccgcatccttcttgaggcgtccgtacagcgtggcatggatgccgcgtatcatcggagtcaggtggggaatgaaagtcagccctaccggcttgccgatgacattccccagcccctgcctgatctcgggcaaatgccgatgtccggccacgccataagccttgaaattatccgaatcctctgaaaagaggtagccgacctcggctttcttgcccgcaccggatacgccggatttcgaatcggcgatcagcgagccttcctcgaccaatcctgcctcaagcaagggaataaagcccaattgcaccgccgtcggatagcaacccggattcgccaccagccgcgcctgtttgatcctggccctgttcacttccggcagaccgtacactgcctctgccaccaaatctggacaggcatgggtcatgccataccatttttcccactcggcgatgtctttgatgcggaaatccgcagccagatcgatgacccgtacgccggcatccagcagggcgcgcgtctgttgcatcgcgataccgttgggcgttgcgaagaacacgacatcgcactgatcgagatgtgcctggtcagggtgggtaaaaggcaggtctacataaccgcgcaggctgggaaacatctggctgaccagcgtaccggcctcggcgcgcgaagtgatcacccgcaactctgcctgcggatgtcccgccagcagccgcagcaactcgacaccggtatagcctgttccccctacgattccgattttcaacacgttcgtacctcaaaaaatcagctgtaaatgataaaggaaaaagccgcccaaaggcggctttttctgtcctgcggcaatcccacagaggattaacgcttggagaattgcttcctgcggcgcgctttgcgcaggccgaccttcttgcgctcgacttcgcgtgcatcgcgagtgaccagacctgccttgctcagcgtgggcttgaggttggcgtcgtagtcgatcagagcgcgggtgataccgtggcgcacagcgccagcctggccggattcgccgccgccggatacgttcaccatgatgtcgaacttgccaaccatgtcggtcagttccagcggttgacgcaccaccatgcggcctgtctcgcgagagaagaacacatcgatcggcttgtcgttgacgacgatgtcgcccttgccgggtttgatgaaaacgcgtgccaccgcactcttgcgacgaccggttccgtagttataagttacgctcatgattaagccttcaacagatcaatgggtttcggttgctgcgcgctgtgcgggtgagtcgcaccgccgtagactttgagcttgctcaacatcgcatagcccaacggtcccttcggcaacatgccgcgcacggccttttgcagcactcgctgtggatgacgctgttgcagcttgaggaaattggtttcgtagataccgccgggataacccgtatggcggtagtacatcttgtcctgagacttgttgccggtcacgcgcagcttgtcggcattgacaaccacgacgaaatcgccggtatcgacgtgcggcgtgtagatggctttatgcttgccgcgcaggcggatagcgatctggctggccaaacggcccagaactttgtcggcggcatccaccagcaaccagtcgtgctggacttcgtgcggctttgcggaaaatgttttcatggcatttcctaaaactaaaaatggttaacagactgcgaagggcgcgcattctaagcgagaccaccatccctgtcaaacgctatcaatcacgcgggccaacctgcccggaaggcacggcacgcaacagtccgtccagccaatccttccacttggcatattttccggggagccccgacgggcacgcgggcacatcgatcttttgggccattctgccgcctgcacccggcagtccggcggcaaggtgcgccgcaccgttcagactggcctccgcctgcagcaaacgataacaggtgcatggcacgcaccgggcgatcccttgttgcaggcagggcagactggacaggccccctgaaagatagacccgttcaattccgaaatcccgcctgaaatcttccagtatccgggccacccgaaagatgatggcttcctgcagcaacagtgcaatgcgttgcggcgccagatgctcgaccggctccgagaacgccagacccaggtcactacggaaatacggcgctcccaacccgctcggctccgccaggcaaaagatgccgtcgctggccagttcttcaacatgacactccccgaccggatacggcgccaaggctgcagcgatggagttgagcgttccttccacggccagatgcggcggttgcgaagtatcctgccagaccagggtttgcaggtagccgtcgggagcactcgcctgtcgcggcagataactggccacgaacccgccggtccccaggttcaccagcgcttccgcctggccgggggcgatactggcgatcagtgccgccgactggtcgcccacgctcgcctgcagaagcaaaccgttccgcagacggatatccagcgcgctggacggcttgatctgcggcaaagccagctgcggaatatcgaacaatccgcacaataccggcgaccactgccggttatgaacatccatcagcaaggttcgtgcagccattgaaacgtcggtgacatgctcccttccctccgtccagcgccagacaagaaaggaatccagcgttcccggcagccattcgccgctcagcaaccgctcccgccaggatgggttctcgcgcaacagcacacgcagtttgggggccagataataaggtgtcagcggcaagccggtaagttggagaatcgtgtcttcacgatctcgcagcacggcacagctttcagcgcccctgtcgtcctgccaggaaacgagcggcgtcaccggctgtccgctggcgcgatcccagatcagaaaggaagaacgctggctgctcaggccgagaggtaggcgcacttccgacgcgttaccgacaaagtcggccgtttgcgggaggaagtgcgatgcgcccgctcccgcaccagagggctccgccccaccgcgtcgcgggcgcacttccgacgcgttaccgacaaagtcggccgtttgcgggagcgggcgcacatcgttgctggccagacattccgacagcaccgcttccgcagttgcggcataggcacttgcatcgctctcgtatcgcccgccgtccactgtgatccggggtgcaggcctggcgatgacgctgccaagcgtgccgccctgcgacagcacccccgccttgatcgtggtcgtccccagatcaagcgcgacggcaacgatcatgggccgcaagcctcgacttcgcgcgcgatcctgtcctcatcccagcccatcacgggcgcgaccagctcagccagtcgccgcacttctgccgtgtccagtcttgccaggatcagcagcggcaggcggcgacgcagcaggtccgccagatgcacgaccatttcgtcgcgggcgcacagcaacagatcggcatggatgaacggcagcgccggcacgatgcgagccgccagttgcggcgcctccccgaccaaccggtatatctgctcgatgcggacgccatgacggcgccgcagccatttcgcgcactcggcatcgatgcccaggcgctgcgcctgcgcgccggtctgatcggaccactcttcaaatttccgcggcggcttccatggaaaatccctgcctccggtcgcgcaaccggctgccacgccggaccgggtgcataccgtatcgacgatcacagccgcatcttcgcgtgccgaggtaagctttccgccgatggcgtaaagcagcccgttccccgtcgttttcagctcccaatcgcggctggcgtcggaaggatgcgcagcgtcgctctgcttcatcacgcgcacccccgcatagctgccgatgacgtcctgcctggtccacccggttttcaggtagcggttggctgcggcaagcagatacgccacgtcttcctcttccacgaccacgcgatcgacgtcgccgcgatagtcggtatccgtcgtgcccagcaacgtccggccgtaccacgggatgatgaagaacacgcgcccgtcctgcttcgccgtcaacaggatcgcctcgccggtttgcagggcaggcatcaccaaatggatgcctctgctcaagcggcaccaggcttggtccggagcaatcgctgccatccacgggccggcggtgctcacgcattgcctggcgcgcacttgcgccgtgataccgctcaccccgtcttgcaccgtcgcaccgcacacctggccgcgcacttcgttccaggcaaggagtttggcgtagttcacgcacacggcaccctgcgccatcgcgccggccaccagttccagcaccagccgcgcatcgtcggtctgcgcatcgccataagtgaagccgcccttcagggaggcttcatcaagaaaagggaaatgatccgaaaattgcgcgcgaccaaaatggcgatgccgcatctgcccgtccgggaaccccgccagggtgtcgtacagcgtcagcccggctttcaatttcaaggtgccgttgcggctgtcggcatacaccggcactccgaagcgcaacggccatacgcgatgcggcgcgatctgcaacaacaggcgccgctccttgagcgccttgcgcaccagtttgaaatcgtaggtctccaggtagcgcagcccgccgtggatcagtttgctggacgccgacgaagtcgcgctcgcccagtcgccctgctccaccagcgccaccttcagcccgcgcagcgctgcgtcataagccgtccatgcgccgtagatgccgccgccgcagaccagcatatcgaactcaccttgcagcgctgaaaagtctcgtttcatcatagtgttcacgttgacaccggcaagtttgaatcatagagtaaatgccgcttgcgcactcgccgtcatcattccttcgcgatgcacgaaggaagaacggcagaaatcagaacaggaggctgacgcaagaataccgtccaacttgacgcaggttgtcttgtttggagccgggatgattcatcatttggatgaacccggcatgggcagccacgcctccgccatccacgttcaggccgggccgcgacctgtctacccaaattaaaagcccggcaggtttccctgccgggctggatacagaatctttcgattctttattgtagcaacggctctcaccccggataagctacgggtgggattatcggggagaacaaaatgtcaggcaagaagaataatcatggcccgttgaccatcggactggacatcggcatcgcatcagttggctgggcggtactgggagaggaccgcatcgttgatctcggggtacgatgctttgacaaggcggaaaccgccaaggaaggtgaatcgctgaacctcgcacggcgcaccgcacggttgatgcgcaggcgtttgcgccgccgcgcctggcgattgaccaagctggcgcggctgctcaagcgcgaagggttgatcgccgacgtgaatatcctgaagcggcaacccgccaaaggattccagactcccaacctgtggcaactgcgcgtgaaagcgcttgaccgcaagttcgacgccgaagaatgggcgcgcgtgatctatcaccttaccaagcatcgcggcttccactggatcagccgcgcagaagccaaggcggcggacagcgacagcgaaggcggcagagtcaagaaagggctggcgggcacgaagaagctgatgcaagagaaaagctaccgcaccgccgccgaaatggtcgtcaatgaatttccagatgcccaacgcaacaagcagggcgactacagcaaggcgctatcccgcgaactgctcgcagttgaattgaagacgttgttccagcgccagcgcgagttaaacaaccagaatgcaagcgaaacactggaagcggcgatcctcggcaacggcgacaagaagagcgggctgttctgggtacagaaacccgccctgtccggcaaagacctgctaaagatgctgggccactgcaccttcgaaaaagcggaataccgcgctcccaaggccagcttcaccgccgagcgccatgtctggctgacacgtctgaacaatctgcgtattgtggtggacggcaagctgcgcgaactcaccgaggccgagaggcaaatcgtcttgccacttccctatgagacgggcgagttgaagtatgggaaattgcgcaaagcgctcaccaaagccgggctgtccgatgaattccgcttcgccgggctctcctatccgagcgaacgccagcagaaggaagaaaaagccaaagacccggaagacgagaagctcatcaagctgcccgcctggcaggaactgaaaaagaccctgaaagacgccgggcaggagaacgaatggcagcaactctcggttgccgcgctcgatggcaagccgcaactgctcgaccagatcgccgaggtgctctcggtgtacaaggaggatgcggaagtcgaaactgaattgcgcaaattggatttgccaaacaaggacaagctgatggatgccctgctcgacatccgcttcgacaaattcagcaacctttcgctcaaggcgctttacgccattctgccgcacatggaagccgggctgcgttatgacgaagcctgcgccaaggcgggctatcaccatagccagttgcacgtagtcggagaagggaaacatacatacctgccgccgttctactccgggcgcgataaagatggccgcctgaaattcaacgaggacatggacatcccgcgcaacccggtggtgctgcgcgcgctcaaccaggcgcgcaaggtcgtcaatgcgctggtgcggaaatatggctcgccctatgaagtgcacatcgaaatggcacgcgacctgtcgcgcaatttcgacgaacggcgggatatcaagaaagagcaggatgctttccacgagcgcaacgagaaagacaaagccgcattcgccagcgagtttaatgtcgtcggcgcggtcaaaggcaaggacttcgagaaataccagctctatcgcgaacagcaaggcaagtgcgcgtattctctggagccgctggacatcaaccgcctgttcgagcaaggctatgccgagatagaccacgccctgccctattcgcgcagcttcgatgacagcaagaacaaccgcgtgctggtgctggcgcgcgaaaaccgcaacaaaggcaacatgacgccctgtgaatatctggggggcgcggaaagcagcccgcgctggcaaaacttcgttgtattcgtcaacacgaccaagacttaccggcaagccaagcgcaaccgcctgctcaaaaaggacttcagcgacgaggaagccgaagccttccgcgagcgcaacctcaacgacacgcgctacatctgccgcttcttcaaaaaccacgtcgagcgctatctcaagctgcatgacgaaagcaacgtcaaacgctgcgtggtgttgagcggccagatgacctccttcctgcgcgcccgctgggggttgataaaagcacgcagcgactccgaccgccatcacgcgctggatgccgtcgtggtcgccgccgccagccatggcatggtcaagcgcctgtccgattattcgcgccgcaaggagctggagaaagtacgcgaaggttttgtggatgtggaaaccggcgagatcgtgcaccccgccatgttcgataaactggaacagcactttccttcgccttgggcgcatttccgagatgaactgatcgcaaggctctcgattgacgatccggcagtcttgcgcaccgagatggagaaactgggcaactatccgccggaggcgctggaagcactgcgcccgctgttcgtctcacgcgcgccgcaacggcgcaacagcggcgcggcgcacaaggaaacggtttatgcgcagccggaaagccagaaaaccacaggcggcgtcacgcaaaaagttgccgtgaccaatctcaaaccagccgatatcgacaagctgatagaccagcaccgcaacgaaaaactttatgccgcgctccgcgtctgggtgcagcagcgtgacgagcgggagaagcgcgccagggacatcgaaaaagccgcgaaggaagccaaacgcgaactatcggcggatgagagaacagaaatagagcgtttgcacgccctgccgcgcaagccggacaggagcggcgatccgactggtcccatcgtgcgcaccgtgacgatggtgatagacaagctttcaggcattccaatacgcggcggcatcgccaaaaacgacaccatgctgcgcgtggatgtgttcaagagcaagaaggatggcaagttccatcttgtgccggtgtatgtgcatcacagcgtggcggggttgccgaaccgggccatcgtggcattcaaggatgaagatgaatggacggtgatggacgagggatatgacttccattattcattacaccctaatgatttcgtcaaaatctcgctaaagaaagagacgccgtcaggttattttgcaggctgtgaccgttcaactggtgccgtcagcttatgggcccatgaccgcaatcaaaccgtaggcaaagacggtttgattcgcggcattggtgtcaaaactgccttgaatgttgagaagttcaacgtagatgtcctcggcaacatcttccccgccccaccggagagccgtcgtgacctggcgtagcgtcgtcatctcccgtcccgcgaagctcaagcgggatcattactcgctcgccatcgagcaggagcggaccgcctgcgttccgttcgaggacatcgcggtgatcgtactcaaccaccgcgaaatcacccttacccatccggtgctctcggcctgcggcgaatatggcatcagcctgttcgccaccggcgagactcaccaccctagtggtgtattcattcccttcctgccccattcacgcgccacacgctggctacgcctgcaactcgatctgccgcgccctgtcgccaaacagacgtgggcagccgtcattcgcaagaagataggcaaccaggcagccgtgctcaatatgactggtcgtgacggcgcggacaggctggattcatacgtgcggcgagtacgatcaggagatgcggacaacatcgaaggccaggccgcgttcttctacttcacgcaattgttcggcaaagacttccgccgcgaccatgaacgattcatcaatgccgcactggattacggctatgccgtgttgcgaggcacgattgcacgcggactggtggcgcacgggctgatgccatccattggcctgttccatgccagcgagcagaatgccttcaacctcgcagacgacgtaatcgagcctttccgcccgctggtggacttgtttgtttacaggatggcgccccaaccagatgatgagttgcacccggaagacaaggctgcgctggtgagtctgctcaacatcgacgtgggcatgccgcgcggcaagatgtcggcacttgccgcaatcgagcagacgatagaaagcctcgcgcgcatctacgatggcggcagtgagagcttgctggaactgccaaccgtcattggcttggagcaacaccggctggagtgctgagccatgagcacggaaacgaggcgattcatgcgactgctcgtattcttcgatcttcccgtcgtcaccaaggccgagcgcagggcctacaccgtattccgccgctttctggtcaatgatggctacgacatgatccagttctcggtctatggccgcatcctgaatggtcaggatgccctggaaaaacattacaaaaggctgatagacaacctaccaccggaggggtcggtgcgatgcctttcagtgaccgagaagcaatttgccagcatgaaactgcttgttggcttgccgctttttcaggaaaaagccgtcaagaccaaccaattgctgttgttctaaaccgtttccacaaagcaaaacacccgcccagcctaagctgggcgggcatttgcgtcaggtctatcgtagctcatccggggtgagagagggagctacaacatttcttcttcttggtctttgtggatggggatcgtagctcatccggggtgagagagggagctacaacgctttccttggccttctcaagcactactgcatcgtagctcatccggggtgagagagggagctacaacgtattccgccgcatagtccccgttctgaacatcgtagctcatccggggtgagagagggagctacaaccaggaggtttagactgatcttgctggattcatcgtagctcatccggggtgagagagggagctacaacagtaacactacagagctggctgaaaggtttatcgtagctcatccggggtgagagagggagctacaacaatagtgcatcggatgtagacacggaaagcatcgtagctcatccggggtgagagagggagctacaacgacgccctgaatggggataacggcaacgccatcgtagctcatccggggtgagagagggagctacaactggttcgccgttgagccaggcatcggacagatcgtagctcatccggggtgagagagggagctacaacatctactccaacgatgtataactttccgccatcgtagctcatccggggtgagagagggagctacaacgcggtgagcatgggttcgtgctgcgaggcgatcgtagctcatccggggtgagagagggagctacaacatcagcagcgagcaatacgccacgctgctgatcgtagctcatccggggtgagagagggagctacaaccaagcgactcgcggtactggtctttcttctatcgtagctcatccggggtgagagagggagctacaacgttgaagattcccaccccttgcggggtggcaatttcaacgtcgcgcttcgcgcggtctagcaatactgctccctcatctgcaacgccttttgcggcacatcgctgatcagcacatccacccccaggaccagcgcacggctgatctcctcgtccgtgttgcaggtgtagaccgcgatactcttgttgcgtccgcgcagcagcgcgaccatgtccgcatccagcgtggagatgtgcatgcacaggccgtgcaggaaaggctgcatgtccagcgcacggcgcgcatcgttcaggtcgtgctccggctccagattcagcaccagcggaaacgccggtgcgatgcgctgcgcgtaggccagccccgccgaattgaaggacgagaccaggatgcggtcatccgttgcggcgccggccagctccagcgtctgcctgaccttgagttcgcctctcgcagtgacctcccagtcgcggatcttgatctccagcagcaagcggcaacgcgcgcggtaagccgcaatgaattcctgcaggctcatcacgccctcggacgcgcccgatccggcgaaatgcgcggcgaaatccatcgcccgcaattgggcatggtcgaaatcgtcgatgtgcttgccgggcaacttcagcttcttcaggtcgcggtcatgccacaacaccgcgacttcgtcgcgactgagctgcacgtcggtttcgatgccgtcgatcggataggcgagcgccttgtcgaaagccgtgcgcgtgttctcggccgcttccctgtttgcgccgcggtgggcaaagaccagcgttctgctcatggcaatccttgaatgaatttctgcatggaggcttccatcgccgcatagtgcgggttgtacatcagtcgccgcaacagcccgtgctcaagattccgctcgctcacttcgccccaccagacctccccgggctgcgacatacaggccttgtaacgttcgctgtcgttgtcatagtagtgcaggcagttggtatattcaccatttgcgccgtaatacgtatcttccggcggcatgacgatggcggtatgcgcgctgctcaggatgcgcttttccggcaccgcgctgtccacccactcgacgttttcctgctcgacctttgtgctcgagtaccacaccagcctgctgcaccgatgccttgcccgccgcatgaagcgcaaggtcgccgccgaattcacggtggcatcgtcctcactggctaccgcgaacaccggaatgtccacagcgcccttcggcaaggcttgtgtcagcttgtacatctgcgccgccgcattcttgcagaacgattcgtatttgtagagatcgcgatcctgcatgttgctcacccaggctgccttcggcagcagccagctgtagagcttgtgcaggttcgcccacttcgccagcggagtgatctcgagcgcgggagaaaacaggaacaggccgcgcacccggtcgtcgtgcgccgcatgaaacacgctcagtgcagcaccggccgaaaagcccgccagatacagttcgtcgacttcttcatacaagctgtccgcaccgtaggccaccgtcttcgcccattcccgccaatccacatcgagcaggtcgccgggctgcgtgccgtgcccgggcaacagaacggccatcacgcggaatccgttgcgctggaaaaattccgccagatggcgcatgtgatagggggagtcgatcagcccgtgagtgagcagcacgccgcgtctataaggtttatcccgccccttttcaaagtcgccagacggcgacaattcaaaaggcgtattgcctgcgacgatctcttcctggtcgttcttgccgtcatggtgacgcagcagcatggcttgcgtttgccgcacgtactccgcgaacggcaaccctgcgccggcgaatccggcattcatgcccgaggtgcggtgccgcaatcccaatatttccatcatctctccgtcatattaacgtaacaacccggcgttatcttgcgcaccctaataggcaagcaggaggactcaatgcacagcattctacctgtcgaaaagtaccgcaccactgcccgcgcacagtttttggcaagccagttcatgccgcgccccaaggaacaagccatgtcgccactccgtgaaatcctcgaacagcggcgcttgagcgccctgttccagcccatcatcgatctcaagagcggcgagttcctgggcttcgagggcttgatccgcggtccggcggacagtccgctgcactcgccgatcaatctgttcggtgcagccgaacaacagggcctgcaactggaactggagatgctgtcgcgccaggtcgtgctggaaacattcgcaaaactcaatctgccgggcaatctgttcctcaatgtcagcccggagacgttgactaatcccagcttcaaggacggccagacgctggcgtttctgaaacaactggggctcgatccggcccgcgtgatcatcgagatcaccgagaaccagccgaccttcgatttcgagggcatgcgcgatgccttgctgcattaccgcggaatggggttcaagatcgccatcgacgacttgggggagggcttttccagcctgcgcctgtggtcggagttgcgccccgagttcatcaagatcgacatgcatttcgtgcagggagtggaccgcgacccgatcaagctgcagttcctgaaatccatccagcatatcgccgaaagctgcggcacgcatgtgatcgccgaaggcgtggagaccgaagctgaactgcgcgtggtcaaggacatcggcatcgcgctcggacagggctatttcatcgcgcgccccagccccacgcctccgttgctggcatccaccgagaccagccgcatcatcaattcgtccaacatcgccctgtttcccaaggcggatttctaccagcgttcgcaaaccacggcgcacaagctgctgacctatgtcgaaccggtgcaccccgacacactcatcgatcacatcttcgagcgtttcaacgtcaaccccgcgctgcgcatcattccggtcgtcaggaacagcgtgccgctcgggttgatcaaccgttatcacttcatcgaccgcttctccaagcccttccagcgcgagctgcacagcaagaagccctgtggtgacctgatccagggcgatccgctgctggtggaaaagggcatgccaatcgaggaactcagccatttcatggccgaggcggacagccgtcattttgcggacggcttcatcatcaccgagaacgggcgctatatcggcgtctcgtccggccaggacctgttgcgcgagctgacccagatgcaactggaagccgcgcgttacgccaacccgctcaccctgttgccgggcaatgtgccgatcaacgaacatatcgagcgcctgctgctggcgaacacgcccttcgttgcctgttactgcgacctcgatcacttcaagccattcaacgacacctacagctatcgcaagggcgacgagatgatccagctcacgggccgcatcctgagctgggcctgcgaccccaagctggatttcatcggccacatcggcggcgacgatttcatcctgctgctgcagagccgcgactggaaatcgcgttgcgagcaggctttgcgctccttcgagcaggccgccgaactcttgttcaaggaagaacacctggctgccggcggttaccacagcgaaggccgcgacggcaccgtgaaattccatccgctcaccagcctgtccatcggtgcgatccaggccgccccgcgccaattcctgtcccaccatgaagtctccgccgccatgaccgacgcgaaaaagatggcaaagaagaccagtggcaacagcctgttcatcgaagtgcgcaccgccgttacccggcaatgaaggagattcccatgaaactgtttgccaaggacaacaaggaagtcgccccgggcagcttccgcagcatacgcaacatgctcttcacgcaaggcctgggtggaaccctggaatatttctgcacgttttccgtgttctccgttctgtcagaggcttgaaccgggtgcacatcctgaccagacgactgatcgccctgttccgtgccgcgcgcgtcgcgctgcatatcggctacggcctgacgctggcgatcgcctatccatggttcggattggccatacggcgacgcattttgcaaagctggtccgccggattactggagatattcaacgtccgtatcgagatagccgaaggcgacccgctgcacgccctgcgccccggcctcatcgtcaccaaccatatttcatggctggacgtgttcgtgctcaatgcagtggtgccgatgcgcttcgtggccaaatccgaagtgcggcgctggcccgtcatcggctggttgtgcgcgcgcgcccagaccctgttcatcgaacgcggcaaggcacgctccgcggcgcgcatcaatgtgcaattggtcgacttgctgcaacgcggagaatgtctggccgtcttcccggagggaaccaccaccgacggcctgaaagtcgggcattttcactcttccctgctgcaacctgcgatcgatgccggagcgctggtgcatcccatcgccatccgctaccaggatgatctgggggcccacagcctggcgtcggcatatatagatgaaatgtctttcggcgcatcgatgtggaacatcctgagtacagccgagctgcacgtgcagcttgttgcgaccccgccgctggacgcaagcggcacggacaggcgcaacctgaccggcgcggtgcggcaacatatcagcacgacgcttgccgccatgcacagcgcgccggcatcgcttcctcaaatggagatcgcctacgaacatgctggaaccgagcagcatttccagtcgctctattgcgtattgctccacccgtcactggtgcaggaagcgacacagcattccgcaaaatagcttaattaatttttcatattcccttaacccccgtgcaacataccgtcgctaatctgctcccatcaactcaacgggagaacaccatgctggacctgatcaagcaagaacaccgcgaagcgcaaggcagactcactttcagcctggcacgcaccgttgccgaagtggctgaagcgcagcgcgtgcgctacaaggtgttcgccgaagaaatgggcgcaaagttgcccagcgcagccctgggtctcgatatcgaccgcttcgacgaattctgcgaccacctgctggtacgcgatcacggcaacgacaaggtcgtcggtacctatcgcatcctgccacccgaacaggcagtcaacgcgggcggatattattccgagaccgaattcgatctgtcccgcctgatgcacctgcgcgaccgcatggtggaagttggccgttcctgcgtgcatcccgattaccgcgacggttcgaccatcacccagttgtggagcggcctggccgattacatcggcaagcacggccacgaatacctgatcggctgcgccagcatcagcatgggcgacggcgggcactatgccgccagcgtctacaacaaggtgcacaagctgcacggtgcgcccgccgagtaccacgtgttcccgcactgccgcctgcccctggaatccctgaaccagaacctggaggtcaccatcccgccgctgatcaagggctacctgcgcctgggtgcctatatcgccggcgagcccgcatgggatcccgatttcaattgcgccgacctgttcatcctgatgccggtatcgcgcatgaatgcacgctacgccaagcatttcatgaagaaggcagcgtagtttcccggtttcattccgtctcccctttgcgcgcactcggtatggtgcgcgttctttttgctggagaagtttcgctgatatattgcagctgcacacttgtgtctcaattcaggagccgttcgatggaaagtccttacaaaggtaagacaggtctggtgcgtttgtggaatgccttcggctattcgctggccgggttccgtgccgcctacaagcacgaagatgcattccggcaggaagtcctgctcgccaccgtcatgatcccgctggcattgtggttgcccgtaggtcatatcggccaggcgttgatgatcgccagcgtgctgctggtcatcatgatcgaactgctcaactctgccgtcgaagccaccgtggaccgcatttcgctggagaatcatgacctcgcgaaacgcgccaaggatatcggcagttcggcagtgctggtgagcctgatcaatgtgctggtggtgtgggggctggtgctgctgcactagatgtgcagtcataaaactttcaaattggtttaatcaaatattcatgcgtacgcggcaggatgtgcggcatgaatacaccagaccataacctgaacaagccggcgccactgaatatcgcgctggtcaccgaaacctacctgcccgaagtgaacggcgtcgccatcaccatcggccgcatggtgcagggcctgcgcaagcgccagcaccgcatccacatgatccgcccgcgccagttcaagcaggatgtggcggcaaatgaggaaggctacacggaaacgctggtgaccggcatgcccatacccggctaccccgaactgaaatctggattgcccgccaagggcttgctgatgcgcctgtggaagctgcaccggcccgatgtcgtgcacatcgccaccgagggcccgctcggctggtccgccctgtcggccgcgcgcaagctgaacatcccggtgagcacggatttccacaccaatttccacagctactcgcaacattacggtgtcggcctgctgaaaaagcctatcgcagcctacctgcgccatttccacaacaaggcggcgtgcacgctcgtgccaacggcttcgctgcagcaacagctggaattcgagggctacaggaacgtatatgtggtctcgcgcggggtggatgcggaactgttccatccggccaagcgcagtgccgagttgcgcgcctcgtggaacgcggacgaaaacacaccggtagtgatgctggtcagccgcatcgcgccggaaaagaacctgcatgtcgtcatccaggcattcgagcagatgcgcaagatcaatcccttggcgcgtctggtgatggtcggcgacggccccgcccgcgccgaactggaaaagcagcacccgcacgtgatcttcgccgggatgctgaccggcgaaccgctggcacagcactacgcttccggcgacatcttcctttaccccagcctgacggagacttacggcaacgtcacggtcgaggcgatggccagcggactggccaccgtcgcgtacgactatgccgccgctcgccagcacatgcgtcacgacgagaacggcttgctggtcccgtttgccgacaccgatgcgttcgtcaagctcgcaacaggcctgatctcggacatggagcgagtgaagcgcctgcggctggccgcacgcgagaccgtggaagcgctgacctgggagcacatcatgggcgagatggaagccgtgctgctcgataccgtccgcacacagggagtacaaaatgtccaacctgaactttccgctgcagcagattaagacctgggatatggagctctgcgccttctgcaacaggcgcagccgcaacttcacggtgcgcaatctgttccgcctgttcagccgcctgggcgacggcgtgttctggtatgtgctgatgatcgtgctgctgctgcaatatcaaggtgcagcaattcccgcggtatttcacatgatcgtcgtcggcctggtcggcacggcatgctacaaattcatcaagggaaagacactgcgcccgcgtccgttcaacgtctacccggccatcgtctgcgccggcaagacgctggaccagttcagttttccttccgggcataccatgcatgcggtggccttcagcgtt

SEQ ID NO: 2859 - DNA, 23423 bp, synthetic construct
  source 1..23423: mol_type = other DNA
  misc_feature 1..23423: note = Synthetic
tgccgggcttatgctgattggttatctgttaccgggatacccgagctgtggtgctgaacagcgcgatcgaggtataggccgctttcagctgcgtcggcgtatgcagcaccacgaactggtcgccatacgcttccttcttgcccgtgaaacgtccgttcgaatcgcgctggtcctgtaattgccccatggcccagggtttcatcatccggtaacgtgtttgcccacgctcgccgatgacgatccgttgatcgcccatcgcgaggcccggcgcggtggtgcggaaattgggcacatccttgacccttcccaggttaccttcgccgtccagatcggtgccggtacgcttgccggattcgatgaagctgcgcgcctgctcgatctgagtgcggatggtcccgctcatcaagccgaaattcgccatgtggtagcggtcggactcgatcacgttcttgcgcaaaccgtaccggtagagaaagctgtcccagaacagatccgttgccacggatccctgatcggtgtcgaatttatacacattggtggtgtagctatagcttgccactatggcatgcgtgctcgtcacgttcgctacggcgccgagctggttcacgaagtggatctcgcccaggttgtagtccagccaccagtaggtgcctgcgccctgggtcccggtgaagtcatactcattgagcgtgacgctgttgaccttgatggtgatcgggtagatagtgctgccgacctggttgccttgcaggtcataaaccttcttcgggcgcacaaccgggaattgcgccaacggccagatgctcttgctgccattcccggtaccgaccgcctcattggccacgtcggtagaggcgtactgatcggaggcgttcaggatttcgttgaagataaggcgttcgccgtcttcactgatgatgcgcgaagcattgcgcgcattttccgatacggcatcccagtcgagctggccattgctggtcaaataacgcagttcgtcgctcacctcgaaggagattttctgaggaatagggtaggcagtctcgctggtttgctttaccccggcgcgcggaatggatccgccttcatacacccgagtgctgttgattccggcggcagtcgtgtcgcggtagctgtagggaatcaacgctgagcccgaaaagggcagggtgcccacattcacgaactgcaggccgatcatgttatagagcgcctcgcggataacggtgcgctcgaatatcgccggcacggccacgtcggaaacgaggccatctcccgccgccaggtgtttgtgttcggtatgtaactgccgggcattggcgacatcgaattcatgaaggaccttctcggcgaaatccttgtttgcggtctgcaattggccgcctgtgtttgagaaacggcgggtgggggacaggctcaccagaccgaggcgcttatcgacagactcctgcaaggctttcacttcgttgcccgattccacactgatgtgcacattgccggcggggagttgaaagcccatgcccgtgagcttcttggcgacctccagcttattgccgtgtgcaatctgaaaatcggccaattttctcacctgaacaagactcatctccggcgtgaccaggtcagtcgcagccgcgataagctccttcttgctgtcgtcgctcagggcggttacagaattgatcgtgtcggtgagcagcttgatattgccatcgcgtttatcgctcaatttcttggtttcatcggcttgacgcgtggcctcttcagccatcagtctttttacatcatcggcggttaaccccgtggataggttcggcgcctcgatgagcagcttgatatctttaacgctgccgccggcggcagcaatctgctcgcccaactgtttgccggagttggcaaaggcatccatcagctgcttggcctttacctcatcggtcataggctgcacggccacctcgaatgcactgagcagctgggcgcgcatcggttccgacaagacaacaatggcggcaagcgcaaggctcaacatgtcggacaatttcttatgcatggtgtgaatctcctgtaatagtgtggtctgcagttcggggtgaatcagcgtgggcacatcgtccccgctggtttcggataaccggataggatcgagatgcttgatgcacggacgcgtcaccaggcctgcgcccatcattacggcgccatgctgtttcccgctctcgttgtcctggaagttctcgtggtattcgatcgagctgtaggcgtagcccttgcccttgatggactctatgccgtaaggcgtccattccacctgtgcccgcaacctgtcgccttccagcttcagttgcagcaccttgcctgccgcgccgttatcgggccggtgggcaacgtcatagaaaatgtcctgtccgtacacccgcttatcgaagttctcgacaatctgccccaacatgcggcggctgatctcgaactcgccataacgcggatcgcggaaattgccagtgcgcgtcaccgtcacccagctcgtcgtttttccttcctccagcgtcacatggagcccggacaggaatcgcactgtgccggagcggttttcagacaataggataatttttggcggcatgctgacctctcatagagtccatgccgcaggcaatcagaaggagggtgagcaggcctttttcagactgcccgcggtggactgaacgggatactcagccataacgcaagacataaacagggagggtttcggcgtacagaaaacgctcgtcacgcttgagccttgaggacattggccgtcgggacgtgatccacagagttatccaccgaaaatgtggatagaagagattttctacttgatgcgttttttactgaattatttcttctcgaaagcttccgccttcttcacgcccagcacgcccttgcgttgttcgggtgtcagcctggccagcgcttccaggggggtttccttcccggctcggtctgcatcagtgatctcatctttaaaaaccacttcgacgtaagagagtgtattcggatgtgccggccatggacacgtttcccggtccggataaacacccggtcccaagccgtagagatttgccgttgcgtgcagatcgcagatatccggctccggatgggctggggagagcaggaatcgcacgccggcagcgtgaggatgatcgagcactccagcgatatatgcctccccatgcgcacggttgatctcggtgcgcatcagccgcatcgcgttatccatgggactgccgcttcctgtcagcgcacccgacacggccttgctgatgccagcgctactggccgcgttcattttatccgcaagctcacccggcactgactgaccgcgcatcagcaattcacgtgccgcctgtaccgcaccatggccctggatcaccgccatctcgatggcattggttaccgtatcccgggcatgacggtccagccgccatatcctgtctgaaagttgcaaaccatcggctgcgacaaaagcgtgcacgaagcgcagcgactcctcggaaacgcgcattgctgcggccgagctcaataacgccttggactgcacaccggtaccggcagtagtcaacggtagcgtgccgaaacgtgcagcattctctagtccgttattcagcagggcatcgcgcgcggcggataacgctctgagcctgtcatttatttgcgccagcacatcctgcagctgtgtcagcgcgacattgccatcgcccccgccagcggcggcaatgcgctgaccaaggtcggcggcggcctgctgatagagctgctgcaattccttcagcgtttccgcatcgagcttattcattgcgcgctgtgcgtgcagcgttgcgcgtttgactgcggcttgaaccttggcatcgtcactcaattgttaatatccgtcgcactctcacctttacgcccattgcctggggtgatgctgactttcgcaggatttgccccgccgcctgcttctggatacggatcataattcttcgcttcccactcgcggcgttgctcgacataagctggatcgtaccccagttcttcccagaccattccttgaggtagccccaaggctttcagcttgaggccacgatcagtcgtttgcgtcgcggtttcagtgcgcctctcggcaaaagtgacggtgaaatcctcggcatcgggattgatgcccttcagcagtaaatgcagccggaaacccgcctcatagccaaaagaaagcgtgtcctgcagcacgtccacctcgtcgtaatagtcgcgtttcaggtcctcgaggatatcccgagccatgccgtccgtataacccatcatcccttttggcagcggcgacccggcgaagaacgtatcaagcagatgaacaatatcgcggacatggtcgaggttggcatcaccctgtaccgctgatacgccgccttccttgttcatgtaatagtcggtcgtaatttcgtgctggtctttttccacctgggcgcgatacttctcgatgtcatcttgagacgcgcctttcagcacgtgccccaggcgcaagggcgcccgtgtgcggcgccgaatcaccaggtcttcttccgtcatattgagcttacgccaggtggtacgcgtagcatcgaggaaggggcggccaaggctgcctaggtcgtcgaagttgtccgggtcaaagcgagcatgaaacaattgccacagcgggaatgccgcaagttcggtaccggtcataacatcaaactgtatgtaagctttttttacatccttgaaacgcccggcctctgtgatattgggcaggatcgtttccgagggcatgcgcacacctgccaccacattaaattctgtgtccagcacccactgtatcggcaggttcccctccattaccagcccgcgcgcgtctgatttcagtttctcaacccgattgagctgcagacggcgttggaaatcgtcccattgccgcgccagcgtatcgctggattgcgcctgctgcatgatcagcccgcccttgatcgtgtcgcgtgcgatacggctgtgaatgcgctttacgcgaccatcgagccgatccatctcccgtacatccagaatcgcctggcgcagatcgggatccacccacatcaaccgatagaggtatttgatctggtcttccggagtagggcgccggcctttctcacttgtggttgaggtgttggcggcagtttcctgcgggagcgcggtatcctgtttcacgagccgcgggaaaagtctggacaaaagattcatgacgtaccttttttgagtatttctatcgacatgacattccgccagccatcgatcaagcccagttccgccagttccctgatttcggggatcagttccggcatatgggtgcggaccaatctgcgattttccgcggcatgcgcctgttccaactcgctaagcggtcgcaatgcccgctgtttttcctcgttttggtgagagagtgcctccggcgagcgtaattctctgcccgttgcacgagcgtactcattcatcccgtcgcctccagtaatggcgggtttcccagcaattgatcgcgagattgggtgcggtacccgatcacggtcggcacatcctccgcaccgcgcgttaccagtgcccacacgctggcgcatgctccatcaaaaagatcgtcccccagcttgccgttcgccatcttgtaactggcatagctgccttttgtgggtaccgacttgatgttgcccaactggcgcacgaatgccacccagtcaggcgggcccgagagtgcagtagcagtacttccggggagccagactacgtttgcggattctttggccgtggcgatatcgcggctgtcatcgaaatacggaattgcagcttgcccgttatggaatgcggcacgcagagcggtggccatgccatgcttgatcatgccctcgaaccggatcggggcgaatggccactgagcccaggtggtagcggtactttgtccgtcgccgatcgtacggcgatcgatatcagtcagtccacgcgtaaacaggcgatcgttcaagctggtcagcatacccaatccataggcgtcacccatggcgtaatctggccggaagtactcccaaaagccaagcagatccatttccaccactttatcatccgtaccggccggccacgatttcacgaaagggaaggtcacatagttgccaatctgctcggataccaccaggctcgatttcgacgcggacagactctcaccgtggccgctgtgatcgtagccaaaggacaatagacctctcttcttgtagcgagccccgggcattggctcggcaatttgcagccgcgcctggagcccgaccgacatggccttgcggatgaatttttcccaaatgtgattctgcgcggatacatttttgcacaagaattgcctgataaattccccctcgggcagctgcatccgcatttcccgcatgaatgcttcgttgaggatacccatctctatcccgagatagacgttcacgatcggcaacaggtgatattgcttggagtcgatcagctgctgcagcacgtcggcacccttgaaaacgccggtgacacggatctggggcttgaacgaaacacctttatccgcccccatacgcctggcgccgcccagcatcggcagaaaacgcgacaacagccggtctgccggcatatcgtcgatttcctcgatcgatgcatagctgatcgcatcgccatcgatctggctcatgattccgtaggcgctagctttggagccattcacaaactgatatttggtatccgagagctgctcacgtccgcttttgtgcgcaatatacccgcgcagcatcggcgaacggcggatggcatcggtatggtagttaaggtttccctgggcctgctgcagccgcggtgccacgatccccagctcctgcgccggcgcggttgcgttgtgcttgagtgcgtgtagctctttcacagccgtcttgccagtgcgccggcatgaaacgtcgatggtgttcgggtgtttatccatctccatgcacttcaacacctggacgggatccagctcgacgttatgcacatgcttatgccatagcaggtgatcatccttgtaacgcaatatctcctgctcggaccgataagcgacccgcactctctcgctagcgctgatgcgagtcataaatttggaaccaatgtccgtttcaagtctattgcttgaagtaatagatcacgatgctgttccgcctgctcccgcgcctttttttcgcgcaataaatctctattcaaacagacgggacattcgatcaggaagtcattcttatcagcataatcgtgatcgaaagcgaatcgaacattatggatggtgcagcgcatttcgatcactttccactctcctgctggtactcgaccagtatcggatcggtatcggtctgcttattggctcgcataaccttttcagccatcgactcgagtaactggaccgtgcgctgccggaatgcatccacaccttcctggctctctttttcgtgggccagacggccgatctcgttgtcctcggcctcgatgagtttctgagtcatgcccatatctgccagcgataacccacttcgtgtgagtaattcgccaagttgctttagtagcggatgcgcctggacatcatcgcgcaggagtcgcctgtttccttgttcgtcaaaatactcaacaacctgcggagtgccgtctgggtcgtgcttccacacaagtttttcaacctttacgccatccgcgacgatggtctgaatgatttgctgaaccaatgcaaagacagatgcttgcaggtcggagtaaatgcccatcaaatgcttgggattgcgctgatcgaaggctgcgtgatgcaacatgaacaactcggtttttttgacgcaggccggttgtgaggcacagtaaacgcgatcgacatcgcacgtcgagcagaatgcataaccatcaggcttggacgggaaatatgtagccgtccgtgccgccaagccgtgtttcattgcattgaaccgcgtgcgtagcgattcttccttggtagggtgaccttccagattagcagctgtcgctgccttcccttcatgagttcgcggccccgtggcgtttgcccaggccttcagcagcccccgctcccatccaacctgctcgcattcactcctgcaatgcgggcattcgctatgatagagatacggatgatgatctagatccggcgcatcttccacccgcgccggcgctgccttaaaagtgcgatagcacggacggcagtaaaaggtgatctcggaaaggggcttgctacggtctatggccatgctccgcagtatcgcgtatcatggcaagtcagaaacagggaggattccggcgacataacgccgttatgctgcctttcttatgaaccgagcaggaaactcaacctctacttttttggttcgcagtgagacctgatcggggagccaccactttcatataattatcaataagttatactatcactcccactggctggaagtgcggtgtatagtattttaggtcacaaaattgacctaaaacccctctaaaacctcgcagagtgaaatatctatctttagttatcttaaagtatccccttaagtaaccgttaagtatcaccagtagtgtctccagtaggcacccttctcatcgcgggagggtgcctttcttttcgcctaaaacttctgctaaaggaaaagtaatcatgacagataaggttgaaaaacagaaagaacttgaagaagaatccctcggacttggtatcaggaaatacagagaagctctcgctcaatgtggggaggataacctatctccaggaatgaagctcctgaaggctgctatcgaaccgcttacggctgctattcagacatgtgtgaatggaggtacctttgccgaattcgagcgggccatgttgcgcgagcgcacttgcaatggcctggagaccgcgcacaaggaaagacgtcggtggacgacgcccaaaactcaagacacaccagcagcaggagatcatgcgtctggtcaggtctggacagaagaacgcggcggaggctgccagactattcgttctcccgctaccgtgtcgcgtcttctgctcgccaccaaggtaccttaaccgggttttacgttccattgggtcctaacaccaatacccacactcagcgataggtgtacctaagtccaattggtttactcagcaataagcactaatgtttaagttggcggatgtgttccgatccagcaccatccctggcacagatgtacgcccatgtggacccaaaggagcctgccgattgtcagaaagatttcgagcttctcgttgaactggtaatgatacaaggtggttggcggcgtgtgagcgccacaagcggaacgcagcacgccactaaccttgagctggggcttccgctgacaggtgagcgggcactcgtgcaagtaaaatcgagtctagatcaaaacacaacgggaaagattacggccggactgattggagtgactggcgacgcacgagtcttcattgtttaccacaccagacattgataagtgtttattgaaaaaaatgtcaccctaattaggccagaggtgattgccgaatatgccgtcgatcttggcctgactacttggattataagaaaagtagggtaacagggtgcgtttaaacaaacgtcacaaaagttaaaagttgcgtaggatctcgctttctatattagctaaaattgatttttcctgtttctaccagcatcagaaaaattccgagggttcgagcgtacaactcctactatgtgccagaaggttgcgtttccagaaagccgccgttgagttcatcggggcaatgacgtgtaacaattgcgagcctccatttttctcattcgtaacgcacgtgccattgcctgcggctgcgcatgtgcgatgtttggtttctatagttttaatacagaaatgctttcggaaatagagaaagcccagcaggttctccactgggctttcggatacagaatcttgcgattctttattgtagcaacggctctcaccccggatgaactactacaacgatcccattatcacggagaaagtaatgacaagcaagcaagataatcctggcgcactgactttcggattggacatcggcattgcatccgtcggatgggcggtgctcagcgagagccgtatcatagacttgggcgtgcgttgtttcgacaaagctgaaacagccaaagagggtgaatcccttaaccttacacgccgcacagcacggctgcttcgccgacgtctgcgacgtagagcatggcggctcaccaagctggcacgtttgcttaagcgtgaagggttgattgcggttgccaacctattcaaacttaaaatcgaaaagaacacctccgtcctcaagtcagcttggcaattacgagtcgatgcgcttgatcgccaactcaacgccgaagaatgggcgcgcgtcatttatcacctatgcaagcatcgcggcttccattggatcagtcgcgctgaagaaaaagcggcggaaggcgacagcaaaagcgaaggtggcaaggtcaagcaaggactggctggcacaaaaaaacttatgcaggaaaagaattaccgaaccgctgccgaaatggtgctggccgaatttccagaggcacagcgcaacaagcaaggcgactatagcaaagcactatcccgcatcttactcggcgacgagttgaaggcacagtttgagcatcagcgcaaactcggcaacacctttgccaccgaaaaacttgaagctgccattcttggcaatggcgaccgcaagagcggtttgttctggatgcagaatcccgcgctcgctggcagcgatttgttgagaatgctggggcattgcaccttcgagaaaaccgaataccgcgcacccaaggccagcttcactgccgaacgccacgtctggctcacccgtctcaacaacctgcgcattttggtggatggcacgacccgttcgttgaatgaagcggagcgtcgtgtcgccctctctttgccataccagcaagcaggcgatttgacctacaagcaactacgcgccgcgctaatcaaagcgggctatttacccgagtcattccgttataccggactgtcgtatgccagcggacaaaaagccgatgagaaaataaaagatcccgaaaccgcagcactggtaaagatttccgcttggcaagaattgcgtaagacactcaaagatgcgagtctggaagacgaatggcagaagatttccacggatgcgctggaaggcagaccgcaactgctcgatcagattgcttgggtattgagcgtctacaaagacgataccgaagtagaaactgagctacgcaaattatccttgcctaatgcagagcgtatggtggatgcgttacttgatatacgcttcgacaagttcagcaacctctcactcaaggcactcaaccaaatcgtgccactcatggaacaaggtcagcgttatgacgaggccgtcgccaacatccaggaatatggccaccacagccagttacacaaggttggtgcgggtgaacacaagtacctaccgccgttctacaaagggcgcgataaaaccgggcgtatggtgttttgcgatgacatggacatccctcgcaaccccgtggtgctacgcgcactcaatcaggcgcgtaaggtcgtgaacgcgctaatcaaggagtatggctcaccgtatgaagtgcatatcgaaatggcacgggatttatcacgtccattcgatgagcgcaaaaaagtgaaaacagcacaggaagaattccgcgaccgcaacgaaaaagataaggtgctgtttgcacaggatttcaacatcgtgggcgcagtcaaaggaaaagatttcgagaagtaccagctatatcgcgaacaacaaggcaagtgtgcttactccatagaaccggtggatattcatcgcttgtttgaacagggttacgtcgaaatcgaccacgctttgccctattcgcgtagcttcgacgacagcaagaataaccgagtgctggtactcgcaaaagaaaatcgcgacaagggcaaccgtactgcctacgaatacctaagcttattccctggaggcgaaaatggagaacgttggcggcagttcgtcgccttcgttgaaggcaacaaagcctatcgcctcgccaagcgcagccgcttattgcgcaaggatttcggcgataaggaagccaaggaatttcgcgagcgtaacctcaacgacactcgctacatctgcaaattcttcaagaactacgtcgagcaatatctgcaactgcatgaagacagcgaaaccaaacgttgcgtggtactcagcgggcaaatgacttctttcctgcgtgtgcgctggggtttgataaaagtacgcggtgacagcgaccgccaccacgcgctggatgctgtcgtggtcgctgcgtgcagccatggcatggtgaaacatttgtccgattactcgcgccgcaaagaattggaacaggtaagagcaggctttgtggatgtagacacgggggagatcatcaatccaaacatgtttgaccagataaaaaaacacttccccaatccgtggccacatttccgcgatgaactcgaggcacgcctgaaactagatgaccttgatcggttgcgtgaagaaatgcaacgcttcggcacctactcggaagacgcattacggtcgttgcgtccgttgttcgtttcacgcgcgccccaacgtcgcaacagcggtgccgcacacaaagacaccatctacgcgcagccggaaagcctagaagcacaaggcggggtcacgcaaaaggttccactctccagcctgactttgaaagacctcgacaaattaatcgatccgcaccgcaacgaaaagctctatgccgccattcgcgctcgcttagaacaacatggtggcaaaggcgacaaggcattcccatccaacaatccactacgcaaacccgacagcgattgcaacccaacgggccccattgtgcgcggcgtaacaatggtgatcgacaaactttccggcattcctattcgcggtggtatcgccaagaacgacagcatggttcgggtggatgttttcactaaggcgaacaagtttcatctcgtgcctgtgtatgtgcatcacacggtggcgaaggtgctgccgaatcgggtgattgtggcgcataaggatgaagacgagtggccgctgctcgacgacagtttcagtttttgtttttcaatctaccccaatgacctaattcgcgtagcgcaaaagcaatgccagtttgttggctactacgcaggctgtgatcgcggatcaggaaatgtcaatttgtggacacatgaccgcaaccagcaagttggcaaagatgggttgattcgcggcatcggtgtcaaaacggcgctaaatgttgagaagttcaatgtagatgtccttggcaacatctaccccgccccaccggaaaaacgtcgtgacctggcgtagtgtagtcatctcgcgcccagccaagctgcggcgcgagcaattccggctcgccatcgatcaggaacaaaccgccttcgtgccgttcgaggacatcgcggtgatcttgctcaaccaccgcgaaatcatgctcactcatccggtgctatcagcctgcggagaatacggcatcagcctcttcgccacgggcgacacgcatcatcccagcggcgtgttcttgcctttcttgtcgcactcgcgcgccacgcgctggctgcgtctgcaactggatttgccgcgccctgtcgccaagcaggcatgggcatccatcatccgcaagaaaatcagcaatcaatccgcttgcctgcgatcatttgggcgcgatggctcggataagctggactcttacgcacgacgcgtgcgctccggcgatgtcggcaatctggaagggcaggccgctgcgttttatttcgtgcaactcttcggcaaaggctttcatcgtgagcaggcgcgctttgccaatgctgcacttaattatggctacgcggtgttacgcggcacgattgcacggggcttagtggcacatggcctgctgccttccatcgggttgttccacgccagcgagcaaaatgctttcaatcttgctgatgacgtgatcgaaccattccgtccagtagttgattttttcgtagcgaagcgcatgtcgctggttggcgatgaattaaatccacaagataaaacggcgctagtcgggctactcaatgtggatgtaggcatgccgcgcggcaagatgtccgtgctttccgccatcgaacacgcgatagaaagccttgcaagagtgtatgacggcggcagcgaaacactgctggaattgcccacactcattgggcaggaacagcaccacttagattgctgagccatgagcacggagacacgacgatttatgcgcttgattgtgcttttcgatctacccgttgtcaccaaggccgagcgccaagcctacactctgttccgccgtttcctaattaacgatgggtacgatatgatccagttctcggtgtatggtcgtatcctgaatggcaacgatgcgctggaaaaacacatgaagcgattagtaaacagcctgccacccgaaggctccgtacgctgcctggccgtcaccgaaaagcaatacgccagcatgaaactcttggtcggcctgccgctttttcaagaaaaagcactgaaggccgaccaaatgctgctattttgaagagcgatttttcaaacagaacgcccgccagattgaggtctggtgggcgtttgcgtgagagctattgtagttcatccggggtgagagagggagctacaaccggcgacagtgttataggaggcgataatagattgtagttcatccggggtgagagagggagctacaactctcaacgccgtccacagtgtgcttccatgattgtagttcatccggggtgagagagggagctacaacccgggcatgatcatagttctaggaatgtggattgtagttcatccggggtgagagagggagctacaacctcacaagaggaattgcgccggtccgctcaattgtagttcatccggggtgagagagggagctacaactgaaagtgctaagataaaccgtgccgccgtattgtagttcatccggggtgagagagggagctacaacgcattgcgctagcgtttcccacttatcattattgtagttcatccggggtgagagagggagctacaacactttcgacagcttcactatcgcgactgaaattgtagttcatccggggtgagagagggagctacaacgccgactggcgccgaggcggggatggtcatattgtagttcatccggggtgagagagggagctacaacccctgtgcttgtgtgaaagttggcatctatattgtagttcatccggggtgagagagggagctacaactttgggcgcggagtgctgcgcggtctggagattgtagttcatccggggtgagagagggagctacaactcttgcatctcatgattcgcgggcactgagattgtagttcatccggggtgagagagggagctacaactctgccgcttggagagcgcatacgcttttaattgtagttcatccggggtgagagagggagctacaaccgtttccggctggtctactacgaaatcatcattgtagttcatccggggtgagagagggagctacaacttcgggtaacactacaagcccggactccatattgtagttcatccggggtgagagagggagctacaacgcggctgcacgttcaggacttgaccgggtaattgtagttcatccggggtgagagagggagctacaacgcctgttgcgggaaggaagcggggctatcgattgtagttcatccggggtgagagagggagctacaacgagtcgccgtaacgaccgacggcctggggaattgtagttcatccggggtgagagagggagctacaaccgcgcccggatcatgccgcgcttgattgccattgtagttcatccggggtgagagagggagctacaaccgcggcttcgtcggttcagcacggcgccagattgtagttcatccggggtgagagagggagctacaacccggggcgtacctgacataccacctgaaatattgtagttcatccggggtgagagagggagctacaacaggccaaggcatatgtcgatctcgtaaacaattgtagttcatccggggtgagagagggagctacaaccaatcgtcgctgttatcgtagccaaacgtcattgtagttcatccggggtgagagagggagctacaacatgcggtggtgtcgggcgtggtggtaggggattgtagttcatccggggtgagagagggagctacaaccagtaaccacagcctgcatccgaactgtcgattgtagttcatccggggtgagagagggagctacaacccggtacaggacgcgccgccgtccccatgtattgtagttcatccggggtgagagagggagctacaacctgaggccgggagagttcatccacacattcattgtagttcatccggggtgagagagggagctacaacgctcatgcgcgaagataaagacggcggcatattgtagttcatccggggtgagagagggagctacaacgacataccctgagatgtggcgcgcttgagtattgtagttcatccggggtgagagagggagctacaaccatttaggctaccgggcggctacaaggcggattgtagttcatccggggtgagagagggagctacaacatgtcgccacgcctgaagcaaccacatttgattgtagttcatccggggtgagagagggagctacaaccatgctgtaccgatgggatgcgaaaaattaattgtagttcatccggggtgagagagggagctacaactgtttaatattcgtcaacgcggtttcaaccattgtagttcatccggggtgagagagggagctacaacttatggtagcgcgataaaaaccgtaggcacattgtagttcatccggggtgagagagggagctacaaccttcacgcgagacaatcgggaaaaatacaaattgtagttcatccggggtgagagagggagctacaaccgacggatcgagggaaggctactcttactaattgtagttcatccggggtgagagagggagctacaactactagcggtgctggctagtgccaagatgaattgtagttcatccggggtgagagagggagctacaaccttatcgggtcggcgagcgtaaagaagctgattgtagttcatccggggtgagagagggagctacaacatctcgtgccacacccaactgagacgtgatattgtagttcatccggggtgagagagggagctacaacgcgtacacacgcctgacttcggctacgcatattgtagttcatccggggtgagagagggagctacaaccggatgcgatggtatagcggtcagcgtcttattgtagttcatccggggtgagagagggagctacaactgccaagcacgttgaacgcgaagagcatttattgtagttcatccggggtgagagagggagctacaactaaatgtctcgctgggaacaatcccggctgattgtagttcatccggggtgagagagggagctacaacagcatccgagcgttcagggttacgcggaaaattgtagttcatccggggtgagagagggagctacaaccgtctggttgctagggtcggcatcgagctgattgtagttcatccggggtgagagagggagctacaacgtctcgtgccacgccgagttgtgacgtgatattgtagttcatccggggtgagagagggagctacaaccgcataacaaatcaatacccaaacgcattaattgtagttcatccggggtgagagagggagctacaacccatgttgagcggtggcggcggtgacaacaattgtagttcatccggggtgagagagggagctacaaccggatggtgtacgtgggctttttgcgcgctattgtagttcatccggggtgagagagggagctacaaccgcaactgttccgggcggggcttctcacccattgtagttcatccggggtgagagagggagctacaactccgcgccggtcgaggattctcggaagtcaattgtagttcatccggggtgagagagggagctacaacgcgcggagatgagtgacgatatcgctctgcattgtagttcatccggggtgagagagggagctacaacgaagctaagcgtttagcgcctgtgctatcaattgtagttcatccggggtgagagagggagctacaacatcgcgtcaagcatgatccggtgttctcggattgtagttcatccggggtgagagagggagctacaaccgggtgcgctcaatggaaatgccgcctactattgtagttcatccggggtgagagagggagctacaactcatccgttcaaggtgacccggtgggcgcaattgtagttcatccggggtgagagagggagctacaaccgacggcgcaacgcatccagatcgccgcgtattgtagttcatccggggtgagagagggagctacaaccgatcgacataagaacgcgaagcgcttcttattgtagttcatccggggtgagagagggagctacaacgcttgtccgacggcgtccataatgttgtagattgtagttcatccggggtgagagagggagctacaacttatggcaacacgataaaaactgtcggtacattgtagttcatccggggtgagagagggagctacaacacagagcgacgaatagaaaccaaccccatcattgtagttcatccggggtgagagagggagctacaacggtattcggagagaccgcgccggcgggattattgtagttcatccggggtgagagagggagctacaaccggtagacgtctttcgtgcgactagcggccattgtagttcatccggggtgagagagggagctacaaccacggtcaccgcctggccggtattgccggtattgtagttcatccggggtgagagagggagctacaactatacccagaagggacgttcgcgaaaggcgattgtagttcatccggggtgagagagggagctacaacacctcgttatcctggtaggtgcgaggcgtgattgtagttcatccggggtgagagagggagctacaacggaacccgccgagtacaaagatcaaggcgcattgtagttcatccggggtgagagagggagctacaactgtttcgagtttggcgcggagggcggctatattgtagttcatccggggtgagagagggagctacaacaccgagccgggcggaccccggcgccatgacattgtagttcatccggggtgagagagggagctacaactgatatgggaatggacataaaggcaatgtattgatttcttttgaaaatctgagtacgtatcgtatgggtctagcggtcggaacgcttcttatcaatcgactttgaccttttatattctttggattgaggaagtcggtacggcggtcttgttttccaggacacactgaaagagtaagatatgtatgtcgacactcgactttggattacaagaaggcacaatcatgagcagtgagcagcacatgcgagaagccctggcgctggcccgggacaatattaaggccgggggtcggcctttcggtgcggtgctgatataccaagggcaggtgatcgcccgggcggtaaatgagattcatagtacccaggatccgacctgtcacgccgaaatgcaggcgatacgcaaagccagccgtgtgctgggtcgtcctgatcttgatggttgcgaaatctacgccagcggtcacccatgccccatgtgcctggccgcaatgcacctgtgcggtatccatcgggcgtggtacgcctattccaacgatgagggcgagccatatgggctgtcgactgctgacgtgtatgcacagatggctcgccctcccttgcagcaggaagtggtgctgcgaccgttgaagcctgcggacgaagagggcttgtacgcgcagtggcaggcaaagcaggccgaccgcacttcgtaaaccagcgactcccgttcgagaaccaatagggtcagactaagtctgaccctattggtatttaatgctgcgattcttcagttattagaaaaattcgaacaactgatgttattccacccagaaagtatgggaatatacttttccgatggccctgctcatcctcttcttcatcgccttcgtcgccctggtagcgatagccccgcaccagttcatgcaaatactactagctcgcatggttcggcatggggctatctgtcatctatacgctactggcgggcctcttctcgtaattccgcatagctttcagcttagcaagctagatgtgccccaacaaaaccaaaataagcactattaacagcacgaatccgataccgccactcggtccataaccccagccgctgctgtaaccccatgttggaatcgcacccaccagggcaagtatcagcacaatcataagaatcgttccgagagtcattttaattctcctcgttttgatttgaggttttattatgctcttttgacgagttttatctgttcggtggcatacaaaatacgatccaagcgataatgaagggttggagtatgggcgtgacaggaaggggttggcgtttacgcagaagcggttgagcgtggccgcccaagtcgataaagacacacttctatcaaacttagtaatccagcttttgaagaagcttatcctgttaaatcgatgctacttactacaaataaaaaacccgctgcgtagcgggtttcattgttccagtaagcaatgcttactccttaggaatactccatcaccttcctgagtagtttcaggcttattatgaacagccgcggtatggcagattaaatgcaccttatcaatattgcatcctgatcttacgagctacgagcgcgcctaccatgccgcttctgcttcggcgttcggcagcttcgaagctatcattgaccagatcgtcacttcgatctgttgttgtcgatgttagcttcgctgctttcgctttttctactacgccgccgatcctgctacttcacagtctccgtaacgggactttaatctataacgttcaaggaacccgatagatggatgttcttgggatggagctggcaccaaatggtaaacgcaccgctcttgttcgctacgaaagagacctcttttgtttctcccgccttgagtacttcttgaattccatattcgtcaatggtaaatccctcgctgataggggatttgttctctacggtaatctttactttggttcctttcttcacagtcagggtttcgggctcattgataacgttaaacgcgcggatgttcttgactgtcacaccttccacgttgagctcaggaatagtagtgtcataagcattgataactaccttgaatttttgttcggctgcttgcgcggttcctactaataacaatcctaaggcaagacttgcaaacatcgttatggtttttttcataattactttcctttactatacgttacgttttaatgaaatagcagccgcttttgtttaacggtacttacaacttgccacgccctgatcaacaaggataagcatctggatagtactcattaaccatgagcgctttactcatcgttagaattgtaattctgcgtatgttttatcctgaattcgcccgcgcgaacccagctaatactctaattgggatagtcacggatgtcaatcgcaagcttctctcaagtccaagtttaagataggttttctggccgattcgatcaggccgtggcattcgggattatccggctttgccattgctgctttctggttgcattcagcctatcatggcacactaaaccgtaattttgggcgtaaccagtaattacggtaatattgtcgatcaaaatcgagtaaaccatggctgatagcggtttgataacctttagcgtcataatcctgactggattgctttgtctggctatatgggttctcaggaaaatagcgcgcggagaaatcgacgtaagcgttaacaccgcactggtggcattgctggtggttgcattgctggtgcctttgggattgaatttttccgctcatctgatattcggcaagatgaatcattcaagtactgacgaaaccgccgaacacccggaacacccggaacagtcagaacactcggcatttgagactgaacaccattgaagttaactgaggacgtcaatctgcattggcgaggtctagaaacaatgggaatttaatatgcctcgcgatacgaagatttggccgctgctgacaggcacgcatcgctacgagaagacaatctcgacacgcaaccgcggccatggcagatttatcgatgcgccgattcttgcctatttgattgaaacgcccaatggacgcattctctacgatgtgggttgcgactatcgcaagcttgccgacccagcacttcgcgcaaaatatttcgagcccatgcgtcattcgttcgaaccgcctgcgatggaggaagaccaacgtatccctcactatctggcacagttggggctagcaccatccgatatcgatgttgtgtttatcgggcacttgcatttcgaccacgcaggcggcctgtgcgacctgcccggctgcgaggtgcatgttcaggctgaagaagtggcggcagcgcgtaccggacaggatggcagcgtgtttaccggtgagctggcgagtgcggggcaatggaagataatgacgggtgagtatatgttgacccccggcgtccaggcggttgccagccctgggcatacggccgggcatatgtcgctattcatcgaactgcaaaaagggccgcccgtcatcctgtgtggggatgcagccgatctggtggaaaacctggaggaggaggttgcgccagggtactgttggcaggataacgaagcactggcgctagcaagcattcgtaagctgaaggcgcttgcccgcaccgaaaacgcgcagctttggcccaaccacgatatgaatttcttcctgggcttgccgagatttccagcatggagagactgaagcaccgggctgtcagcccccgtgtttcatggcgatttcgtggaggcctggccggcgcctaattggagttaggatttagcgtggcagcgtctacaatttgccctttacgggcggcaaattcgcgttgtgcctgttccgttgccattcgccgatgcatcgcggctttttttatactctcttccgcattcgcctcgtatttacgaaccaaagcataagtatgtgatttcaaatcctgggctcgccgaccatagagatatcctttatcttcgtagtgctcaagtaatttcttttgctcctttgccttcgtctgcatttctctcgctgtattttcgaaatactgcgtcaaggcatcatgatcgctgcgtgttctggcgttctgggaagcttttctgatattggtgttctgaagggcttcgtgagg

SEQ ID NO: 2860 - DNA, 23417 bp, synthetic construct
  source 1..23417: mol_type = other DNA
  misc_feature 1..23417: note = Synthetic
agtttctgcatgcttattcccagtcggtcgggcagccggtgcagcccgcgaaatcggcatcgtgaaagaccgcgaaacggcgataggtgccggaaaggtcggcctgccggaagttgaccgtgaagaatttgctttcctgcaggttggcattggtcaggcgggcgccggcaaaccaggcgaaattggctttcgccgcttccaggttggccgcggtcaggtcggcgttggtgaaatcggtacggaacaggcgggcgaattcgagatcggcgccgatcagtttggcgccgcgaaaggtcgccgtcggcgcgctgagcttgctcagcctggcgccactgaggtcggcgccgtcgagattggctccggccaggttggcgccgcgcagatcggcccgcgccagttgggcgccgctgaggtcggccccggccaggttctggccggccagattggcgtggcgcaggtcggcccccgggcagcgggtatgcggccagatgccgcagccgttgatgaccagtggcacaaatggttcgccggcgattgctacggtcgacccgaaaaaaagggcaaaaatgaaatgtcggggcatcttcgtttcctgaaatgagcttcgatccacggcattcccaggctgagccagcgtccatgcagcgctgacccagccttgctggcgggcagtccgcaagccgggggaatccggcttgcggcgggaacggttgaagcgaaacgctcgttcagttcttcagcgacttgggcagcttgaagacccacatcgagccgccctgggtgacctgcttggtcagttcggccatgtcgccgccccacagcggcacggcgccgccgtagccggactggatgccgacatactgctcgccgtccatttcccaggtgatcggcacggaaaccacgccggagccggtctggaatttccacagttccttgccgttcttggcgtcgaaggccttgacgtagccgtccgaggtgccggtgaacaacaggccgccggcggtggtcatggtgccggcccagagcgggaacttctccttgtgctcccagacgatcttgccggtcttcgggtcgagggcacgcaaggtgccgacatggtcgtcgtacagacgcttgatgcggaagccctggccgaggtaggcggagccggccttgtaggtcagcttttcggtccagtaatccatcgcccagtgattggccgggatgtagaacagctcggtctgctggctgtagctcatcggcatccagttggtgccgccgaggaaaggcggcgaaacgtagacggtatcgcccttgtcggcgcctgccttgggagctggcgggcggttgcccttttcgatcggcttgccggtcttgaggtcgaaaccggacgcccaggtaatgccgtcgacgaacggccaggcgccgatcagcgaggtcggcttgttcggatagccagcgcccttggccagtttttcgcggtcggtgacgaagaagaagccattgcggtcggcgtgggccgaggccttgatcagcttgccgctcttcggatccttgtattcgaagagaaccaccgagttgttgccggagaagtcccaggcatcgttcggcgtgtgctggtagaagcccttgagctcgccgctgctggcgtcgacgtaggcttggccggaggtgaacaggctgtcccagttgcgcgggtcgtcgccttccttggtccggtgccaggtattccacggcgccgggttgccggcgccgatgaccacggtgttgttatcgacgtcgaagctcgccgtctgccacggcgcaccaccgccgtggttccaggcgtcgaccagcttgccatccttgtcgcgcggccacgaaggcgccttggcgtcgccggtggtgacgctttccttgccgttcaggcggcccatgtggccttcgaccagcggccgcgcccagacttcctcgccggtatccggatcgcgcgcgaacagccagccgacgacgccgaactcgtcacccgaagaaccatgcaccagcagcatcttgccgctcttctgatccttcacgacaaacggcgcgccggtcatcgtgtagccgatcttgtggtcgccgaacttcttcttccagacgaccttgccggtgtccttgttgagcgccacgatgctggcgtcgagcgtgccgaagaaaatcttgtcgccgtagatggccgggccgcgattgaccacgtcgcagcacgggcggatgtcttccggcaggcgggcttcgtactcccacaggcgcttgccgctcctggcatcgatcgcgaagatgcgcgaatacgacgaggtgatgtagatgacgccatcgtgcaccagcgcctggccttcctggccgcgctgcttctcgccgccgaaggagaaactccaggccggcaccaggtgatcgacgttcttcgtgttgatccgggtcagcgggctgtagcgctgggccttcatgccgaggccgtaggacagcacgtcgccggtcgtcttgtcgtcgttgaggatgtcttcccagctcacagccttgctggccacggccggcgtgcagaaagtggccgccagcacggcggcaaggagggtctggcggggggtgaagcggatcggttccatgttttctttcgtctccagaatgatgtctttgctctcccgaggggcccgggcggcctgccctgatcgacagacgagccgagtataggaagcgcaattgcccgcagtctcgggacaagctccccgccaaaccgggaaattttcccgagtgcccggcgagccggtacgaaacctgctgaatcccacccatctcgaaaacaaaggccgaccatggatctcagaaggcgattggtgctgtatctcggcgcgctgctcggcgccttgctggtcatcgccatcctgatcaacctccattcgctgcgcggcgacatccaggcagaagtgagcgcttcgcaacggctggtcgccgtgctgctcgacgcccaggccgcgacgatccggccggacgacctgaaggccaaactcgacaacgccgggttgcgccacctcagcatcagcctcgatgccccgccaacgccgggcgatgccggccctctggccagcctgctcggcattgcccacagcagcgaagcgccgcgaaccctgcgcctcggcgagcatctgttctatatcgcagccaatccggaatcggaaattgacgagcgcctgggcgacactgttcgacttttcatcaccctgttgctcttttttggagcaaccctgctggttgcctggtgggcagccgaccgcgccctgtccccggttcgcgaactggaagccggcctgcaacggctggccgccggcgccagcgacgccgccctgcccgccttcgcgctgcgcgagttccgccgcgtggccagcgccatcgacgcgctggccgccgccctcggcagttcgcgcgccgcccagcaccagctcgcccgccagctcatcgccgtgcaggaagaagagcgccggacgctggcaagggaattgcatgacgagatggggcaaacgctgaccgccatcggcgtcaccgccgcttttctcgaacgcaatgcgccgcgcctcgatgcgcagcgcctcaccgaatgcgccgaagacttgcgccgtgacgtgcgaaccagcggcgagcagttgcgcgccatgctcaagcgcttgcggccgcacggcctcgatgcactgggcctggccagcgcgctgcgcgagctggtggcaagctggcagcagcgcgagtcgggcatcgatttccgcctggcgatgccggcgcagttgccggcgctcggcgaaacggcggcgctggtcttgtaccgcgtcgtgcaggaagcagtgaccaatgtcgttcgccacagcggcgcccggcattgccgcatcggcatcgaggcggctggcggcgcgttgcggttgcgcgtcgaggacgatggcaagggcctgcccgaaagcggcccgggccgccggggcggactgctcggcatggaggaaaggctggacatggcaggcggcagcctgacaattgaaagcgttgtaccgacggggctgtgcctgctggccagcctgccggtaaggacagaagaacaacaggaggaggaactcgcatgattcgcatcattctggtcgacgaccatgccgtcgtccgtaccggctaccgccgcctgctcgatgccgaacccggcatgcaggtggtcggcgaagccgcctgtgccgacgaggcgaacgccctcgccctgcgcaccacggccgacgtggcgctggtcgacctcagcctgcgtggcagcagcggcatcgaagcgatccgcggcatgctggcccgccagccgggcatgaaagtgctcgttctctccatgcacgaaggggccggccacattacccaggccctgaaaagcggcgccatgggctacctgaccaaatattgcgaacccggcgacgtgatcgacggcatccgccgcatcgccgccggcaagcgcgtgttctcgccggaaattgcccaggtcctggccgaggaagccatcgacggcgacggcgccctggcccatctcacgccgcgcgaattcgaagtcctccgcatgctggcccatggcgaatcggccagctgcattgccaactcgatgcacctgagcccgaaaaccgtgctcaactacctcaccctgatccggcagaagctcaatgccgacaacgatttcaagctgcttcacctggccgcacggcatggcctggtggatatgagcagaaccatcaatgcctgaatcccgcacccttcaataatccataaatcggagtaaagaaatgttccgtcaccacaccctggccgcgctgctcgcctgcagcctgatcacccccgccgccctggccgatgccaagctcgataccgacatgaaaaagctggccgtcgccagcggctgcacgacctgccacggcatcgaaaaggacaagcccggccccgacggcatgaagccgatcgggcccgcctggatcgacgtcgccgcccagtatcgcggcaagccgggcgctaccgaattcctgacccgcgttgtccaggaaggctccaatccctattccagccactggcggaaccgtgtttccggcatcgccatgccgcccaatgccgtcgccatcagcccggccgatacccgccagctggtttcctggatactgtcgctgaagtaagccgcagccgcgctgccggctgaccggcccaaccttctggagtctccgtccatgcataaaacctccctcgccgcccgtctcgcggcgtctctcgccggcctgctgctggctgtctgctgcggcgccgcttcggccggcgaacgcgccaccccgcgcgaagcccgcgccctgttcgaccaggccgtgaagtatctgcaggccaacggccccgagaaatcgtgggccgccttcagcgaccgcaaaggcgccttcgtcaagaaagacctttacgtctacgtgatcgaccgccggggcacttatatcgccaacggcgcggcgcccgacacgctggtcggcctcaacgtgctcgacagcgtcgacgccgccggcacgccgctcttccgccacatgatcgcggtcaccgacaagcagacggaagcgcgcatccgctacgtctggctcaatcgcaagaccaatcatgtcgagccgaagaacgcctggctgcaccgctccggtgactacatcctcggcgtcggctactactcgccgcacgccacggcgatcgatgcccagaagctgctcggcgatgcagtcgctttcgccatccagaacggcatgggcagcgccaccaaggcgttcaacgacaccaagggcgctttcgtgcgtgacgacctctacgttttcgccgtcaatctcgacagcggaaaattcgaggcgcacggcgtgaacccggcgtgggccggcaccgacgcgctcaatctccacgatgtcgaaggccacgccctgatccaggaaatgatcgacctggccaaaaccaagggcgccggcgtcgtcgattacgtctggcgcaatccggtcaccaacgccgtcgaacgcaaacgttccttcatccagcgcgtcgacaacagcctgctcggcgttggctactacctcgactgaacgcccccgccggaattggccatttcgattttggccaaaatttccggttgaccgtagcaatcccccagaaccggcccgcatggccggttttttttcgcacctccttttgtccgattgccgacggtctggcgacggtagatactggcgaaagaggacggtgtagccgagcgctgaccgacagaagccgggggcattggttttgatgaccacccgaccgccattcgcgaagagagggaccatcatgtttgcgccattgaatcggctgagtatccgcaaccggatctgggggatcgttgccattttcatcggcagcgtcctgctgaccagcgccatcgatgtcgcaacgctgcgcaacgccctgcaccaggagaaggaagagaacatccggcaagtggtcgagaatgcccacagcgttctggcgcactaccagaaactcgaacgatccggcagcctgagccgcgaagccgcccaggcgacggccatcgccaccatcaagggcatgcgctacaacggcaaggactatttctgggtcaacgacaaccagcttcccccgcgcatggtcatgcacccgatcctgccggagctcgacggtcaactgctgcgcggtgacaaattcaactgcgtgaccagcatgcgggccggcaccgaaggcccgtttgtcccgaccgatggcaagaaaaacctgctccaggccttcaccgagctggtcgcccaaaccggccacggctacgtcacctacccgtggccaaaggtggactccgcaggcaaaagcacggcggacagctttcccaagctttcctacgtcaagggctttgccccctggggatggaccgtcggctccggcatctacatcgacgacatcgacgccgccgtgcatacccgcgccatccagcatctattccacgtgctcgggattgcctccgccctgctgctcctggccagcctgatcgcccgcagcatcaccgctccgctgaaagccacgatgcgcgccatgcgcgacatcgcccatggcgacgccggactcgaccaacgcctggccgttgaagggtgcagtgaaatcgccgaactggccgacaatttcaatcaaatgctcgatcacatcgagcgccgcgacaaagcctttcttgagcagcaggcaggcctcgagcaggaagtttcgcggcgcacggccagcctgcgcgaagccaaccggcaactggatgcggatctgggcgagcgcaagcgcatcgagaagatcatcggcgccggcaaatcacgcatgcacgccctgctcgatgccaccgacgaagtggtcatgctgctcgcgcccgacgccacggtgctcgagatcaacggcttcgccgcccgccgcttcagcatgacgccgcagcaaatgatcggaacgaacttcctcgatcacatgccccccgagctggccagcacccgcaacgccatgatgcgaacggccgtcaccaccggcgagatcgtccgcttccaggaccagcgcggctcgacctggttcgacaacaacctctacccggtcaaggacgaggccggggtcgtcgagagtgtcgccgtctttgccaaggacatctccgaacaaaaacgcgttcaaatggacgaggagcttttcctgcaactgggcaccgtcctcatgcgctggggtgtcgactcgcgggccgtcgcccagatcttctgcgacggcatcctgcccatgttcaatctcgacgccgcctgcatcgtcgtcatcggcaaggacagccagctttccctcgccgccacggccggcaacgtggccagcaccgtcatcgacgacatcgccggccgcggcgacgcaggcccggcatgccagcccctggccgagctcatggccagcggccgacaccaggtagtgcgcctcgaaaacgagagctgccccctctgcctggccaatcccctggcgccctccgcccgtaccgccatcctgctccccctcaaaatccatggcgaacactggggcgttctcgcgctgtacggcaaagagccggaccagttcgacgacagcctgctccagcaacgcctgcaagccagcgccaaccgcctggtcatcaccctcgaatccgccctgcgccaggaaaggctggccctcttcgaccttgccctggccgaagtcggcaatgcggtgatgatcaccgatgccgaggccaagatcacctgggtcaataacgcctttgccctgctctccggctataccaacgaagaactgcacggccagccaccccgcattttcaactccggcacccaggacgccgtgttcttccggcacttctgggaaagcatctcgggcggcaaaacctggcgcggcgacatcgtcaaccggcgcaaggacggcagcctatacaccgccagccagatggtgacccccctgttcaacgccgaaggcaagatcagccactacatcgccgtactcgaggacatcagcgaacgcaaacgccaggaagaggaactcaggaaaaactacgaacgtttgcgcaccctcaacgagcaactggaaaacgcccagaaccagctcctgcaatccgacaaaatggcctccatcggccagctcgccgccggtgtcgcccacgagatcaacaacccgatcggcttcgtcaactccaacctgggcaccctcaaaaaatacgtcgacgaactgctcagcgtcatccacgcctacagcgccgccgacccgctgctcgccgggcaccccgagttcagcgccagcatcgccgcccgcaaggcagaagccgacctcgattttctcggcgacgacatccacagcctgatcaaggaatcgcgcgaaggcatcgcccgcgtcacccggatcgtccaggacctcaaggacttctcgcgcatcgacagcatggactgggccgaggccaatctcgagcatgggctggacagcacgctcaacatcgccatgaacgaaatcaagttcaaggccgacatcgtcaaggaatacgccggcatccccgacatcgaatgcctcggctcgcaactcaaccaggtgttcatgaacctcctcgtcaacgccgcccacgccatcgaaacccacggcaccatcaccctccgcaccggcagcacgagcgacgcagtctgggtcgaaatcgccgacaccggccgcggcatcccgccggaaaacctcaaacgcatcttcgaccccttcttcaccaccaaagccgtcggcaaaggcaccggcctcggcctctcactcgcctacagcatcgtccagaaacaccacggcaaactcgacgtcagcagccaagtcggcgtcggcagctgcttccgggtggaaattccgttgcggcaaccggcgccggcagaggcaagctcagtcacaacctgagcactccgccgatttgacccaaccggcaagttgagaagcgatgcataagcctttgttgtcggcaaacaggcggttgattcaggcgaaacagggacttctacggtcaaccggaaaaaacggccaaaatcaattcctctgcccctttttaacaaaggccacggtagctgcgccatggccgggtactagcccggctggagtagaagctcgactacttatacttcgcacgcaactccgcgagcatttcgtcagcaaggcaacacgaatcctgctgacgatcaaattgatccacccgcttctcggcttcgaccagccaagtctcggcgacgtcctgtggccggtcgaccgttagccacaacaggtccgccaaatcagcccgctgctccttgctgagtctcagcgctgcagcgacgatctgctcataggtcatttggcatcccacgaagacaaatagaaaggcccggcaggtttccctgccgggccggattcggtcgcccccgaaggggcaccttattgtagcaacggctctcaccccggaaagctacatggcgttattctacgcacttcgaataacaaaccgcaaatcatgagcgcgacatataccatcggcttggacattggcatcgcctcggttggctggtgcattctcggcgaaactcacatcgtcgacttgggggtcagggctttcgacaaagcggaaaccgccaaggaaggcgaatccctgaatcttgcccggcgcagcgcccgcctgatgcggcgccgcctgttccgccgggcgtggcgattgaagaagttggcccgcctgctgaaaagcgacggtctgatcaccgatacgaaactgttcaagcccgaacaaccttttgctacctcgctctggcaattgcgcgtcgatggcctcgaccgccgcctgagcaacgaagaatgggcgcgcgtcatttaccacctgtgcaagcaccggggttttcactggatcagccgcgccgaggcaaagcaggccgaaggcgacagcaagagggaaggcggcaaggtcaagcaaggattggccggcacggccaagctgatgaatgaaaagggctatcgcagcgcggctgaaatggtcgtcaatgtattcgtgaaaccgcgactcgacgaaagcggactgaccaagctggacaaacaagggaatcccattccagatggcgcagcgcgaaacaaacaaggcgaatacaccaaagcactttcacgggaactgctggccaaggaactggcgctgctattcgccaaacaaagggaattcggcaacccgcacacctccagcaaactggaatcggccatcctcggcaacggtgacaagaagagcggtttgttctggcagcaaaaaccagccctggctggcgccgatctactcaagatgctcggcacctgtactttcgagaaaggcgaataccgcgcccccaaggccagcttcaccgccgaacgccacgtctggctgacccgcatgaacaatcttcgcatcgtcaccgacggcattacccgccaactcaccgatcaggaacgctcgctggccctgcccttgccttaccggcaagccggcgacctgacctacaaacagcttggcgcagcactcacccaagccggactgctggaagccggcagtttcaaattcatcggcctcgcctacccgaccgaggcgcaaaaagccgaaggcaaggccaaagacccggaatcggccacgttggtcaaaatcccggcctggcaggaactgcgaaaaacgctcaccaacactggagttggcctcgacgatgagtggaaaaagctgtcgggagacgccctctgcggtcaaccggaaattttcgacaaaatcgcctgggtgctgagcgtctacaaggatgacgacgaagtccgcgccgaactcgccaagctcgcccttcccaacccgcaggccatgaccgaagccctgctcaacatccgtttcgacaaattccacgccttgtcgctcaaggctttgcgcgccatcgtgccgcacatggaaaaaggcctacgctacgacgaagcctgcgttcaggccggctaccaccacagccagttgcacaaggtcggcgaaggcgaacacaagtatctgccgtcgctctacgacggtcgggacaatgaaggtcggatgatcttcgccgaggatgcggacatgccgcgcaatcccgtcgttctgcgctcgctcaaccaggcgcgcaaggtggtcaatgccatcatccgacgctacggttcaccttcggcggtgcatatcgaaatggcccgcgatctgtcccggccattcgatgagcgcaacaagatcaagaaggatcaggacgaataccaggccaggaatcagcgcgacagggagcagttcatcgagttgttcggccacccgccaaaaggccttgagttcgaaaaatggcgcctgtaccgggaacagaacggccaatgcgcctacagccaaaggccgctcaccgcgtcgggcaatgtcgccgaaatttttctcgacggttccacggaaatcgaccatgccctgccctattcgcgcagtttcgacgacagcaagaacaacaaggttctggtgctgacccgcgagaaccgcgacaaaggcaaccgcactccctacgaatatctgggcggggccgagaacagcgaactttggcaacgctacgtctccttcgtcgaatcgaacaaagcctaccggctggccaaacgcacccggctgctgcgcaaggatttcggcgccaaggaatccggggaattccgcgaacgcaacctgaacgacacccgctacgtttgccgcttcttcaagaactacgtcgaacaacacctgaagctcgccgaaggcagcgaggccaagcgctgcgtcgttgtcagtggccaactgaccaacttcctgcgcacccgctggggactgctcaaggttcgcgccgacagcgaccgccaccacgcgcttgacgcagccgttgtcgccgcatgcagtcacagcatggttcagcgcctgtccaattactcgcgcacccgcgaactggagcaggtgcgcgatggcttcgtcgatatagaaaccggcgaaatcgtcaatccggccatgcaccagcaactgcgcgaacacttccccgacccgtggccctacttccgacacgaactcgaagcccgcctgaagatcgattcgccggaattgttgcgggaggaagtggcgcgcttgggcagctatacggtggaagaactcgcggcgctgaaaccgttgttcgtttcccgcgcaccgcaacgccgtaacggcggcgcagcgcacaaggacaccatctacggtcagccggaaaaattgaagaaaaacggaagcgtttcgcaaaaggtcgcgctcgctagcctgacgctgaaagacatcgacttgctcgccgacccgcaccgcaacgccaaactctacggtgccattcgcgaacgccttgaagcccacggcggcaagggtgacaaagcatttccggccaccaatccgctacgcaaaccggacaaggaaggcaacccgaccggccccatcgttcgcacagtgaccaaggtcatcgacaagctatccggcatcccggtgcgcgggggcgtcgccaagaacgacagtatgttgcgggtagatgtcttcacaaaggctggcaaattccatctggtgccggtgtatgtacatcatcgagtaaaggggctgccggatcgagcggttgtggcattcaaagacgaagatgactggacgctgattgatgacagttttgactggtgtttttcgctgcacccgaacgatcttgtgcagatacgcctcaagaacgagagtttcttgggctactactcaggaacggaccgatcaacgggcgccgtaagcatatgggctcacgatagaaaccaggccgttggaaaagatggtttgattcgcggcgtcggcgttaaaactgccattaaagtcgaaaaattccacgtcgacaccctcggcaacatttaccccgccccaccggagaaacgtcgtgggctggcgtagcgtgatgatttcccggccagccaagctgcgccgggaacatttttccctggccattgaacaggaacagaccgccttcgtccccttcgaggacattgccatcatcgtgctgaaccaccgcgaaattcagctaacccatcctgtactttccgcttgcgccgactacggcatcggcctttacgccaccggcgacaatcatcagcccaacggcgttttcctgccctttctcgcgcattcccgcaccacgcgcctgatgcgcaagcagatggacattccacgcccgttggccaagcaggcgtgggccaacatcgtccggcgcaagatcgaaaaccaggcagccgtccttcgtttttgcgcaaaaaaaggcgttgaccgcatggactcctatgcccggcgcgtgcgttctggcgacacggaaaacctcgaaggtcaagccgccgccttctatttcacccaactcttcggccaaggcttttatcgggcggaagagcgctgggccaatgccgcgctcgattacggctatgccgtgctgcgtggcgccatcgcccgcggactggtcgcccacggcatgcacccgcccatcggcctgttccacgccagcgaacaaaacgccttcaatctggccgacgacctgatcgaacctttccgccctctggtcgacctgcatgtcgccaaaaatccggccaccaccgaaggcgatctcgccccgcaggacaaagccgcgttggtcgccttgctcaatgtcgatgtcggcatgccgcaaggcaagatgtccgcgctttccgccatcgaatacgccgtcgaaagcctcgcccggcttttcgagcaaggcgacagcgaactggaactacccaccttgatcggcttgcacgcccacaggctggaatgctgaggcatgggactggagacacgacgcttcatgcgactcatcgtcttcttcgacctgcccatggtcaccaaaaccgagaagcgcgcctatgttcaattccgccgcttcctactcaatgacggctacgacatgatccagtggtccgtctatgcccgactgctgaatggcaacgacgaccacgaaaaacacctgaaacgcctagtcgacagcctgccgccggccggctccattcgctgcatgaccgtcacggaaaagcaattcgccggcatacgcctcttggtcggcatgcccctttttcaggaaaaaaaggttccggcgaaccagatgctgctgttttgatcccggatttctacaaaaaaatccccgcccagcttacgccaggcggggatttcggtttcgtcagattgtagccttccggggtgagagagggagctacaactttcgcaagcatctaacgctggaggtgagggattgtagccttccggggtgagagagggagctacaactcccttgtcgtctccgctgtcgcggtcggagattgtagccttccggggtgagagagggagctacaacttcattggccgcgtaatccatgcaggtaacgattgtagccttccggggtgagagagggagctacaacgctgtaggggggctcaactcctattcaacggattgtagccttccggggtgagagagggagctacaacgggatttgaacattatcaacagtgcgacgggattgtagccttccggggtgagagagggagctacaacccgacttggtcgacaacgagttcgcggagcgattgtagccttccggggtgagagagggagctacaaccctatgtgtcgtggcaagagcacgactttagattgtagccttccggggtgagagagggagctacaacgggtagcggctggggtaaccgccgcctctagattgtagccttccggggtgagagagggagctacaacagcccgcatgctggccttacacgcaaggcagattgtagccttccggggtgagagagggagctacaacaacaccggcagaaacccggacgcctccctggattgtagccttccggggtgagagagggagctacaacgaccgatccgccttatggaacaggaacaaagattgtagccttccggggtgagagagggagctacaaccagcggacgatggatgatctaacttataaggattgtagccttccggggtgagagagggagctacaacatgggctacatggacatgctgacaaagttcgattgtagccttccggggtgagagagggagctacaactgattgcagggtggtaagttcattttccgtgattgtagccttccggggtgagagagggagctacaaccgccaactacgtagagcatcgcacgaagaagattgtagccttccggggtgagagagggagctacaaccaagtgactgcatattgcgacgctccttgcgattgtagccttccggggtgagagagggagctacaaccaagacaatgattgaatatgccagcatcgggattgtagccttccggggtgagagagggagctacaacaatggaagtctccgctgctttccatgtgcggattgtagccttccggggtgagagagggagctacaactgctgccgtactcgagcaggttcccggtgcgattgtagccttccggggtgagagagggagctacaacaatggccggcggggcgacgaaccccatccagattgtagccttccggggtgaaagagggagctacaacggatcaaagggcgggaagaagaaacggtgggattgtagccttccggggtgagagagggagctacaacctcgatcaagatgtccgcaacatcggtattgattgtagccttccggggtgagagagggagctacaacattggaccgaatggagcaactgttagccgggattgtagccttccggggtgagagagggagctacaaccgatcacgtcactctccaaaattagcgccggattgtagccttccggggtgagagagggagctacaacttgtggatcatcaggcttgcggcggtccctgattgtagccttccggggtgagagagggagctacaaccgtcttttgtgccgaacatcagcgcgaattgattgtagccttccggggtgagagagggagctacaacctcgttgcagaggggccgacggcggccgaagattgtagccttccggggtgagagagggagctacaacgaaaacggacgtactgcgcacgaagactaggattgtagccttccggggtgagagagggagctacaactaccagcggaacggcaccggcaaacggtacgattgtagccttccggggtgagagagggagctacaacttatgacagcgcggcccgttgggccaccctgccataagtgccgctctcgcggcgtctgcaatagttgaaacccgcgctttcctcgacgaaccgcacgctggcggttttgttccacgcttcgcccaacccaactgctccattcctgaacacctgttgagcagttgatcacgccatgatctgctccaggccgtgccgaatacggcacccggcaaaccaagtatttgaaaattggccattttttccggttgaccgtgggaatggcatggctggcacacggcatgcacattagatggcacgagtcacggcaggtcatttcaggaatcaaccgaatctgccggcttcgagttagccctttgaattacccatttccaacttcattcaagaacactggagacaaccatgatttatgcagctcccggcgccgctggtgccaagatcgcctacaaggcccagtacaacaacttcatcggcggccagtgggttgccccggtcaagggtcagtatttcgacgtcgtaaccccggttaacggcaaggtttacaccaaggctgcccagtcgaccgccgaagatatcgaactggcgctcgatgctgcccatgctgctttcccgaagtggggcaagaccgatgccaccacgcgctccaacattctgttgaagatcgctgaccgcctggaagccaacctcgagctgctggcttatgccgagaccgtcgataacggcaagccgatccgcgaaacgctggcggccgacatcccgctcgccgtcgaccacttccgttacttcgctggctgcctgcgcgcccaggaaggcggcatttcggaaatcgacgaaaacaccatggcttaccacatccatgagccactcggcgtcgtcggccagatcatcccctggaacttcccgatcctgatggcggcctggaaactggccccggccatcggcgctggcaactgcgtggttctgaagccggccgaatcgaccccgatctccatcctgatcctggctgaactgatcgccgacatcgtgccgccgggcgtgctcaacatcgtcaatggtttcggccgcgacgccggcatgccgctggctaccagcaagcgcatcgccaagatcgccttcaccggctcgaccgtgaccggccgcgtcattgcccaggccgctgccaacaacctgattccggccacgctggaactgggtggcaagtcgcccaacatcttcttcgccgacgtcatggacaaggatgacggcttcctcgacaaggccatcgaaggcatggtgctgttcgccttcaaccagggtgaagtgtgtacctgcccgtcgcgcgcactgatccaggaatcgatctacgacaagttcatcgagcgcgtgctggctcgcgttgctgccatcaagcagggcagcccgctcgacaccgagacgatgatgggtgcccaggcttcgcaggtgcagatggacaagatccagagctacctcaagctcggcaaggaagaaggcgcccaggtgctgatcggtggcgaccgtgcccacctcggcggcgacatcgaaggcggctactacatccagccgaccctgttcaagggccacaacaagatgcgcatcttccaggaagaaattttcgggccggtgctggccgtgacgactttcaaggatgaagccgaagccctgcagatcgccaacgataccgtctatggccttggtgccggcgtctggagccgtaacggcaacgtcgcctaccgcatgggtcgcgccatccaggccggccgcgtgtggaccaactgctaccacgcctacccggcacacgctgccttcggcggctacaaagaatccggtatcggccgcgagacccacaaggtcatgctggaccactatcaacagacgaagaacctgctcgtcagctacgctgaacaaaagctgggcttcttctaaacagagcatctcctccactggccgcacagttttgcgggcaactctttgggggcgggcaaccgccccccttttttgggagaaaaacatggtcgaccgcgtcatcgccaccccggcaacgcttgagctcatcgcgctcctgaaacagcaatacggccagcaactgatgttccaccagtccggcggctgctgcgacaacagcgcacccaactgctacctgccgaccgacctgaccgtgggcgcctacgacgtgcatctcggcgatatcggcggcgtcccgttctacatcagcacctcgcagtacgagtactggaagcacacccaactgatcatcgacgtcgtctccggatcgggcggcaatttctcgctcgaaagcaacaccggcatggctttccacacccgttcgcggctgttcaccgatgccgaatgggctgaattgcaggcggccggcctcgtttaatccaaggaaccattcacatgaacaagcaactgagcaccaccctgctgcccctggtcgcagccgccctctttgtcgcccacgcaccggccaaggctgccgatggcgaagccgccgtcaagaaagcccgttgcgtcgcctgccacgccgtcgaccagaagcgcgtcggcccggcctacaaggacgtcgccgccaaatacaagggcgatgccaaggcgcccgaagtcctgttcgagaaagtccgccatggcggctccggcaactggggcacggtcccgatgatcccccacccggccgacaagatcagcgacgagaacctgcacgccgcgatccagtggatcctctcgctgcactgagccctcgctcaccccgcttgctgctgtagggcgccgcgccggccatcaggccggccgagcgcccggctggccgtttcccacggtcaaccggaaataaaggccaaaatcaaaatcgacatgcggcgcaccgggccgcagattgcccggcctgaatgggccagtccttggtaggcgatcgagtgttacaccccaaccagcaggaatggggtctcggcaaggtgctcagcgcaacgcccgacaatctcgatgtattttttgtcggcgccggccgcaagcgcctttcacgttccttcatcaaactcgagaaagccgaaggcgcggcctcgaaacaccgcctcctcgacaacctcatcgtcgcctccgagatggtcagcgacgattatgtgaccatccccatggcgattgaccgcttcatggagaagtacccgaacggtttcgaggacgccgatttcatcaagagcgcgcgcgaaaccaatctgcgcggccagaaaatgtgcgcccagttgctgagccaggaagagctgtcgcggctcatcggcgaaggcagtttcgacgccgtctgcgaccgtgcccggcatgtcgaaaccagcgccaacctgctcttcctgcgcacgctcggcatcctcgagctgaacaaatggccgtttgcgacgctgttcagcttcctccgccacccgcagcaatccgcctacatcaagccgagcgccatccagaacgccgccaaggcgctgtgctggcgcatcaactacaagcccgagccgaactggaagacctacgatgcggtcacccggctctacagctacgtccgcaccaacctgctcgaagaaggcctgatgccgcgcgacctggtcgacgtgcaagccttcatctggtcggtcgcccagaaataaccccgaattcacaaaggaaaaacatgaacgcccaagccctggccgaaaaactcaacaagctcggattcacgcccgtcgccctgagcgaaccatcaaaacgcgtcgacgggatgatcgtcttcaccaagggcgtgcatgttcaggtaccgctgcatggtgacgaacccaacgtcgtcctcgaaagcgacgacggcaatctggagttttacgatgcccaaggcaagatcgaggatctgatcgccgatttgaaggccgccctgcagaacgaacaggccatgctgtcgcgctgaagccgtccggaaaagatgaaaaggcgcccgcctcagcgcggcgcccagccgccgcaaaccggaaagacctggccgacaaagcaattggccgcgtcgctgcacagataggcggcaaactcggcatcctcctcggcgctgaccagccgcccgagcggcacctcgcgcttgaggcgctcctgaaaacgcgggtcggcctggacttcgggcggaaagtaggtcgggttctcgacgaagttctgggcgatggcattgacctggacattgtgcggcgcgacctcgacgccaacggcctgcacgtaggccagctgggcgccgcgcgccgcgctgtaggtcgaccgccccttcatgccgcgcagggcggaagcgctgcccatgaccaggatcttgcccgaacggcgggcgatcatcgccggcaacacggcccggaacagccgcgccagcggatcaacgagcacaccaaaaacgtcattccactccgcttccgaaacctcagccaccgccgtgccgggggccggaatggccaggttggcgacgagaacgtcgatcggcccggcctcggcaaccacggcggccggcgccccgacctcgacgagatcggcggtattggcgatcaccgtggccccgtgccgggccaacaccgcgcacagcaccggccccatgaactggtcggcctgggtgaccagcacccgtttgccaagaagattttgctcgggcatggcggctcctttggcgaggtggcgacgacgactcagggggccgcgggcggtgtggtgagcgtctcgagacgatcctccacctcgccgatgtaggcggcaagcgtgttcgcggactgctcggagaaggcgcggaaatcgtgctcaagctgatcgatccgggcaatcacggcggttttcgattcaaggttcaggctcgactgccgggccagctccgcctccaggaaagtgcgcaattcggtgaaccgcgaggcctcggcgcgatcggccagttcccggttggtgtgcaactcgcgtgaattgcggcgggcttcgaggaggacggagccttgcaggtagagcacatagaccagaaacagcgcggtgacgaagacgagcagcccgagcatgaccagccccagcggcatttgcaccgaggtgaagccgagccacaaatcggtcggcgacaggaagaccccccagttcagggcggtgaaggcggcgatcaaggccagaatgagcagcaacaacagggattggagtttcatgattagtttcctgattgactgatgtttttgggtattcgcccgaagccggcatcaggccgtagcgcaccggaaagaactccagcatatcacgcgtttccggccagccaggagcgtcggcgcaggcaaaaaaaagccacccgaaggtggcgatggatttcatttttgcctgtttttcccggttgaccgtagcaatcgctattactttagtcagagcacattgctacaccacggaacagctgttcagtttttgaacaacccgccgggcaacatgcgttgcaaggtgccgtcgcgcaggagcgcatgcttgaggccgccggcgatgtgcagggcgatgcaagcggccaggctccagaccaaggcgacatgggccagcttgaaagcgccgttgagcgtttcgtcgggccagcctagcctgggcagctcgatgccgaagaacttgatggcgtagggcgtgaaggacgaggcgagaaagccggccaggggcgccagcaggagcaaggcgtaaagcgcatggtgggtggcggtggcgagcttcgcttgccagccgccgacctgcaatgccggcgccggatggccgcggcgccaggccagacggacgccgatgaggatcagcgcgagcaggccgagcgacttgtgcagcccgtaggcggcgctgcgctcggcccccttgggcagatcgaccatggtccagcccagccagagcagccagatgacgacgacggcctgcgcccagtgcagcgcgatggccggcagcgtatagcgctggccgctcattggatgctgacaccccagggcagttggccgacttcgatgtcggccagctttttgtagctggtcgtatcgatgacggaaaccgtgccggagcggccattggccacgtagagcttggtgccgtcgggcgtgatcgccatgttccacgggcgcttgccgacttcgacggtggcgacgatggtgttactggcgacgtcgatggccatcaccgacggatcgcgtccgttggagacgaagacgcgcttgccgtccggatgcacggcgatcccgttcggatactgaccggcggtgatttcagccaggacgcggcgcccggcgacatcgatggcgtagaccttgccggccatttcgctggccacataggcgcggctgccgtccggcaaaaagccgatgccgcgcggccgcaggccaaccggaatgctggccacctgccggtgcgcggcgacgtcgatcacatcgacctgctcggcctcttcggcgctgacgtagagccagcggccgtccgggctgaacacggcgtgctccgggttcttgccatgcaccttgatgcgggccatctccttgccctcgggcgcagcaagcaggacgacgctgttatcgtcctcgaccgccacggcgatcaacttgccgtcggcggagaggctgacgccttccggcgaatcgccgacgagaacagtcttgagcaattggccggtagcggtatcgacgatgagcagactgcccgtcttgccgtcgctcaggtacagccggccgcccccgctggcgatgccgcgcggccgcacgccgaccgcaaagtcgcgcaggcgctggt

SEQ ID NO: 2861 - DNA, 23408 bp, synthetic construct
  source 1..23408: mol_type = other DNA
  misc_feature 1..23408: note = Synthetic
agtcgccctgcttggcggtcggcgccggcgcagcggcgggcgcccacggcacgggcttcacgggcatgccgggacgggccttctgcaacccgttcacgatcacctgctcgccgcccttgaggccgtcggtgacgatgaagtcgccgccgctcatgccgccgatcttcaccggctgcggcgcggccttgccttccttgtccacgatcgtgacgaactggccctgcggcgacatctgcaccgcgcgctgtggcacgacgatggcgccggagacgaccgactcggggaagcgcacgcgggcaaacatgcccggcagcagctcccggtcgggattgggaaattccgcacgcatcaggatcgagccggtggccggatccacggacaggtcggaaaacagcagcctgccgggatgcgcatagggcctgccgtcctcgagcaccagcgcgacgcgcgtcgcgtcggaacgcttcttccggccggacttgatcgcctcgcgcaggcgcagcagctcggtgctgctctcggtgaaatccacatagacggggtcgagctgttcgatggtcgccagcggcgtcgcctcgcccttgccgaccagcgcgccctcggtgaccagcgcgcggccgatacggccggagatcggcgctgtcggcacggcgttctcgagatcgagcttcgccttcgccagcgcggcttccgcctgcttgacggcggcggcggcggcatcgaactcctgctggctcaccgccttgatctccagcagcggccggtaacgctcgaacgtcgcccgcgccgcggccagattggcctcggccgccgagagcgacgcctcatagacgcgcggttcgatgcggaacagcggcgtgccggcccggatgtcgctgccctcgacgaagagccgcttctccaccacaccctcgacacgcgcgcgcacctgcgcaacacgcaccgccgtgatgcggcccggcagatcgcgcgtcacggcggcgttcgacggcgcgaccgtcaccacatcgacttccggcggcggcgcggcggccccggccggctggccctgcttgctgccctcgccgcaggcggcgagcacgacgagcaaggcgggcagcatgacggatgtgatctttttcatttctttctccgtgaaggcatgggcgcaaaggcacgcaggaagcaatcgacgattcgcgcggcatccgccggatcggcggccggtgcggcaacgccagagagcagataatgactgcgttcggcgccgaccagcatcgacagcagcatcgtcaccgcgaaatccggatcgtcgcggcgcaactcgccgcgctccatcgcggtcacgatcaaatcccgcagagtcgccgccgtccgctgcggtcctgccgcgtagaacgccgcggcgagttcgggaaagcgcggtatctccgcaatcagcatgcgatagaactgcaagccgcccggcgagagcaggcgctcgcggtaacgcaggccgaagcgcaacaggcgctcgcgcaaaggtgcaccgtcgtcgtcgagagcgacgaggaactcggccgtggcgtttttgatcacctcggcaaagagctcggccttgctcgggaaatggttgtagagcgtctgcttggcgacgcccgcctgcgcggcgatgcggtcgacgccgacctgatagccttcggcaatgaatacctcacaggccgcctggagcaggcgggaacggcaatcgtgcgcagactggatcgggatgcaggcagacatggatacgccaaccggatagactagactgtccagtctatccgatccatccgtcccgtgcaaatcggtcggatcagccacgatccgctgcgctccgcgcgatcgcaacggctcaacggcgcgtcctgccgggcaagcaggcgacgaggccgaacagcgtgccgagcgccgagaccgggtcgcggagcatatcgccctgacctcctcactgccagccgtagcggcggaaatagaagcccttcatcgcctgcgtcagccccatgtaggccagcaggatcatcggcaggaagacgaagtaaggagcgggcagcgcttgcagcttgaagtaggacgccaggggacccatcggaatgaagacgccgatggccatgatcagcgccgtcatcaccatcagcggggtcgccgcgcggctctggaggaacggcagcttcggcgtgcggatcatgtgcacgatcaaggtttgcgtcagcagtccttcgatgaaccagcctgactggaacagggtctgttccgcaggcgtgtcggcgccgaacacgaaccacatcatggcgtaggtcgtgatgtcgaagagcgagctgatcggcccgaagaagaccatgaagcggccgacgtcgcccgggttccagcgctgcggcgtcgaaagcagctcgtcatccacgttgtcgaacggaatggcgatctgcgagatgtcgtaaagcaggttctgcaccaggagatgcatcggcagcatcggcaggaaggggatgaaggccgaagcaaccagcaccgagaagacgttgccgaagttggaactcgccgtcatcttgatgtatttcaacatgttggcgaaagtcttgcggccctcgacgacgccctcttcgagcaccatcaggctcttttccaacaggatgatgtcggccgcctccttggcgatgtccaccgccgtgtcgaccgagatgccgatgtccgcggtgcgcagcgccggtgcgtcgttgatgccgtcgcccatgaagccgacgacgtgaccgttggccttgagcgtgcggacgatgcgctccttgtgcgctggcgtcagcctggcgaacacgtcggtggtttcgaccgcctcggcgagcgcggcatcgcccatgcgctcgatttcccccccgaccaggatcctccccagatcgactttcatgccgacctcgcggcagaccttggcggtaaccagctcgttgtcgccggtcaacaccttgaccgccacgccgtgctcggccaacgccttgagcgccggtgccgcactctccttgggcggatcgaggaaagcgacatagccgatcagcgtcagttccgcttcatcggctacgccataggcttccttcgtcggcggcacttccttcatcgccaccgccaccacgcgcagcccttccatgttcagttcgcccgtgacgcggcggatgcgctcgagcaactccggcgtcagcggctcggttttctcgccatggcgcacatgggtgcacacgccgaggatttcctcgacggcgcccttgcagatcagctcgtggtgatcctcgcgctccgagaccaccaccgacatgcgacggcgctcgaaatcgaagggaatctcatcgaccttgcggtagttcttcgccggattgagctcctgctgcacgtcgacgtgctccagcacggcgatgtcgagcagattcttgaggccggtctggtagtagctgttgagataggccatctccagcacctcgtcggactcgttgccccagacatcgacgtgccgcgccaggcagatcttgtcctgggtcagcgtgccggtcttgtcggtgcacagcacgtccatcgcgccgaagttctgaatcgaatcgagacgcttgacgatcaccttcttgcgcgacaggatcaccgcgcccttggccagcgtcgcagtgacgatcatcggcagcatctcgggcgtgagacccacggcgatggagagcgcgaacaggaccgcctccatccagtcgcccttggtgaagccgttgatgaacagcaccagcggtgccatcacgaacatgaagcggatcaagagccagctcaccttgttcacgccggcctggaactgcgtcggcgcgcggtctgcggcggtgacgcgggaagcgagcgcgccgaagtaggtggcgttgcccgtggcaagcaccacggccgtggccgaaccggagacgacgttggtccccatgaacagaaggttgtccagttcgagcggattgatcgcccggagatcgcgctggacggcgaatttctccaccggcatcgattcgccggtcatcgccgcctgggagacgaacaggtccttggcggcgagcacgcggcaatcggccggaatcatgtcgccggccgagagcacgatcacgtcgcccggcaccagcagccggatcggcacttccgtacgccgcgcctgcttcacgggcaggtgcgcgccgtaatacctctcgaacaccggcgctgcgtcctcggagagatcgcggcgcatcaccgtggcggtggtcgtgaccatggccttcaatgcgtcggccgcctcgttggctttggcctcctgccagaagcgcaacagcgtcgagagcacgaccatggtgccgatcacgagagtggccttctcgtcctcggtcagatacgagatcaccgccagcagcgtcagcagcaggttgaacggattgcggtaagagagccacaggtgctgccaccatcgcagcggtttctcatgctcgacttcgttgagtccgacacgctggcggatggcttctgcctcgacttcgctcaggccgtcggcatggctgtcgagttgttggagcagcacctctgcatcgacggtcgccgcggcaacgagacgcttgccgtgttcggccggcagttcgcggctgacggtcatgccggagaggctgtcgagcagcagcaggcggcggaaatggcggccgaagccgtgggcacggacgaagcccgcgaaaaactctttcaagagcgtgaagttcatgatttttctcctggccgcccgccggttccacgctctggaaagcgcactcaggcgggcaatcgatgttcagggtcggtcatctttgacaaagttccgttgcggtcatgcatcacggcaggaatggcaccgagagcaagcgcaggccgatcgaaaaccatcgctcgttgctcccgccaccgttgcggttgccgtaggtcgcatccagttgaacacgatctggaaccagccaatgacgcaggcccagttgatggaacggtctgtcccggttctggccgaaggtctcggcgatcaaccaggagtgctcggcaagctgggcttccgtgccgaggccccaggtcaagcggttgcgccgggtattcccctcgcgtaaccagcccaaattggtgtgcacgagcacggcatcgtcgcggaacgagaaactggtcggtacgtaggcataccagtcacgggcatccgccgccggatggcgaaccgtgcctgcggctaagcccatcccccagccattggtatccaaggctttgaaaagcgtcttgccctgcatgacgacatccgtggttcggctgtggcccgcctcgcgggtcgaggcgctgcccaaggtcagctccagattgccggtgaagttgcaagcgggcagcgcccagaattcggtgctgtcggggctcctcttgacccagctttcgagctggcaggccttggcatcgacgatgcgtgcatcgtcggtgaccatggggcgcgccgcgtgggccgggtggatgaacagacaggcgatactcagcagggctgaccaaagtggcggataggccgcgccaaagcgagccggatgcagaaaacgaacgatgcgcacggcaacctcctttcgaagcaaggcgggtcccgcagcgagcgggggctgtcatgcgcagcttagccagcgcagatgacaagcctgcgaccgatgacggtcgcagcgttcgcggccgagcgccgcgtggcgatcagccattcagttgtccgggaggggaatggcgtgcagcgggatgctgcgttgcgattgccgcctctcgcgttcggcgagatagcggcagggaagctgcgcgttatcttgccgagggggtgccggtcatcaggaccggccgactactgtcactcgaacaagtgcccacttgggaactccgcagttgaaggagccgcgattgtattcacgcaaaatggaaagttcaaccgctctcctcgttgcgacatgccgagcgcctttagcgtttcaggcgggcgaaggccgccgccatggcgctcatggcaccttgcggctcgggcgcgcgcggcttgcgctggcgatcgatctcgtgtggggatgccgtcccgccagcgccgactttcgcgcctttcttcgcttcgtcggtaagccgcatcgacagcgcgatgcgcttgcgggcgacgtcgacctccagcaccttgaccttcaccacgtcgccggccttgaccaccgtgtgcgggtccttgacgaatttgtcggccagggccgagacatgcacgagaccatcctgatgcacgccgatgtcgacgaaggcgccgaagttggtgacgttggtgaccacgccttcgagcagcatgccgggttcgaggtccttcaggtcctcgacgccctcgcggaagcgcgcggtcttgaattccgggcgcgggtcgcggccgggcttttcgagctctttgaggatgtcctgcacggtcggcagaccgaagcgctcgtcggtgtatttctcggctttgagcgcgcggatcagccggctgtcgccgatcacttccttcacgcccttcttgatgtcggcgaggatgcgttcgaccaccggataggcttccggatgcaccgccgaggcgtcgagcggattctcgccgtgcgggatgcgcaggaaaccggccgcctgctcgaaggtcttctcgcccagacgcggcacgttcttgagcgcctcgcgcgagggaaaggcgccgtgctggtcgcgataggaaacgatgttcgccgccaaggtggcgttcaagccggagatgcgtgccaatagcgccgccgaggcggtattcacatcgacgccgacggagttgacgcagtcctcgaccacggcatcgagcgcgcgggcgagcttcgcctgattgacgtcgtgctgatattgcccgacgccgatgctcttcggatcgatcttgacgagttccgccagcggatcctgcagccgccgcgcgatcgacaccgcgccgcgcaacgagacatcgagatcgggaaactcgcgcgcggccagctccgaagcggaatagaccgaagcgccggcctccgagacgacgaccttggtgagcttcaactccggatgtcgctggatcagctcgcccgcgagccggtcggtctcgcggctcgccgtgccgttgccgatcgcgatcaaggcgacgccgtgcttttccgcaagcatgcgcagcgcggcgatcgacacctcccagtcacggcgcggctcgaaagggtagagcgtcgtcgtctccaagagcttgcccgtcgcgtcgacgaccgcgaccttgacgccggtgcggatgcccgggtcgaggccgatcaccgccttcggcccggccggcgcggccaggagcaagtcgtgcagattcttggcgaagacgcggatcgcctcttcctcggcgcgctcgcgcaaggcgcccatcaattcggtttccagatgcagcgagagcttgacgagccaggtccagcgcacggtctcggccagccacttgtcggccgcgcggccctggtcgcggatgccgacatggcccgcgatcatcgcgatgcacggcgaagactcgggcggatcgcgcagttccggctcggtcttgatggcaagccgcagcacatcctcgttgcggccgcgcaggagcgccagcacgcggtgcgaggcggcgctcttcaacggctcgcggaaggcgaaccagtcgcggaacttcgctcccgcctcttccttgccctcgatcaccgtcgagacgatgaaggcgtgctcgttgagatacgtacgcagtttttccagcaaggaagcatcctcggcgaagcgctccatgaggatctgccgcgcaccttccaaggcggccttgacatccggcacgcccttctcggcgtcgatgaacttcgccgcctcggtctcggggtcgagcgtcggatcgccgtagagcgcgtcggcgagcggctcgagcccggcttccttcgcgatctgcgccttggtgcggcgcttgggtctatagggcagatacaggtcttcgaggcgctgcttggtctcggcgtgttcgatgtcgttgcgcagctccggcgtgagcttgccctgttcctcgatcgattgcaggatcgccgcgcggcgatcttccagctcgcgcaagtaagccagccgctcttcgagcgtgcgcaactgcgtgtcgtcgaggttgccggtcacctccttgcggtaacgggcgatgaagggcacggtggcgccgtcatcgagcagtttgacggcggcagcgacctggttcggatggacgcctagctcaaaggcgatgcgggattcgatggaaggcagcatgtttcgaacgtaacgaaaaggcgcgcacactaccgcaagcggagctggcgcgcaatgcgtgccgtgctgaatattcgctcggtatgattgtatgatgccttgcccggaatcactctgcccttctaccgcgcgatgaaacccctccccggcgatggcatagtcctgcgctcgattctgctcacggtactcgcctttttcgtcgccggcatcggggtattcgcgttcacctaccatgccacggctcaacgggccgcccgggacgtcgatatccgcctcatccagctgctcgacacggtgcatagcactctcagcatcgcctgcttcctcaaagacgaagcgctcgcccaggatgtcgcctccggcctcttgaaaagcccggaagtgcggcacgtggtgatcctggccgatgaaacgatactcgtcgatcaaggacgagcgggcgctggcagcgagcccggacagcaggacgcaccttggccaccaacgctcgaacgcaaggtcatgtctccattcacccccaacaaacaggtcggcatgatccgacttctgcccaatccggaagtgatcgcccgacagcgcgacgatgaaatccagcgcacggcccagcagctcatctggcaactgttggtggtctccggcgcgatcggcacggcgctgatcgtcttcgtcgtccggccgatttcgcgcatctcatcccgtctgcacgccatggacccgctgcaaggcgaacggctgtcgatcccggccggacacgagaacactgaaatcggccgactcgtcagcgacatcaaccggctggccgaccgcctggtactgacgatcggcgaagcgcgcgaagccggtcaggccgccgaagccgcttcggaagcaaagagccagttcctcgccgcgttgagccgcgaaattcgcgctccgctcacgctcatccgccagaccgcgcgactcggcgcccgccagggtgaatccctcatcgatcaggaacacttcgcccgcatcgatgccgcaggtgcccgattgcaggcgacgatcgacgacgtgctcgatttctcacgcctcgaagcgggcaaactggtgttggagaaccgcagcttcaagctgcacgacctcatcgccgatgcagtggctgccgtagaaaagcgcgctgccgacaaagggctggagctcctctgccggctcagcccggcactgccagaatggatccagggcgacccgacgcgcatccgccagatcctcgtcactttgctggcgaatgccgtgcgccacagccagcacggctgcatcacgctcaccgtgctgcgcgcggacgaagaattgtggttctccgtcagggacgaaggcgtcggcatgacccaggaagaaatcgccaatctgttccgcgccttcgcccccgacgaccacgcgtccggacgcgtgacgagtggtgcccggctggcgcttcccatcgcgatgaacctggccagcctgatgggagggatgatccaggtcgtcagcactccctggcatggcagcatcttcaccttgcaactgccctgccaggaagtcgcggcgcctggagcggattgacgagccgttgcagcatgccaaaagcaaaccccgctacaatcgctgcgcataatagcaaagacccggcgggtttccccgccgggccggatacgactcggagtcttgcgactccagcttattgtagcaacggctctcaccccggatagccacaacgggacgaatcataagggaggatgacatgggcgacaagaccccgcaaaacgaagtttcggtgcaggctaacgtgagcgcagcgaacgttaaggcgcgcagcgccggccgaagccaaaacctgaccttcggcttcgacatcggcatcgcctcggtcggctggtgcgtgctcgatgacgcccgcatcgtcgatctcggcgtgcgctgcttcgacaaggccgaaacggccgacaagggcgaatccctgaacctcgcccgccgcatgacgcggctgatgcgcaggcgcctgcgccggcgcgcctggcggcttatcaagctcgcgcgcctgatgaaacgcgaggggttgatcgcccgtgtcgacgagctgcaaagccccgcgcccgtctcgccctggcggctgcgcgtcgaaggcctggatcgccgcctgaccgatgacgaatgggcgcgtgtgatctaccacctgtgcaaacaccgcggctttcattggctgagccgcgccgaggagaagaaggccgaaggcgacaagaaggaaggcggcaaggtcaagcaggggttggcggacacccagcgccgcatgaccgagaaaggttatcggaccgccgccgagatggtattggcggaattcccggacgcccaacgcaacaaggccggcgactacggcaaggcactttcccgcgccctgctcgccgacgaactgggcttgttgttcaaacgccagcgcgagctcggcaacccgcatgccggcgcggggctggaggcgaagatccttggcacgggcgaccgcaaaagcggccttttctgggagcagaggccgccgctgtcgggcgaggcgctgctcgggatgctgggccgctgcaccttcgagcgggatgaataccgcgcgccgaaggcgagcttcaccgccgagcgccacgtctggctcacgcgcctcaacaacctgcgcctcgtcgtcgacggcgtcacccggccgctcaccgaggccgaacgccggatcgccctgcccctgccctaccggcaggccggcgacttcaagtacgaacagctgcgcaaggcgctcgccaaggcgggactcgccaacttttccttcgccggtgtcaatgaggacaaggaaaaggacgtcctcgtcaaactgcccggctggcagacgctgcgcaaggcgctgaaagagaatggcctcgaaaccgaatgggagggcctggccggacgcgccatcgacggcgacccgtcgcaactcgacgccatcgcctgggtactctccgtcttcaaggatggcgccgaggtcgaggccgagctctccaagctgaacctcccgggtggcgaaaagatgatcgaggcgctctcggaggtcagtttcgaccggttccacaacctctcgctcaaagcgctatccaagatagtgccgcacatggaggccggtctgcgctacgacgaggcctgccaggccgccggctaccgccacagccagccgcgggccggcgaggggaaaaaatcgcgctatctgccgccgctctattccggccgcgacaaggacggacggatgcgcttcaacgaagacctggacatcccgaagaaccccgtcgtgctgcgcgcgctcaaccaagcgcgcaaggtgatgaatgccttgatccgggaatatggctcgcccgtggccgtgcacatcgagatggcgcgcgacctctcgcggcccttcgacgagcgcaacaagatcaagaaggcgcaggaggaataccgcgagaagaacgagaaggacaaggccgccttcgccgccgaatacggcatcgccgcgaagagccgcgaattcgagaagttccagctctaccgcgagcagcagggcaaatgcgcctactccctgaagcccctggatctgcatcgcgtgatcttcgagcccggctatgccgaggtcgaccacgccctgccctattcgcgcagcttcgacgacggcaagaacaacaaggtgctggcgctgaccgaggaaaaccgcaacaagggcaaccgcacgccctacgaatacctgatggcgaccgacccctcgggcgagcgctggcgcgagttcgccgccttcgtcgaggcgaacaagaattaccgcctcgccaaacggcagcgtcttttgcgcaaggatttcacgggcaaggccgccgaggagttccgcgagcgcaacctgaacgacacgcgctacatctgccgcttcttcaagaactgggtcgaagaccatttgctgctcgccgaaaaagtcggcgctgacggcacggcactgcccgccgccaagcgctgcgtggtgctcaatggccagaccaccgccttcctgcgcgcccgctggggcctgctgaaaattcgcagcgagagcgaccgccaccatgcgctcgacgccgccgtcgtcgccgcctgcagccacggcatggtcaagcgcctggccgaccatgcgcggcgcaaggaactcgaaaacctgcgcgcgggtttccccgacccggaaaccggggagattctcgacccagcgatgtttcagcgcctgaccgagcatttccccgagccgtggccgcatttccgccaggagctcgaagcacggcttgccatcgacgatgcgcagacgctgcgcgagcgcttgcaagccttcggcacttacccgcccgaggcgctcgccattgttcggccgttgttcgtctcacgcgcgccgcaacggcgaaatggcggcgcggcacacaaggacaccatctatgcccagcgcttgaaggtccaaggcggcgtgacacaacgcgtgccgctggcgagcctgaagctcgccgacctcgacaagctgatcgacccacatcgcaacgagaagctctacgccgcgatccgcgcacggctcgaagcgcacggtggcaagggcgagaaggcctttccgccggacaatccgctcagaaagcccgaccgccacggcaacccgaccggcccgatcgtgcgcacggtgacgctggtgatcgacaagctctccggcatccccgtgcgcggcggcatcgccaagaacgacaccatgctgcgcgtcgacgtcttccgtcacaagaaggacggcaagttccatctggtgccggtctatgtgcatcacgcggcgatctaccggcgcaccggcgagttgccgaaccgggcgatcgtcgccttcaaggacgaggaggactggacgccgatcgacgacaacttcgacttttgtttttcgatttatccgaacgacctgctgcgcatcaccctcaagaaagaaaaacacctaggttatttcgccagttgcaaccgctccacaggcgcattcaatctgtggtcacatgaccgcaaccgttcaaccggcaaggatggattgatcgaaagcatcggcgtcaaaaccgcagtcgcgctggagaagttccacgtcgacgtcctcggcaacctctaccccgcgccgccggaggtgcgccgtggtctggcgtagcgtgatgatctcccgcccggcgcggctgcggcgggagcattattcgctcgccatcgagcaggaggaaaccgccttcgtgcccttcgaggacatcgcggtgatcgtgctcaatcatcgcgagatcacgctcacccatccggtgctctcggcctgcgccgaatacggcatcgggctgtacgccaccggccagaatcatcagccggccggcgtcttcctgcccttcctgccgcactcgcgcacgacacgcatgatgcggctgcaattgaacatcggcaaacccgccgccaagcaggcctgggcgagcctcgtgcgccgcaagatcgagaaccaggctgcgtgcctcaggctttgcgaaaggaaaggtgccgaccggctcgcctcctatgcgcgccgcgtgcgttcgggcgacccggacaatctcgaagggcaggccgcggccttctacttcgcgcagctcttcggcgccgatttcagccgcgccgacgcgcgctggaccaatgccgcgctcgactacggctatgccgtgctgcgcggcgccatcgcgcgcggtctggtggcgcacggcctgcatccgaccatcggcctcttccacgacagcgagcagaacgccttcaacctcgccgacgatttgatcgaacccttccgtccgctcgtcgatctgcatgtcgccaaacatgcggcgctcaccgagggcgatctgatcccggccgacaagcaggcgctcgtcgcgctgctcaacgtcgacctcgccatgccgcagggcaggatgtcggtcctttcggcgatcgaatacgccgtggaaagcctggtgcgggtcttcgagggcgaagcggccacgctcgatctgcccgtcctgatcggcttgcagccgcaccggctggagtattgacgtgagcagtgagacgaggcgatacatgcgcttgctcgtcttcttcgatctgccgatggtcaccaaggccgagaaacgcgcctacgtgcagtttcgcaagttcctgctcaacgacggctacgacatgatccagtggtcggtctacggccgcatcctcaacggcatcgatgccgagaagaagcatctggcgcggctggccgagaatctgccgcccgaaggctcggtgcgcgcaatgaccgtcaccgaaaagcagtatgcgggcatgcggctcctggtcggcatgccgctgtttcaggagaagaaggtcgcggccgcccagctgctgctcttttgagaactaagcacaaagcttgtgaaaaatttcgttgcgagcggcccgagggcaaggcgcacggagcgcagcgaccgagacataaccatcagttaggcgcgggagcgagcaccgcgcaacgcagccatcgggatgcacagcagaaattttcacaagctttcaaaccggcgcatccaaatcatcgtaatagacgagcgccggcaggtaacgccgttgatggacgatgcgcagcacgaccggcgcgcctttcgcggctttcagcggctggtagaagatgacatgcttgccacagttgatcgagcgcatgcccggtgcgaacaggctgcggtcgcgtccgatctccggatgtctcgcgatggtttcgaagcctctcacgagggtgcggtaatagaccaaccattgcacccgtccccaggtttcgacggtataacggcgaatgtcttcgagatcggcgcgggcgcggccagaaagacgaacagccgcttcaggtttcttgcgcgtaggcatccggctcgaaggcgcgcgggtcgaaaacctcgaaatcgccgcgctcggcctctgcctgcgcggcttcaagttcagccttgagcgcatagaactggcgcgcgccatccttctccatcaagagccggatgccggcgcgcaccacctcgctgagattggcgtaggcacccgacgcgatctgcgcttgcacataggcctgcatcggcgcggtcagatgaatgttgggcatggcaaactcctgttcgatatgctcaattatggcagatactgaccgaaccgaacccagcgaattttccccgaaaatttttctatcgagggcgcacgcgatcatcacaaatgagaacggccaaaagaaatccccgtcacgctcaagcctgacggggatttcggcgaggtcagattgtagctatccggggtgagagagggagctacaactagtagtcaaaaatgttgccctgcaccaccgattgtagctatccggggtgagagagggagctacaacggcggtctcgcggcccactaccgtaccaaggattgtagctatccggggtgagagagggagctacaacacccacctcaccaaccccgtgtccgggtcagattgtagctatccggggtgagagagggagctacaactctaccaatgctttgatgtcgccaccgtaggattgtagctatccggggtgagagagggagctacaacatgagcaattacgacccgaccgacattcgagattgtagctatccggggtgagagagggagctacaacgccattgacggtcttggcctcgaacagcacgattgtagctatccggggtgagagagggagctacaacgggcttccggtttctggtcggcggcctggggattgtagctatccggggtgagagagggagctacaacgtaaaaggtctcggctctacccactcgggcgattgtagctatccggggtgagagagggagctacaacgttgttgtcctgcgcccaaagttcgacgctgattgtagctatccggggtgagagagggagctacaacctcaagggggcggacctttccaccttcctggattgtagctatccggggtgagagagggagctacaacgaagccctggaaattgccgacacgccgcaagattgtagctatccggggtgagagagggagctacaaccatccccgatggcaacctgccagaacgcaagattgtagctatccggggtgagagagggagctacaactcctgcctaaacaggaacaaagctgacttcgattgtagctatccggggtgagagagggagctacaacgcgctgccaatgcctttgccgagccgcgccgattgtagctatccggggtgagagagggagctacaacgaggatgcgatggtcatccgcccactggctgattgtagctatccggggtgagagagggagctacaacactgaaaggccatcatagatcaaactacaggattgtagctatccggggtgagagagggagctacaacctgagattagcgaccgcgcagagcgttcaggattgtagctatccggggtgagagagggagctacaactcagtggtcagtatttaggctgtggccttggattgtagctatccggggtgagagagggagctacaacctctccggttgcctcacctttcgatgcaaggattgtagctatccggggtgagagagggagctacaaccattggcggatggaggaatgaaccacatgcgattgtagctatccggggtgagagagggagctacaacctaaaatcgggtaaataaaactcgaacgtggattgtagctatccggggtgagagagggagctacaacatcttgtttgcttgtcaagccgcccagggcgattgtagctatccggggtgagagagggagctacaacataacccgacagcgggcttttccagcagcggattgtagctatccggggtgagagagggagctacaacaagtgaggttttccgcgtcactcgaaaaccgattgtagctatccggggtgagagagggagctacaaccaagacattgcctgatctgaaggccacagagattgtagctatccggggtgagagagggagctacaaccgaacccgacctgacggcgcgttttcgcaagattgtagctatccggggtgagagagggagctacaacccgggcacggtattccgcgtttcgcttctggattgtagctatccggggtgagagagggagctacaaccgatcgcgtcgccctggatcggctgccagagattgtagctatccggggtgagagagggagctacaacgctcggactgatcgccgtgccatcgtcaaagattgtagctatccggggtgagagagggagctacaacgatctcgcaagcctgttatcgcatcgtcatgattgtagctatccggggtgagagagggagctacaaccaacagcacgcctgccggaacgccgccgatattgtagctatccggggtgagagagggagctacaacacatgggaggagaagtgatgttgtccgaccattgtagctatccggggtgagagagggagctacaacgcgtcaccgtgccggcatcgaggtcgaccgattgtagctatccggggtgagagagggagctacaacgagtcattgcgggccacacaggcccacattgactcgtgccgcttcgcggccaatctgtaaaagtcggcgctggcgggacggtaccccttagtagtgcggtggaatttcgtcgcgcaggctgcgctgctcgactggaatcgcctgcaggacgagctggcgcagctcacgtacttggcgttcgagctgatcgatgcgttcctgctggcggaacacggtggtgttgagcgtttcgagcaggtcttcggcgaaggcgagcttgacttcgagttcggtgatgcggtcttccatcaggcggtctccttggcggcggcgagcatcgcggcgcgactttccggcgtttcgaggctgattcgtcccaaagcacccgatcggaaatcggtgagcaagaccatcgcggctttttccagatcgagcgcaccgccgcgcagacagccgcgtttcttgccgaccgcctcgacgaggccgactgcatccatgccggcgatgtcgatgccatagcgagcggcgagcagcgccggatagcgcgccagcaggatgccggcgaggaattcggccacttcttcttcgatcaccgcgttgcggccgatcgcatggcaggcggcgagcatgaagccatcgctgtcgtgctcgatcttcggccacatcaggcccggcgtatcggtgatcgtcatgccggggccgagatcgaagctctgctgctgcttggtcaccgccggttcgtcgccgaccgcggcgatacggcgtttgaggagcgcgttcatcagcgtcgatttgccgacattgggaatgcccatgatcagcatgcgcagcggcttggtgaagtcgttgcgatgcggagcgagccggcggcacaaggaaggcaccctcgcggcatcgcccggcttcttgcaggaaatggcgacggccttcacgcccggctgctgctcgtaatgggcgagccaggccgccgtcacggcagggtcggcgaggtcggccttgttgagcagcttgagacaggggcgctgtcgcgcgagccgcagttctcggatcatcgggttgctgctcgcttcggggcagcgcgcatcacacacctcgatgacgacgtcgatgcgcgccatggtctcggcggctttcttgcgcgccgaattcatatggccgggaaaccactggatggtcattgcatttcactgacggaatggggccgcgattatcgcctacgggccactccgaagaaagtcggcgctgacggaacggcactgcagctacggttgcacggctatcatgcgcacatgaaccgcacaccgatgactctcttcgatgggtggctgcgctggatcaacgtgatcctgcgcgggctgcatctgtgcgccgtgatcctgctcggcgccgcattgctgggtgctccgcgggcgagcatggaggccgcctttgccgtggcggccaccggcttcgcgatgttcgcactcgacatctggcgtaaaccgcagcatctgcgcgaggcctccggcatcgccgtgctgttcaagctcgtcctcgtcgcctggatggccgccgatgcggcaatgcagccgatcctgttctggctgatcgtcgccggctctgccgtttcggcccacgcgccggcgcgcttccggcacactattttatttggacgcgggtcgcattgaagccgacatttacctgtgctaggctgatccgcatcacaacaacaaacagaggagaagtcacatgcagaaatcgctgcacatcgacgccaacaaatgcaccggctgcctgcagtgcgaaatggcgtgttcctatgaaaactacggggtgttcaatccttcccgctcgcgcatcaaggtattcaacttcgagcacgaaggccgcaaggtgccctacacctgcacgcagtgtgcggacgcctggtgcatgaacgcctgcccggtcgatgcgatccgcatcgacgccgccaccggcgccaaggtggtgaatgaggccacctgcgtcggctgcaaggtgtgcacgatcgcctgcccgttcggcacgatcaattacgtcgccgagaccggcaaggtgcagaaatgcgacctgtgcgggggcgagcccgcctgcgccgccgcctgccccaccggcgcgatcacctacgtcgatgccgactggaccggcttcgacaagatgcgcgtctgggccgccaagaccgacaccgcgccgcgcgccgcggcctgaacggaggagaacatcatgggatggacacggaagattctgcgcgtcgatctgaccaacggcacctgcaagtccgaaccgctcaacatggagtgggcgcagcaatatctcggccagcgcggcctggccaccaagtatttcgtcagcgaggtcgacccgaaggtcgatccgctctcgcccgccaacaagctgatcatgaccaccggccccttgaccggcactgccgcctcgaccggcggccgctactcggtggtgaccaagggcgcgctcaccggcgcgatcgcctgctcgaattcgggcgggttcttcggcgccgaattgaagttcgccggctgggacatgatcatcttcgaaggcaagagtccaaagcctgtctacctgtcgatcgagaacgacaaggccgagctcaaggatgcttcgcacctgtggggcaagaccacctggcagaccgaggaaatcatcaagaagacgcatcaggatccgcagatccgcgtctgcagcatcggccgcgcgggtgaaaacggcgtgctctatgcctgcatcgtcaatgacctgcaccgcgccgccggccgctccggcgtcggcgccgtgatgggcagcaagaacctcaaggccgtcgccgtgcgcggcacactaggcgtttcgggcatcaaggatttcaaggccttcctggcggcgacggccgctggcaagaaggtgctggccgaaaacgccgtcaccggccaggggctgccgaaatacggcacgcaggtgctgatgaacgtgatcaacgagatcggcgcgctgccgacgcgcaaccaccgcgacgtgcagttcgaggaggccagcaagatctccgccgaggcgatgtatgagaagcggccgaccgacggcaagacgcacctcgtcaccaacgccgcctgctttggctgcacgatcgcctgcgggcgcatctcgcgcatcgacgagacgcacttctcggtggtcaacaagcccgaatactggggcgcctccggcggcctcgaatacgaggcggcctgggcgctcggcgccgccaatggcgtcggcgatctcgaagccctgcagttcgccaacatgatctgcaacgaagacggcatggacccgatctccttcggcgccaccgtcggcgcggcgatggaactctatgagctcggcatcctcaagaaagaggacatcggcatggaagcgccgttcggttcggccaaggcgctgtgcgaactggcgcagatgacggccaagggcgagggcttcggcaaggagctgggcttgggctccgcgcggctgtgcgccaagcatggccggcccgagctgtcgatgggcgtcaagcagcaggaattcccggcctacgactcgcgcggtatccagggcatgggcctggcctacgccacttcgaaccgcggcgcctgccacctgcgcggctacaccgtcgcttccgaagtgctcggcatcccggtcaagaccgatccgctcgtcaccgagggcaaggccgcgctggtcaaggccttccaggatgcgaccgcggtgttcgattcctcgggcctgtgcatcttcacctcgttcgcctggggcctgcccgacatccagccgcagatcgccgccgcctgcgagggcgactggtcgctggaaaagctgaacgaggtcggcgagcgcatctggaacctggagcgccagttcaacctcgcggccggcttcaccgccaaggacgacgacctgccaccgcgcctgaagaccgagccggccaagaccggcccggccaaggggctcgtcaacggcatcgacaagatgaagcccgagtattaccagctgcgcggctgggatgccgacggccggcccaccggcgacaccctcaagcggctagggctgtgatgagcatggcagcgtttgcgccgggccgccccaagcaaacgcagcacgcgccgaaaggcgcaaaccgcgccgggcggaatccgttgccccccgtgatatcgagcgtagcgagccaattggacccccccgcgaggggggtgaaggggggcgggccaagatgaagcacatcatcatcggcaacggccccgcgggggtcgttgccgccgagaccttgcgccgtctgcggccggaggccgagatcgcgctgatcggcgacgaggccgagccaccctactcgcggatggcgatcccctactttctccagggcaacatcgacgcgcacggcacccacctgcgcaaatcgcatgatcatttcgccacgcacggcatccatctgatcgaagggcgcgtcgcctgcatcgattcggcagtgaagcagatccagttccaatccggcgagcgcctgcattacgacaagctcctgatcgccaccggctcacacccggtgcggccgaacatcccgggaatcgacctagccaacgtgcacacctgctggacgctcgacgatgcgcgcgccatagctgccaaggccaagcccggcagccgcgtggtgcaactcggcgccggcttcatcggctgcatcatcatggaggcgctcgccgcccggggcgtgcagctcaccgtcgtcgagctgggcgatcgcatggtgccgcgcatgatgacgccgcaggccggcgcgatgatcaagcgctgggtggaagcgaagggcgtcgccgtgcatgtcaatacggccatcaccgcgatcgaacggaatggcgacgcactgcgcgtgaaagtcggcgctggcgggacggcactcgatgccgatctggtgatcagcgccgccggcgtgcggccgaacgtcgatttcctcgccggcagcggtgtcgagatcggcttgggcatccgcgtcgaccgcggcatgcgcacctcggtaccggacatttatgccgcaggcgatgtcaccgaagcacccggctttcattccggagcgccgcagctcaacgcgatccagcccaatgctgccgatcagggccgcatcgccgcgatcaacatggccggcggcaacgccgaactgcagggcagcctggcgatcaatgtcctcgacaccctgggcctgatctcgacctccttcggccactggcagggcaaaggcgatggcgtcgagctcgtcgatgaggcgcgctttcgttatctctcgctgcagttcgaggatgacgtgctgatcggcgcaacctgcatcggctggaccgaccacgtcggcgcgctgcgcggcctgatccagacgagaacgaagctgggcgcctggaaagcacgcctgaaggccgacccgacccagttcatggcggcttatctcgccaccgcgccaaaagcggcatagccggcccatgcgcatcaccttcaagctctttgcctcgctgcaggactacctgccactcgaagccagggcgaaaaatgccctctccctcgacctgcccgagggcaccaccctcgggcaggtcatcgagcgcttcgggctgccgcagaaatcctgccacctcgtcctgatcgacggccgcttcgta

SEQ ID NO: 2862 - DNA, 23402 bp, synthetic construct
  source 1..23402: mol_type = other DNA
  misc_feature 1..23402: note = Synthetic
gagcggttgggcagcgaagaacttccttattttatgcgcttgatgaagcacctggccagcaacggcttacaaagcccggatgtgttggtacgcaaagatggttcattgttgttcacgcttgatgcggatgatggtgaaaagtcgggttgtattgtttcatgcttgagcggtgaaactttagacgaactcaatgaaactcagctttatgcctcgggcgcaatgctggccaacttgcatgtgattggcgctagttttacagagcgtagaggcagcccaactgggcgggcttggttggttgaaaagattttatccatgcaagcggatgtgaaaaaaacttacggtgatgatgctttgcagctgcttaatgacgagttgctctatcaacagcaattgcaacttctcgatttgcctcatggcgtgattcatggcgatttgttttgcgataatattcttttttcaggcgatgaagtatcgggggtgattgatttttattatgcccatgatgccccgtatgccatggatattgccattgctatcaacgcccaggctattattttgggcgatagcgatgaatcacgcatggccagatggttggcaggttatacatcggtgcggcctttattggagcaagaaaaagatgcattgaatggtttgcttcgtttgggcgctttgcgcttttgggtatcgcgtttgtttgatgccctttatccccgtggcggtgcgatgacgcaaaccaaagaccctgaagaatatcgcagaaaattactgctgcatcgcgggtaacatcagcaaacaaatcaaatgcaagatggcggacaaacatgattttggtcattaacacaggtagttcctccattaaaatagccgtattcgaacgttcaagcctgcaggtattggcagaaggtttggcgcagcgtttgggtgaagctgaggccgatttatcttggttgattgccggcaataaacatgaacagcagcttttacaggctacccaccaaagtgctatggcggtgatgttggatgtgcttttttccaagctcaatcaatcggctattattgctgttggtcatagggtggtgcatggtggtgagttgtttgttgcgccaacggtgcttgatgatttaagcattacagctattgaagggttatcacatttggcccctttgcataatccttctaatgtcattggtatcaaagcgggcattgctgctttgccagcggtgccgcatgtggcggtgtttgatactgcttttcatcaaaccatgccaagcaaagccagcatatatgctgtgccttatgcgtggtatgaagattatggcgtgcgccgctacggctttcatggcaccagtcatcattatgtggggcttcaagctgccaagctgttaaacgttgcctttgaaaactgcaaattaattacagtgcaccttggcaatggctgtagcgccacagcaattaaaaacggcaaaagcgtggataccaccatggggcttacaccgctttcgggtttggtgatgggcacccgcagcggcgatattgatcctggtattttctcttttgtggcttcccagacaggtcaaagcttgggaagtatcaccaacactttaaaccggaaatcaggcttgttgggtatctcaggtaaaagcaatgatatgcgaacattgctggcagccagtgctgatggtgatgaacgcgcctgcctagctgttgaaatcttttgttatgatttggcaaaaacattggctggattggcagtttcacttgggcaagtggatgccatcattttcactggtggcattggtgagcatgcggcgcttgttcgtgaaaaaacattgatgcagttggctattcttggcgtgcaaatcgatgcagaaaacaatcaacatcatggcgaaaattctggtggttatatcagcgccaaagattcaaaagtggcagcgctggtggtgcctacccatgaagaaaagatgattgcttcttatgtgtgtcaggtattaaattgatatccgcttttttccttgaagctgaggggttgttagcatgagtcatgcgtttttgcttgtttccacgggtgctggtagtgggctgaccactgtgagtttgggcatggtgcgcgctttggataggcttggtatacgcacaggcttttataagccggttgcccagcttcaagatggagatacaggtttagagcgctccacccaattgattgagcacatgacagatattatcacgcaaaagcccattgatattcatcatgccacatctctgcttggcaccggccaagaagagctgctgatggaagaagtgattgccctgtatcagcaaagcgcaaaacacactgatattatgattgttgaaggtttagtggctgatggccatgctgggtatgccacgcatttgaatacagccattgctagagctttggatgctgaagtgattttggtgggtaaacccgaagtagatattcaatcctatatcgatattgctgccaatgcctttaagaatgaccacggcacagccttgattggcaccatcctcaataaagtcgatgttagtcttgatggcaccacaccatcagctcagtcgcaaatgagtgaagatgtttgccaaaaattaactaaaaaaagctgccattttgttggctctatcccttggcgtggtgatttgattgcgacacgcatggctgatattgccagttatcttggtgccacagtcatcaatgaaggcgaattgcacaaacgccgtgcagccagcattgagttatgtgcgcgcaccgttgccaataccttaagtgtttaccagccccataccttgcttatttttccaggtgatcgggatgatgtgtttattgctgcctgtatggcggcacttaatggtgtgccgctggcgggggttttgctcactgggggaatgcgacccaatgaacgtgtgatgcatttatgcgcccaagcaatgcatacaggcctgccgattttgcaagtgggcctcggctcgtatcaaacagccgctaagcttgccaaacgaccaactgaagtggctattgatgattatgaactcattgatgctgcgatggatcatgtggccaatcatttggatgcggaatggttaaaacaacgctgtgcgattgcccgtcaaccgcgcctatcgcctgcggcattccgctatgctctgatgcagcaagcccaagccaagctgcgccgtatcgtattgcctgagggtgatgaaccacgcaccgtgatggccgcctatcaatgccagcaacgcggcattgcccaatgtattttgctcggtaatcccgacaagattcatcaggtcgccgcttcgcaaggcatcaccttggctgcggatatgattattattaaccctgaagatgtacgccaaaattatatcgcgcctatggtcagtttgcgccgccataaaggtttgaccgaagcgatggctgatgaccaactgcatggccgcatcaatatcggcaccatgatgttggctttggatgaagtggatggcctagtctcgggtgcattgcacactactgccaatacggtgcgcccagcctttcaattgattggcactaaggctgatgccaaattggtgtcgtctatcttctttatgtgtttgcccgaccaagtggtggtctatggcgattgcgccattaatcctgagcccaatgccgaagaacttgcagatattgccatccaaagcgcagattcagccaagcgttttggcattgagcctagggtggcgatgattagttatagtactggcgaatcgggtatgggcagtgatgttgaaaaagtgcgcgaggcaaccaggcttgtgcgtcagttgcgccccgatttgatggtggatgggccgatgcaatatgacgctgcggcagtgctatcggtgggtagaagcaaagcaccagatagcttggtggcaggtaaagccaatgtgtttgtcttcccggacttaaatacaggcaacaccacctacaaagccgtgcagcgtaatgcccatgtggtgagtattgggccgatgctgcagggtttagccaagccagtgaatgatttatcgcgtggtgcaaccgttgaagacattgtctacaccattgcgcttacggcaattcaagccagttaagattgataaagttcaaagcaaaggagatgacacatggccaatgaaggatatcacgaaccaatcaacgaactcagcgatgaaacccgcgatatgcatagagccatcacttcgctgatggaagagttggaggctgtggattggtacaaccagcgtgtggatgcttgcaaaaatccagaattaaaagcgatcctggcgcacaaccgcgatgaagaaaaagagcatgccgcgatggtgctggaatggattcgccgccaagatcccgctatgggtaaagagctgaaagattatctctttaccgataagcccattgcccacaaataagcctcaaatatccgtatttattgtcaccactctggctgggtttaaagccagtgccgatggcagcattgattggctggatgaggccaacgttttggttcaggttggcgaagatgcggtttcgccaagttcttcgactcagtcgatgtgcttgtgatagggcgtactacctatgaaaaggtgctcagcttcggcggtgattggccctgtggcgatcagccagtgctggttctaaattctttgcccgtcaacttcccagtagcttcagtcactcagttgtacccgttgtacaggctcgtgttttgtttttgtagttcagcgctcagctgaggatacgatgccgccgcctaccagttcgtcgcctacgtagaaggcagcaacttggcctggggctgtgggtttttggggtgtttcgaaggtgaggttggtgttgtctgcatcgatgttgatggtgcatggcgaagggcgcatttggtagcgcactttggacaggatttgttcaccttctttgagtttacgcagccatgtggtgccgccgacggagacttggcgaatcaaggcatcttctggcggagctacaatcacgcgcgcggtgctgccatctagctctacaacgtgccaagggccgttgggaaggccaaggcctttgcgttggccaagcgtgtagtgggcaatgccttggtgactgcctaagcggttaccttcgcggtcgaaaatgtcgccggggcgaaagcctgcttcagcgccttcttttttcaggaaagcgatacgattgccagctgggatgaaacaaatatcttgggattcatgtttgtgggctgtcatcaaattgtaatgcacagccaaaatgcgggtgccatctttttgcaaatgccccacagggaatagaatacgcgccacctgagttttgttggtggtagccaggaaatagctttgatctttgatttggtcattgccgcgaaagatatgcacgccatcctcatcatcagtgcgctgcacataatgacctgtggccacatattcagcttcaagctcatcggctgcatcaagcaatgccccgaatttcacgaaacgattgcaacgctcacaagggttgggggtgcggcctgattcgtaatcggcaataaaagggtcaatcacattggcgcggaagttttcgcgcatatccatattgtaaaaaggaataccaatttgatcgcaaacgcgccgcgcatcgtaagcatcatccagcgaacagcatgagccagcgccagctacgtcttcacggttgtaatcccagacatgcaaaaacacgccaatcacatcagcgccagcttctttgagcaatgctgccaccacggaggaatcaacaccgccagacatggctgcaatcacgcgcacgcctttgagcgctgataaatcaggctttagggcttggatttcttccaaggtgggttgtgggttaacagtagtattcatagggttataaaaacgaaaaagcctgcgtttcgatagttgaaaagcaggcttttaagcttcattagattgatgctctaagcctagataaggctatcgcgcagcattttttcgtgttcagataatgaacgttcaaaagctgggcgctcaaacaagcggtccatataggcttctaggtgtggccactcttcggtggtgataccattggattccaagcgccacaatacaggtgcaagggtaatgtcagccaatgaatattgctcaccaatgaaatacacttgttgggccaaatatccgttgagtgatgccaaatagctgcgcattttcttagcgggctcagattttttcttcaggcgaaccaagttgtagtgcataggatacacttcttcttcaatgcgcatcacagccaaacgcatttgcgcgcgttctgcaggcgaacctggtttcaaaggcgggtgagggtagcgctcatccaaatattcattcacaaccgaggcttcaaaaaacaccacatcgcggtcaatcaccgttggcaatttgccatacgggttaatttttttgaaatcagcaggtaggttgtcttcatctaactcgaatgtctcaacgggaagttctttttccgccaaaacaatacgcgtacgatgagaatcgggcgacataccgtttgaatataacttgatcatgtgttgcctccagcaaaaaggtcgcggaaagtaacagtttttgtgaaaaaataaaccttattcttgtgtgaggtcggactgtagccatgactgggctttttcaatggcctgctgcataggtaaacccaaagataggtaagcagccaaggctgacgcaagacggcaacctgtgccgtgggttcggtcatgttgaagctgttttttgggatgctcaaaggcaatgagattgccttgcacatccgcaaaaatatcgttgcaaacatcgccgctctggtgtccgcctttgagtaaaacaggcactttaaattgcaacaaaagtgcagctgcagcttcaaacatatcttgttcgatatcggcaacattagcatctaagaaaaaggcggcttcttgtaaattgggtgtccaaatcgtggcatggctgataagcgttgtgtatgcctcgcgggcagaagtggcgtcaaacaatagcgcgcccgaggatgctaccaagacggggtctatcaccaattggctattgggcatgaggtgttgtttcaggttgagcaggctttgtaggtgcaggtcatcaaacagcatgcctgttttgatacaagtgacatcgtagtagttagcaatagcttgcagttcgccttcaaattggattaaagggctgggagtaatctgtaaaattgcattggggttttgtgcggtaagcgcagtgatggcgctggcgccatgtacaccaacagatgaaaatacccgcaaatcagcttgaatgccggcgcctccacaactgtcggatccgcccacagataatgctgtattttggcgtagtgggtttatgggtttgtcgcccaagtcttcaccatccactcggcagtttgtttgatgctggcctcatctccaacaaacaggctggaaatcacagccgccatctctgcaccagtggctttgacatcgtttaagttatccatattgatgccgccaatggcgcaaactttagcttctggaaacatggctttggctttttccaaacgcggcaggccaatcacaggcacatcggattttgttttggaaggaaacactgcaccaaacgaaacatagttggctccatattgcagcgcagatttggaaaaatatgcgtcggcacggcaggtgatgcccacgataaaatcatcgggcacaccattgcggatagtggatatatcacccacatcttcacggcccatgtgcacgccttgtgcgccgctttcaagcgccatttgcagtgaatcattgatgataaacgttgccccataggttgcgcacagcccgctcaataaacgagcgcgcttgagactgtttttaaagcccgattgtttatcgcgaaattgcaggatgggcagcccgccctgcaaagcagcttccgctttggccaagagttcttcagtggccaaagcggacggtaaaataccataaatgcctgttaatgcgttcacttaatcagtttaagaaggtcggtgaagtttggtaagctgacaaccttatcggcatattcagcaggcacgtcttggtatccatgttcagcaaaacaaacagtatggcattccgcagcaaaaccagcttctacatcaaaacgggtatcgcccaccatcaccgtgttggcattggctacgcccatcacgcggcagcattcgtcaagcatgtcgcgggctggttttttgggaaaaccatcttcaggtgataaacacaaagtcatgtaatcatccaagcccaaagctttggtcacttttacgcgagctttggcaggttttgccgtcacgatgcacatcttataacccttagctttaagtgtatccaatgtttctttcacgcctggaagcattttgccttcatcggctgggtgttgttcatacaaatctgcaaatgcatgatacaaagccatggtgtcggggtgatccatgggtttacccaatacattggatgcaagtttttgtgcgccgccgccgacatggggttgggtttctgccaacgtcatttggaaatcataaccaagctgtttgagggcacggttggcgttggcgcgaatatcaggaagcgcgtcaatcagggtgccgtccaaatcaaaaataaatgctttaatatcagtcatggtttcctcttaaagccagcgatttccactagcacatctttatttttttctttttcttctaaatcgttaatgcgttgtgctacttcaggactgtttccagccagttgacccagcgcccatatggcatgaccgcgaatcaatggttcttcatcccttaaaatatcaagcaaatcaggcacaaagctcacttcgccactgttgcccatagcgatgcaaacattacgtagcaaaccgcttcgtccagtgcgtttgacgggcgatttgcgaaacatctggcgaaaggctgcctcatcaaggcggaggagcttagcaagatttggtgataaagcatcctcacgcggattgaggaaatcagttattggtgcgtcaacatcattgttccacgggcacaccagctggcagtcatcacaaccaaaaatgcgattgcccatcggtttgcgtagcttttcggggataaaacctttgaattcgatggtgaggtaagaaatgcacaggcgggcatcaacaatatacggggcgacgatggctttggttgggcaggcatcgatgcaggcagtgcatgtgccgcaatgctggttggctgtttcatcaggttcgatggtcgctgttgtgaatatctctgcgagcagaaaccatgagccatagttacgattcaagctcaagctgtgtttgccctgccatgctaaaccgccgttggcagcgagtgcgtgctctaagactggcgctgtatcgacatacacacgttgcccatgcttgccgagcagcttatccaaatccagggcaagggctttgagccgtttcttcatcacttcatggtaatcatcgccatgggcataactggcaatcacgccttgttttggacttgcttcttcttgctttggcggggagtagggcatagccaacgaaatgacagtggtcacgccatcaagcatattttcaggatttttgcggcgaaacgtgcgcacgtgttctgccatataatccatttcgccatacattttggcttcaatccaagtgtccagcgtatgcatatcaatagctttaatgttgggtcgcgaaaaagcacacatggcaaaaccatgatgttcagcaagggtgcgaatatggaatttgatgtcatttgtcatagggattgttgtgggggcttggcctggctcctaggctcacacagtggcatgttggtaaaaagtcaactaaagtaaaaaagcccagtggatttctccactgggcggatacagagccttacggctctttattgtagtaacggctctcaccccggatagctacaaggtttccaaatatagggagtagaatcatggctgacaaggaaaaactcaaagaaacatataccattggtttggatataggcattgcttcggttggctgggccattctgggcgaaaatagaattatcgacttgggtgtgcgctgttttgataaggcggaaacagccaaagagggtgaatcgcttaatctttcacgacgtatggcaaggctgatgcgccgccgtttacgccgccgggcttggcgtttgaccaagctggcgcggctactcaagcgtgtaggtttgatagcggatgttggggttttaaaacaaccgccttcaaaaggatttcaaacgcccaacttgtggcaattgcgagttgaggggctggatagaaagctgggcgatgacgagtgggctcgagtgatttaccacctttgcaaacacaggggttttcattggattagtaaggcagaagcaaaggcagcagatagtgataaggaaggcggtaaggtcaaacagggtctagctggaacgaagcgactgatgcaggagaaaagctatcgtactgctgccgaaatggtattggcagagttcccagatgcacaacgcaacaaacagggcgaatacagcaaggcgctttcgcgcgaactgctttgcgaagagttgaaagagctgtttaagcagcagcgtgcattcggtcatacccatgcagacgacaaactggaaacaaatattcttggcaatggtgataaaaagagtggtctgttttgggtgcagaagccctcgctttcaggtgaggctttgctaaagatgcttggtaaatgcacgtttgaaaaagatgagtatcgtgcagctaaggcctgttttacagctgagcgccatgtgctactcacccgcatcaataatttgcgtatagttgaaaatggaaagatgcgtgggctaactgccgatgaacgtcgcatcgcgctctggcagccctatcaacaagcaggggattttacctttaaacagcttggaagtgcgctcgagaaacacggaagtctgttaaaaggagggtacaaattcgctggtctgacttatccccgcgaaacagatgagaaagctaagaaccctgaaacggcaacattggtgaaaatacctgcatggcaggagctaaagaaaacactgattggagttgggctggagcgcgaatggcaagggatggcagatgctgcactcaatggaaagcctgatttgctggataagattggctgggtgctttcagtgtacaaagaggatgatgaggtggagctggagcttggcaaacttcagctcgcagcgaatgtcattcatgctttgcaaaccgtgcgattcgataagtttagtaacctttcgcttttagcgctttgcaagattctccctcagatggaaaacggcatgcgttatgacgaggcatgtaaggaagccggataccagcacagtatgccagatatgcaggacttggaggccaaggttagatatctgcctcctttctattcagggcgcgaaaaggatgggagactaaaattcaacgaggatatggatattccacgtaaccctgttgtgctgcgagcactcaaccaggcgcgaaaggtagtgaatgcgcttattcggaaatatggctcaccgcatgctgtgcacatcgaaatggcacgagatctttcacggcctatcgatgagcgccgcaagatagaaagggatcaggccgattatcgcacgaagaatgaagatgccagaaaggcatttgccagcgattttggatttgagcctaagggcaggcagtttgagaaatacatgctttaccgtgagcagcaggccaagtgcgcctattctcttgcaccgctcgatctgaaccgggttttgaatgatcaaggttatgctgaggtcgatcatgcgcttccgtactcgcgaagtttcgatgatggcaagaataatcgagtgctcgtattgaccagcgagaaccgcaataagggcaaccaaactccctacgaatacctagatggaacgagtgatagcgaaaagtggaggctctttgaaagctttgtgagcggtaacaaggcatacagccaagccaagcgtaatcgcttgctcaagaaagattttggcgtgaaggagactcaggatttcaaagagcggaatttgaacgatacccgatatatctgccgcttttttaaaaactatgtggagcaatatctgcaactgcatgaagagagtgatgccaaacgttgtgttgtggtcagtggccaattgacttcactcctgcgcttccgttggggcatcaacaagattcgcagtgagagcgaccggcatcacgcgctggatgcggcagttgtggccgcgtgcagccacggcttggttaaacgcatgtccgattattcacggcgcaaagagctggggcaggttcgagatcgtattgaaaaggtggataaaaaaactggcgagattattgatcatttcccaagcccatgggcacacttcaggcaagaacttttagctcgtcttcatatcgatgatgcgaatgaacttcgagcagttgtagaaaatcttggaacctacccacctgaagcactggaaagtctaacgccactctttgtctcacgcgctccacaacggcgcaatagcggtgcggcgcataaagagaccatctatgcccagccagaggcaatgaaagagaagggcagtgttacgcaaaaagtggcggttaccagccttaaacctgccgatgtggataagctgattgaccctgaacgcaacgtgaaactttatgcttacctgcgtaaatggctggcaggcaaggatgaaagggaaaagagagccaaagccatcgaagcaagcgcagggcgcgggaaagagaagcgtgatcttacccctgaagagaaaatcgagatcgaaaggctgcgggctctgccacagaaaccagataagcagggtaaaccaaccggaccgattgtgcgggcggtgacgatggtgattgataaactctctggaatccccgtgcgtggaggcatcgccaagaatgatacgatgctacgagtggatatgttctctaaagcgaaacgatattacctcgtgaccgtttacgtgtttcacagtgtcgcaaaggagctgccgagccgtgcaattgttgctcataaagatgaagatgactggactgtaattagcgaagactttgaattttgtttttcaatgtatcccaatgactttattcgtatttctcaaaagaaagaaacgttcatgggctattatgctgggtgcgataggggttcaggaaacgttaatctttggagtcatgaccgaaattcacaaataggaaaaagcggcatgattcgcggcattggagttaaaacagctgttaacgttgaaaagttcaacgtggatgtgttgggtaatatctaccctgcaccgccagagattcggcgtgagctggcgtagtgtagtcatctccagtcctgctcgactacagcgagacaagttttcgttactgattcagcaggagcaatcggtgagagttcctttcgaggatattgcgattattgtgctcaatcatcgcgaaatattattgacgcatcctgttctctccgcttgtggtgaatatggtattagcatgtttgcaaccgatgatgcccaccaacccaatggcgtgtttcttccttttctgcaacactcgcgcgcaaacaggatgctacgaatgcagcttgcagcttctaagcctttggtcaaaaagacatgggcagccatcgtgcgccagaagattaccaatcaaggattggctcttgattttacagcctcagaaggaggcacacaaatggttgccttcgttcagcaagtgcgctcgggtgatgtgactatgatggagagccaagcggcggcattccattttgctaggctgtttggtagggattttcgccgatcacaattgatttggacaaatgctgcgctgaactatggttatgcaatcttgagaggtgctattgcgagagggttggtggcacatggctttttcccttccatcggcttacaacacgccaatgagcaaaatgcttttaaccttgctgatgatttgattgagccatttcgccctgtgattgatttatatgttgcctcccatcgcagtgatgatgcggctgatttgctgcctattgataaggtggcattggttgcattgcttaatgtcgatgttttgatgccacgcggcacgatgtctgtgttgacggcgattgagcagagtattgagagtttgattagagtgttggattgcagcaatgaaaagttgctcgaactaccaagtttgattggtcttgagcagcacattgttgaggggtaacaatgagccaagcaacccggcgatttatgcggctaatcgtcttttttgatttgccaaccaagaccaaggctgagaaacgggcttatacgctgtttcgccgtttcttgctcaatgatgggtacgatatgctgcaatggtcggtgtatgggcgagtggtcaacggaattgatgctgaggcaaaacacctcaaacgcctctctgcaaatctccctcctgcgggctcagttcgcagtttaacggtcacggaaaagcagtttgcaggcgtaaaaatgctggttggaaagccgaaatttcaggaaaaaaagctgaatactgaccagttgttactcttttaaggcacagttttttccaagttaaaacccttgtccagcgttgcgggacaagggtttgtggccaatgtattgtagctatccggggtgagagagggaactacaacattggaggcaatcaaaagagcctgtgccagattgtagctatccggggtgagagagggaactacaacctctgaatcggcagacactattcgcactgaattgtagctatccggggtgagagagggaactacaacctacagtcgatgcagatgcgattaccatcgattgtagctatccggggtgagagagggaactacaacccgtgatgtaccatgccgtaaatcgcatcaattgtagctatccggggtgagagagggaactacaactaagcttagccattccattcacccggacgcattgtagctatccggggtgagagagggaactacaaccgcaggtggtcctattggcactactctttaattgtagctatccggggtgagagagggaactacaacgacgttgaagcaacttaaacgcttgtgggaaattgtagctatccggggtgagagagggaactacaactgctgaaagcatgtggaaaagccctatgaaattgtagctatccggggtgagagagggaactacaaccgacccaaccatcttcaaacacatcttttgattgtagctatccggggtgagagagggaactacaaccattatatagacacattatatagataccttattgtagctatccggggtgagagagggaactacaactgatttagccgtggagcgaattacaggatcattgtagctatccggggtgagagagggaactacaaccgcggtgccccacgtttgtgacatcaacacattgtagctatccggggtgagagagggaactacaactcatcacttacgcacaagacacaccagctcattgtagctatccggggtgagagagggaactacaaccgtcagcggtagggaatgcaggcaatgcagattgtagctatccggggtgagagagggaactacaacggcgccatgtgcgcatacacctgcaccattattgtagctatccggggtgagagagggaactacaactgaagcgctgcggcagcttgtttctcagcgattgtagctatccggggtgagagagggaactacaacacaagaacatttactggctgaggttttggaattgtagctatccggggtgagagagggaactacaacagatgttatcgcgttatgctgtgagtttacattgtagctatccggggtgagagagggaactacaactaagctgtggaaacacagggtttccaattaattgtagctatccggggtgagagagggaactacaactggtgttttaacggataaacaatcacaggcattgtagctatccggggtgagagagggaactacaacctataagcaactatatatcgtcaccacataattgtagctatccggggtgagagagggaactacaactggatggcatactattgttaatgagattgtattgtagctatccggggtgagagagggaactacaacttgcccgcccattcaacatcagattgcgctattgtagctatccggggtgagagagggaactacaactgatggcgcaaaggtgaacgcagtgaatatattgtagctatccggggtgagagagggaactacaaccgtaaaaccaacacctgttgatataagtgtattgtagctatccggggtgagagagggaactacaaccaaccaagatgctgcattcaacgatattgaattgtagctatccggggtgagagagggaactacaactcatcacttacgcacaagacacaccagctcattgtagctatccggggtgagagagggaactacaaccagatggttacaagtaacttctaatggaacattgtagctatccggggtgagagagggaactacaactgtatcgtctacattgtcacatggttgattattgtagctatccggggtgagagagggaactacaacacccgcatttacgacgaccaaagggaaaaaattgtagctatccggggtgagagagggaactacaacattgctggctgagatgtatatcagcggaaaattgtagctatccggggtgagagagggaactacaactatgtcagatgctcacatcaagcagatgaaattgtagctatccggggtgagagagggaactacaacaagcttaccgtaatgtgcaagacgcaagcgattgtagctatccggggtgagagagggaactacaactcgtattcgtggcgatggtggtgttagcgcattgtagctatccggggtgagagagggaactacaacaacggctgtccgctgtgaactaaaagcgcaattgtagctatccggggtgagagagggaactacaaccaaagacacaaggcaggttgtcgatactgcattgtagctatccggggtgagagagggaactacaaccggaggtggattaaaggttagttcgggcggattgtagctatccggggtgagagagggaactacaacctagccaagttatcgttaaactcgctttatattgtagctatccggggtgagagagggaactacaaccacagaagaagagttaaaagattcaactctattgtagctatccggggtgagagagtgtagtggtcaacaaaatttggccacgttattagagtttttctagttttttccaatgtaggtttagatttccagcgttgagccgccgcttacgccatcgccacctgcttggaggatttgctcggcagcgtcttttttattgatgttttcactgccttcgagtttggtcatcttcattttgaagcgaagattgttgggtgagtcggaattgcgaagcgcttcgacttcatcgatgacgccatcgtgccacaacttaagcagggcttgatcaaaagtgaccatgccgtattgctcgccagcttccatggcttctttgatgccgccgaggtcacccttaagaatgagatcggcaatgcgcggggtgttcatgagtacttcaatgaccacggcgcgtccaccatcaacggttttcaccaaacgttgcgacataatggcgcgcaggtttagtgataagttcatatatacttgtgggtgtgcttcttcggggaagaaattgatgatgcgctccacagcttggttggcattgttggcgtgaagcgtggccatggccaaatgccctgtttcggcaaaagccaatgcatgttccatcacttcccgatcgcggatttcacctagcaggatgacatcaggcgcttggcgtaaggtgttttttaatgctgcatggaatgaggtggtatcggtgccaacttcccgttggctgacaaaacacattttgtgtttatgcatatattcaatgggatcttcaatggtgatgatgtgacctgcctgattggaattgcgccaatcaatcatggcggcaagggatgtggatttgcctgaacctgtgccgcccaccattaatactagcccacgcgtgctcatggaaatatctttgaaaatatcaggcagaccaaggtcatcaatgctggcaatttctgttttgatttgacgaatcaccaagccaatggaattgcgctggcggtagatgttcacacgaaatctacccacgcctggataggccgtggataagttcatttccatttcgttggcaaaggtcactttctgcttttcgctcatcaatgaagcagcaatacgctctacagaaaccgtatcaagaatttggttgcctgcgcgtttaaggctgccgctgacgcgaaagcccggcggggcgcctgccatcagatataaatccgaagcgtccttctcaaccatcactttgagtaggtgaagaactgaaatattgtctttgatttccatatgcgccgcctgttcagactgggtgtgtttaaagtctgtgtatggctaagcaattatggtgccttgtttgaaagactgcgtgccaaagaaggcagggaagattacgactgccagatgtctctaagcagcagctcgcaagtgtcatcaccttcgatggtgcgaatgccctttatcagtgagcgtagttctgccatttggcttagcttgcgctcgtgcaccaacttctgcagtactgggctttgttgataaaattggtcgtagtcttgggcggtaagcctcatcaaggcgcaatcagatagtgtgcgaactgtcgcagtgtgtttgccgccaactgaaacagcaacttcacctaccaccgcaccggtctcaagagttttgagcatgcgttcttgttgttcgaccatcacactgacggcaagtttacccgagcgaaccaaaaataaattttgtgcagtttctccgtcacgcatcagtgtttggccagcagggatatgaaccaacgtcattttttgcgcaatttggatacgaagttcagcaggaaccgcatcaaacaaaggagcgagtgccagttgcttgaccaacattctgctacgatacaattgctccagatgggtggatagcttgggtgaactgagtttgagtgagtcgagcatcgcatagggcagttctaaaatttcaacatcgcccacagctaccatttcagaagtacttcggccgcctgtgaaatatgcggtttcaccacaaatatcgtgcagtgtgcccaaatgagagcgtttaccatgcagggtgaggtagccatcaatttcaccttggatgataaaatacaatgatttggcttcatcgcccattttgctcagtatttcaccatcttctaggcgccggtaaatcatattctccatcagtgtttcgaatgcgtcatcgtcaaaaagggagaaaaaatcattcgggcgtagcttttgcgcagccttatctttggatgagaggaaaggcacaatcgtctcacctgtctcaccgcgttcgcgtaagagtttgaaaatccgtttgggacctttgtgttcgtcgggtttgatgctgtggtagaggcgaatcgccgcaaacgcttgtgctggataatcttgtttggcgtatcgctcggcgcttcttagataccagcgtgatgcatcatcgttttgtttagctttttgataggcttgccctgcgcgcaacggaaaatcgatgtttgtagggtcgaaggtcgataaagcaccaaacgaagcgccagctttatcgtgtttgccagccagcatcattttttgtgcagttttgatgagttttaatacttcaggatgtgtcatttttacagcatgagctgccttaagcgcttggacaatttgcttttctatgtcgaaatacttgctcaagtaaactcaccgtaccctgtattttcagttcatttgcagcgccaagaatatacattttacggccaaaagtaagcggcctgcaaagcgttagttacaagtgcatggcctattggcaaaagtcagtcatctaaaaccatattaattttgcctttccagaaagggtcttttcattaaggttggccgaactgggcaaatggtaaacggagtagaagatatgaatggtgattttgatagcagcgacccaaagaacatcgatgctatggcacatgtgaaggcgctgttgggttttattggtgatgaccctaatcgtgaaggtttagaggaaacccctcaacgtgtggtaaaggcctttggtgaatatttttcagggtatcaagaagaccctgccgaacacttgaaaaaaacctttgaagaggttgaaggttatgacgaagtggtgctggtctcggatattgaggtgtttagtcattgcgagcaccatatggcaccttttgtaggaaaagcgcatgtggcctatatccccaatggtaaggttgttggtctgtccaaactggcgcgcctagtggatggctacgccaagcgtttgcaagtgcaagaaaagcttactatgcaaattgccaatgcaattgaagatgttttgcagccagctggcgtggcagtgattattcagtgccagcacttttgtatgtgttatcgcggcgtacgcaaacccacagctatgaccactacatccaaactcagtggcgcctttttaaataacccgtcctcgcgtcttgagttgtttcagttgattaaagatcagaaagcctagtgtttgaataatatatgttgaccaatacccaaaccatcaacagggtgtcggcgtttcaccgtagttgttcttgttcgtcatatacgcaagttaagccaaataagaagaattcgtaaaaaaagtagtaagtagaaaagaggaaagatacatgtctaatacagttgaaggaaccgttaagtggttcaatgatgaaaaaggtttcggttttatcgaacaagaaggcggcgatgacgtattcgtacatcacactgcaatcaacaccgaaggcttccgttcattagaagaaggccaaaaagtaactatggaagtagttcaaggccaaaaaggaccacaagcagagaacgtagttcctcaataattgtgaattgaccaccttgggtggttagattcagtccataaggcgcagagtttaggctctgcgcctttttttgtgctctttttttcttggcgctggaagtgaatcgtttagttgcttttaagtttactgatatcgtgcatcaattgatgctgttgtttctcagcttgacgttgcaagcgctcttttagcggcggatacgcttcggagatactcagtaatacatcaaggccaatcgtgctactgtgacagaatccctagccaccaattcaataggttctaatttgttggcgggttgtagctggatattgccgaccatagcatggatgtgcagcggtggcaggggtatttttttaccttctttgttgcttgccaaataacatgcgtgcccagcgacaatgatatcaatgccagtaaatggtcgatccaacgcgtggacaaagctcttggctggaatgtggtggatactcaagtttcttgccagatgtcgtttcagtttcattgggatgggctgaaagacgggtaatgtggcaatcacttgcgtgtaagtgcgaaacattaccctttgctcaagaagtttcttaaggaaaggatttttagcgataattttattgagcttgctggctggcacttcaacgattgtggctgttggtgaagttacaaacgcttcgatttttacccgtccaggttttaaaaatgtatgctcgccaatcacatccaagatgccgacctgttcgagaagcacgcggtctcctgcagtgccgaccccataaatttcaacttgcccttcaagtaaaagattgagtgaatcgctcaaatcatcggcgcggtacacagcttgcccttcttgcagctttttccgttgcaatcgcagccaaacgctgcctaggttttcatgaatgagctgcccggcaatggcatgctgatcatgagtatcaaaagcattttcactaaaagtgagtcgtccgatttgtggatattgtttagccaaggcttctgcctctttgggcgagcgtttgactatcaaatcatggagatgtttgagtgcagttgtggctgtggattcgcggcccatggtgagcagcatatcggcgtagcgtttaaggtaggattcattatcaggataaacctcgataagctgtgcgtatgatttgagtgcctcttcaaggtcttttttggagaccttctggttcatgctgcaacttgttctaagcgtagcgcttctagtgcttctttatacatacacttttgaatcatcaggttgggctgctttttcaaatcaatgcggcgctcggtgatagcattgccgtacttatccatgctgatgtcaatgatagggcgcaatgggaatttattgtgaatggcaatcaccaagccgatttcacccgtgttgatttgcacaaaggtgcccaccggatacaaagaaatggattcaatcaaagcttttagcatcacagggtcgaatgcttttttatgatggttcactagctcgcgaatagcgtcgcgcggcaataagcgcgggcgataagcacgaatatgaatcagtgcttcaaacatcgatagcaagccaatcaatcgtgcagcccaaacaatttcaaaacctttgagtcctgtttggccactaccatcgtagcgttctgttgcttgggtgaccgcacgaatgatgtgttcgttgtcaatgctgcactggtgtaagaaggcgactgaaaactctggcgcttggcggattagggcgatttcctctttgcttagttttcctgctttatggcgaatgttggcagggattctggccatgcccgaatggtgcagcatagctgccaccaaatggttgagtagttcttggtgaataatatgcagctgcaagccagttttgatggtgtacagcatcatcataatagctttttgtaccaagtcggcattgtgctggtcatgtgcgcaaagtgctgtgattttcaggctgatttctagttctagtgcatcaacaacacttggcgattcatgaatctgctcaaggatggaacgcaaactttcttgcaaaggagaaatgtcggcggcttgcccttgctcagctgcagaaaatatttcagacacggtatggctgagttgctctagccagttggcaaccgtaaaagccccattggtgggcttaggtgctgttggttttgcaacagatgctgcttcctgcgctgactcagaggccatgttttttgtggtaaggggcgctagaacaacacttgggtcttcgtaatcactttcttcaattaagatatcactcgccgagatgacttcttcagtagcaggcaaggc

SEQ ID NO: 2863 - DNA, 23402 bp, synthetic construct
  source 1..23402: mol_type = other DNA
  misc_feature 1..23402: note = Synthetic
ttaattgttttttcaagatgactccccacaagctttataaaatctataatcttttcaatagtataacaatgccaaaatttactttaaaaaacagtcaaatgctaacgttcttttacaaataaaagtctatttagtagcatatttgtaacttttgctagtactccaaggcatcgacatccagcacccaacggatttttgcttgcagcggatgtgtcctgacccagtctactgccacttgcagtagctgctgcaaggcgccgcgatgtgcagactgcaacatcacatacccgcgctccatgcggttaagtctggcaatgccgggacgcaccgggtcatagaccaaaggctggtcagacagggctgccgcctgtgcggtgacatagcgcctggccgcctggctaaagtcagtcaaaaactgattgaccaaaccgtaatcggccgcttctgccttcatcaccgcgatataagtggcgggtggaaactgcatggccatacgctcctgtaataaatcgtcagcaaaagcagcataattctgctcgcgcaaggcggcaaacaaggcatgctgcggaaaagcagtttgtatcaacacctcaccgggcttatcgccgcgaccagcccggcccgccacttgcatgagctgggcaaacaggcgctcgctagcacgataatccgggctatataacgcactgtctatatccagcacacccaccagcgtcaaattggcaaaatcatggcctttggccagcatttgcgtcccgattaaaatatcaatttgacccgcatgtaccgcggacaacagctccgttaaagcatccttggcctgtatggtgtcgcggtccaccctggcgacgcgcgcttgcggaaacagctgctgcatgctttcttcaacccgctgcgtggcctggccaaccgggcgcaaatcaggattaccgcaacttgggcattgcaccggaatcggctgctcatcaccgcagtgatggcaacgcaagacgcgctggcgcaaatgcaataccgccttggcagagcagcggcggcaatccgccagccattggcaggcggagcaatgcaataccggtgcataaccgcggcgattaataaacagcaggctttgctctccgcgctgcaaacgcagttcaatggcctgttttaattgcggcgtcagcccggcttctggcgggctgtgcgtagtatcaatacaaaaaatacgcggcaattttgcctgggccgccgcccgcttggtcagcgtcagcaaacggtaacccgctttttttgcattcggtacactttgcccctggtcacccatcgcgttgtaccagctttccagcgaaggtgtcgcactgcccagcacaacggggattccgcattgcttggcgcgcaccagcgcgacatcccgcgcatggtaacgcatgccatcctgctgtttgtacgaagtatcgtgctcttcatccagaatcattaatttcagatgcggcataggcgtgaatacactcaaacgcgtgccgatgacaatacgcgcagcgccggactgcgccgcctgccagttttgcaagcgctcactctcactcaaatggctatgtagcgtcaccaatagaaactggcttaagcgacgacgaaaacggctctccagttgtggcgtgaggttgatttcaggcaccatgatcagtgcttgcgcctgcggctccgcgagcacggtttgcagcaaacgaatatagacctcggttttacccgagccggtgacaccgaataacaaccagggttgaaaacgatttaactcacccaaaatcgcgttcaccgcctgtgcctgctcatcattcagtgtcggttccagatctgatgcaggcagggaaggtcgcgtggcaatcacttcgcgtctggagacataaccaccatccagcaatggctgcatggctttacgccaggtggcagacacctcagccaacatcgcttcactgcattcatcatgctggcgcagggacgcaaccagcctggccagcacttgctgccttttgccaatcaagtcgtccggaatgctttgcgccagccgatacagccacattttgcgtgtcactgccggcttaatctgacgcaaacgcagtggtaagctcgccagcaccgtctggccaaaaggataatggtaatagtcggcgcagaaccgcagcagcttcaaggtcgccacatcaaacggcacgtcttcaaacacttgcagcacagctttgagcttgtgtggcagcacatccgtttcgctcagcagcgccatgacgatgcccaccaattgccgcccggcaaaaggcaccacgacgcgattgccggcacagattggcaagccggggtttaaataatcaaactggcgatccagtggcacgtcgagcaccacacgcacaatactggcgggggttgcggcctgaaggtcggtgacagttgaacacatgggtgaaaatgcttaattaggttaaaatggcggtttgattattcagcaccattttaaccttgaaacaaacgatcacagcactcattctgcaagcagtgaaaccgctggtagaagatacctccagcctcactatcattcttgaacggccaaagtctgccgaccatggtgattttgcgactaatatcgccatgcaactggccaagcctttaaagcaaaatccgcgcgcgattgcacagcagattattgatgccttacctgccaataatgtcattagcaaagtcgatatcgccggtgcaggctttattaacttctttgtatcggctgacagcaagcaggcaattgtgcacgaagtgctgcaagcaggcgctacgtttggtcgcaaccaggctggccaggcggcaaaagtgcaagtggaatttgtctcagccaacccgaccgggcctttgcacgtcggccatggccggggtgcagcggtgggcgactgtttgtgccgcctgctggatgccaatggctgggaagtgacccgtgagttctactataacgatgccggtgcccagatcgacaacctgaccaagtcagtattggcgcgcgtgcaaggtatcaaccctgacgatgcaggcttcccggaagacggctaccgcggcgactatatcgtcgatattgcgcaagcctacctggccaaagccaccattattgctgacgatatgcaagtgactgccagcggcgatgtggcagataccgagtccatccgcaagtttgccgtggcttatttgcgccacgagcaagacctggacttgcaagccttccagatcaaatttgatgtgttttcactcgaaagtgccttatatagcgaaggcaaagtagaaaacactgtgcaatcactgattgccagcggccacacctacgagctggatgacgccttatggctgcgcaccaccgaatttggcgatgataaagaccgcgtcatgcgcaaaaaagaaggtggttttacctattttgtgcccgacgtcgcttatcaccgcgaaaaatggaatcgtggttttaaacgcgtgatcaacgagcagggcgcagaccaccacagcacgattacccgtgtacgcgcaggcttgcaggccctggatgtcggcatcccgcaaggctggccggagtacgtactgcaccagatggtcaccgtcatgcgtggtggcgaagaggtcaaactgtccaaacgcgccggtagctacgtcaccttgcgcgacctgattgaagaagtcggttgcgacgccacgcgttatttcctggcggctcgtagcccggactcgcaactggtatttgatatcgacctggcgcgcgcgcaaaccaacgataacccagtctattatattcagtatgcacatgcgcgtatctgtagcgtcctcaaccagtggaacggtgacgtggccaaattagcggcggctgaactatcaccgctgcaaagcgccacagagacagcgctgatgcaagcgttgggacaataccctgaagtggtgagcagtgcctgccaggcattggcaccgcatatggtggccaactacctcaaggagctagccagtgccttgcatagttattacaatgacaccaaatttttggtggatgacgaacaagtcaaactggcacgtttggcgctgatcaccgccacccgcacggtgttgcgtaatggcttggcattattgggcgttggcgcgccggaaaaaatgtaagcatccctttaatgactgctgaattgattggttaaccttacaatgagtcgcgactacaaaccctcacaagccaaagcaaaaagcaaaagcagcggcagcactttctttaacggcctgctggtcggcctgtttttgggtgtcgcgctgaccgtggcactgattatctacatcaaaggtgatcacagcccattttccagcgcgttcaaaaaagacgagggccagcaagaaatcccgatcaagagcaccgtcaccgaagaagaagtcaaacccggtagcgcttctattgaggaccctaacaagtttgatttctacaccattttgcccgacaccgagagcaagatcagtgaacagcaagtgaaaaagaacccgaccatcaagcaagaaagctattttgtgcaagtcggcgcctttgccaaagaagatgatgccaacaatctcaaaacccgcctggcactggtcgggtttgaagcatttgtgcaaacggcagaaatccccaacaaaggcaccatgcaccgcgtgcgtattggcccgctcaatgacttggccaaaatcaacaaaattagccacgatctggaaaccaatggcttccaggccaatctgatcaaggtcaatatcgaatcttcaacccattaatgccgctgtcatcgcgttgtcatcgtacgcacagctgccacgttattgcatgatgttccacaaaactttaggaaactgactttatgaaaaatatgttgttgagtttgatgctttgggctggctttaccgcgacctcagcactggcagacccgcaaatgggtgaacagtttgatcaggttgcgcagcaaatcacaaccgaccaaccggccaaaatcgaagtcatggaattgttctggtacggctgcccgcactgttaccacatggaacagccactgcaagcctgggtgaaaaaactgccagccgatgtttatttcaaacgcatcccagcgctgcccaatgccaactgggcaccattggctaaaacttactttgctatgcaagagcttggcgtgcttgaaaaactgcatagccagttatttgatgctatccacaaaagcaaagccctgagcccacaatctgacgaagccgcagtgattgactgggtcatcaagcagggcgggttagacaagattaaagtagaaaaggccttcaaatcgtttgccgtcaacatgcaaatgaataaagccatgcaaacgttccgcgcttcgggcgcgaccggcgtgccagccctgattatcgacggtaaattcatcaccggtagctctatggccggtggtaatgaagcggccctgcaaaccgcagatttcattattcaaaatgtgcgtaaagaccgagctgccggtaagaaataagccagcagcttgaattaaaaaaacgcctgatgtcaccaacatcaggcgtttttgttttgatgcttcgaaagactaaaaaagctatttcattgaccaccgatgaacacagatacacgccgagggcaaaaccagttcattaaacaaccacacacattgctagcgttttctttcgcctttaggcgagtcactttctggtgcttgtcccccagaaagtaaccaaagaggaagacacccagccatcacggcctaaaggcttccttgcgttgctcaacaaagtgggcgtccatcgaaactcgccctagcggcttgcacaacccgcaagccaccgcggaactcgaacagccgatggccgactactcccactttgtctccgctactcagcgtgatgggatgggatttatctcatctaacttgcatggatttagtttggacggtttaaaaaccggattcttttgttaaacctgctaaacggtggcgctcgcgggtgttcggggtccccatctgccgcgccgagcaacgcagggttggcgggagtcttcggccatcggctgtccgagttccgcaacaagccacgttttatgtggcttgtcagggcgagtttcgatggtcggccggcaaaccgagtagcacaggaatcaagcggaagttggggtgtcttgttctttgccttctttcttatggacaagcataagaaagaaggtcgcctagaggcgaaatagatcgctcattaaataaccaagcaacttactactaatatgcccttcgcttttgcaagcaaagaaaagtaactcgccgaaaaggcgaaacaaatgctcacgaaatactgttacgtcggaaaagaaaggaaatctaacaatcaccttatcagtccatccaaaccaatacgttaacgacccgccttcaaccaacgcccaatccaggtttccggcatttccgtccccgtcactagataatgcaatgtcttaatatcatgcatcacaaaacgttgtatcgatttggcctgatccagaccacaacataaaatcgtgtcgccaatttgcaacggtgtggacaactccggcaataacatcttttgctcgccacgcaccagcatcaatggcaccaccggcatttcatgtagctgctgtccggccgggcgcatcatcaaatgcttgagcgcagggtgtatgccttgctccatcaaggcgcatacagccacggccatgtcgcctgtaatggtgatatcccaggtatcaggcacttgctcgcctaattttgaaaccagttgcgcaatcacggcattggcccaggcgttaccctgatgcctggcggttaccagaaactccgccagcatcggtgacaccatataagacaaacaggtgtgagcaatcacatcgctgggctgcatggtaatatcggcattaaagtgctggaacagcggatcattatgccgtttgtttttgcggatgatgacgaacagctttggattcagttcgagtgctgtcatcacaatcgacaaattattaatatcattgtcggtcccggcaacaatccccaccgcatgctctaccccagcctgctgcagaatgtgcgattcaacgccgctgccaataatacagtcttcacattgcgtgccctgcggatcagcctcaatcacggtgacatgcatctggccattttgcagactgctgactaccgacttgccaaaacgcccgaaaccacaggcgatccaatgcccttgcggcacgggtgctggcgtagcaatcgcatctcccggcgccctggtcagccattcgtgcaacaaataggtgcccagcgcgtttaagcgcatggccagatgctcgccaaaaatattgtaagggttaataatacggtcagtaccaaatgacgccatattggcggcaattacatcgttttgcacacgcgccagtaccggcaaatctggcttgatcagtttcacggccaccgaaatcgccaggttggcatggtcatcatcggtcagggcagccacgccacggcacatcgggtttttaatgccggcatacagcaacacttctgacaatttagcgtctgcacacaaatgcgggatatagaactggtaatcggtcatttccagttcattgatacgctccggcgaaatctccagcaccacgacgcgtagttcatttttatccagcgcccgcaccagttcaccacctgtttcaccatagccgcaaatcaggtaaaacggttccatcaggtttctcacatcacgctgaaacatggcgtttttaaacgccagctttaaggcggattcctgaaacagcgcaatgatcgcgccgatggcatagaaccaggaaatgactgtcaggtagatcgaaaaagtcatccacaaacgctgatgcgtggtgaacgggtaggggatttcaccgaaaccaatggtggtcgcggtataactcagaatataaaacgcatcaaaaaaaccgtagcgataaggctggccatgatcatctaagccagggatcagcacgaaaccgatcatggcgatggcataactgatgatgaccatcagcagcggcgcacgcatacgccgcaaaatcagaaagatgatttgattgagactcaccgctgtctccgttaatgcacgctagcggcgcagggtcacggtttcgtagatcagcagaatcactgaagtgatattggccagaaaagcaccgccagacaaggaaacaatgcccacaatcacctccggctctgcgcctttgctcccggccactacccagataatcgctgcagcaatcagctgtatgtcagcaaccaggctggtcgccagatgaatcgcacctatctgggtgcggtcaccaaacttgaggacggtggcaatcaggttgaccacaatcgccacatataattcgtaatgcaaatggtgttgcggattatcaatttcgccgacaaaaaaaccgaaattgagtgtcatggccagaataataaaaaagccaaaaatcactttttccaaattcattacgtttccccaagcattgttttatggcattctacccgattaaaatttgtttactgcgatgttttttatgtcgaaaaatagtgtgtctgccatgcgtgttttaattaccggcgcctccagtggccttggcgctgcgatggcaaccgcctatgctgaacaatatggtgagcaactacagatcgccttatgtggtagaaatgaaaccgccttacagacactggctgacggtttaaagcagcaatatcaaaccacctgcgcgatttattgcgtagatgtgcgtgtcgccgcgcaaatgcagtccatggcgcaggactttttacaacgctttggcgcaccgcatatcgtcatcggcaacgccggggtcagccgtggcaccttaaccgagtttgccgaagatatcccggcgttccaagcggtatttgagacgaatgtcatgggcctggtacataccttccagcctttgattgaggccatgaaaaccgctgctggccaaggggagcctgcgcaactggttggcattgccagtgttgccggtattcgcggcctgccaggctcgggcgcatacagtgccagcaaggctgccgccatcacttacctggaaagcctgcgcgtggaaatgcagttatacggcatcgccgtcaccaccattgcgcctggttatatccgcacgccaatgaccgatatcaacacctatcccatgccgtttttaatggctgccgatgtatttgcacgcaaagcacagcgggccattgcagccaaacggcgctttatcattattccgtggcaaatgggcctggtggcacgcctgatgcgcttattacccgcgtgcgtgtgggatcttattatgaaaaaagccccgcacaaggcgaggctttaatccctacgcggagttggctaggtcaagtctttaatggtttcagtggaaccattggttttcaccgaagcaataccattgtcacgcccagcctccgcagaatacatctggctggtgccaatgacctggctattacctgccagtaaattgaaataagggcggccatctttggccgtcagcttctgataacgctcatccagcggactgtttttctgcacagactcaatgccgttttgtgccgccgctttggtggtgtattgctcgcttttaagaatctgctcaccattacccgccttcaatgcaaaactaaattgaccgtttgcatcactttttgttagttcaaaccaacctgccatcgctcgctcctttgataaacaattaaagactgcgcaaccattaaagcactttttacagaaaaaaaatgatattgccgatataaattttacattagtttacataaatgccgtcaacaataatttacattcttaaaaatgcatggctgacttttattaagatacaggcaatagaaagcccagcacgaaggctgggcttggatacagaatctttcgattctttattgtagcaacggctctcaccccggatgaccacaacggttcaataataaggaataagaatatgaatagcaagcaagctttgaaatatagcattggcttggatattggcattgcttctgtcggctgggcgctattaggggaaaacagaattattgatttgggagtgcgttgttttgataaagccgaaacagcagacaaaggtgaatcactcaatctggcccgtagatcagcacgtttattgcgacgacgtttgagaaggcgcgcatggcgattaaccaagctcgcacggctattaaaacgtgaggggttaatttctgatgtgaatatactcaaacaaccacctgccaaaggatttacaacgcctaatttatggcaattgcgtgttgaagcactggatagaaaactcaaccacgaagaatgggccagagtcatttaccatctgtgcaaacagcgtggctttcactggctgagcaaagccgaagagaaaaaagcggacgatgacaaagaaggtggcgcggtcaaaaaaggtttggcaggcaccaaaaaactgatgcaggacaaaggttatcgttcggcagctgaaatggtcatcactgaatttccggatgcgcaacgcaataaacgcggtgactatagcaaagccttatcacgcgagttactttccaccgagttgcaattgctttttgatcgtcagcgcgcattgggcaatcttagtgcatctagtacgctcgaagataaattgcttgagcgcaagcatgggttgctatgggcacaaaagcctgcgctatctggtgaagcgcttttgaaaatgttaggtaagtgtacatttgagaaagacgaatatcgtgcgcctaaagccagctttactgtagaacgccatgtgtggttaacccgactaaataattgccgtttaattattgatggtgaaaaacgtgcgctgacaccagcagaacgcgtacttgctattcagctgccctatgaccagagcagcgattttacctataagcaatttcgcaaagcattggtaaaagctggcctgacaaatgaattccgttttgccggattggtttatcctagccaatcagaacaggaaaaagccaaagacccggaagatgagaaactgattaaattacctgcctggcaacaattgcgcaaagccatgaaagaagccaatttagagagcgagtggcagaagatagcagtggatgcactagatggtaaggcacagctttacgatgaaattgccagagtcctgagtatttacaaagaagatgaggaggttgagcgggaattaaacaaactggatttacccaataaatcttgcatggttgaagtattacaaactgtgcggttcgagcaatttagtaatctttcccttaaagcgctgtacaacatactgccgcacatggaaaaaggccaccgctatgacgaagcctgcttggcggccagatatcaccatagtcaactgcatcacacaggcacagatgagtttcaatacctgccccttttttacagcgggcgcgatagagatggtcgcctgaaatttaacgaagacctggatatcccacgcaacccggttgtgctgcgagcattaaatcaggcgagaaaagtggtcaatgccctgatcaaaaaatatggctcgccagatcaggtgcatattgaaatggcacgcgatttatcaaaatcgtttgatgataggcgcgatattaaaaaagcacaggacgaatacagggatcgcaacgaaaaagatcgtacaacctttaaccttgaatttaatactactggcgaattgaaaggccgtgactttgagaagtggcagctttaccgagagcaacatggcaagtgtgcctactcattacaagcgctggatatcaatcgcttatttgaaatggggtatgcagaagtcgaccatgccctgccatattcacgtagctacgatgacagtaaaagtaaccgcgtattagtgctggctgccgaaaacagaaacaaaggcaatatgacgccttatgaatacttgggaggtgcccagaataatttgcgctggcttgagtatgtggcttttgtaaactccaacaaaacctatcgccaggccaaacgcaaccgactgttaagaaaagactttggcgaagaagcggccagggagtttagtgaacgcaatctgaatgacactcgttatatctgccgttttttcaaaaactatatcgagcgttacctcaaactggcagataccagtgacagtaaacgctgcgtggtcgtgaacggtcagttaacttcattcttaagagcacgttggggtttagtcaaagtgcgtgccgattcagacaggcaccacgctttggatgctgccatcgtcgcagcttgtagccatggcatggttaaacgcctggcggattactcaagacgtaaggagcttgaaactgctcgcgaaggttttgtggatatcacgacaggcgaagtagcaaaccacgccatgtacacacaacttgagcaacatttcccattcccttggctacactttagacaagagttacaagcgaggcttttcgcagatgatttaccagcattgcgtaatgagttacaaaatatgggctatggcgctgatgcgctggagaatgttaaaacattattcgtctcgcgcgcacctcagcgcaggaatagcggtgccgcccataaagagaccatttatggacaatcagagaaactggcgaaaactgggagtgtgacgcagaaaatagccgtgaccgatttgaaactatcagacctggataagttaattgacccgcaccgtaatcaaaagctgtatgccgagattaccaagtggcttaaaggcagggatgatcgagaaaagcgtgcgaaggagattgaagcaagcttgggccgaggtaaagacaaacgtgagacaaccagcgaggaaaaagccgaaattgaaggcttaagagctttacctcgcaaaccgaccaatgatgacacaccgggcccagtcgtacgcacagtcactgccgtaattgataaattatcaggcattccgattcggggaggtgtggcgaaaaacgactctatgctacgggtggatgtatttagtaaagcagggaaatttcaccttgtacccgtctatgtgcatcatcgagtgactggattgcctaatcgagcgattgtggctaataaagaagagggagactggtcattagtggatgaaacatttgatttctgcttttctctctatcctaatgattttgtaagaataacccttaaaaatgagttacgagagggctattattcaggctgtgaccgcgcaacagcatccgtcagtttatgggtacatgaccgcaatgcatctgtaggtaaagatggtttggtaagaagtattggggttaaaactgctctaaatgtggagaagtttaatgtagatgttttaggtaatatctatccagcaccaaaggaaacccgcaatgacttggcgtagcgtagttatctctcaaccagccaagctacggcgtgagcatttttcgctggcgattgagcaaacgcaaacagcctttgtgccgtttgaagatatcgctgtcattgtgctcaataacagagagatcactctcacccacccagtactttctgcctgtggtgaatatggcatcagcttattttccacaggtgataatcatcagccaaatggcattttcttgccttatctttcgcattcacgcgccaataaatggatgcgcctacagttagacttccctaagccaaagtccaaacaaacctgggcagcaatcatacgacgaaaaattgcaaatcaatcggcctgtttacgcctttgcgggcgcgatggtgttgatcgcttggagtcttacgttgggcgagtgcgatctggtgatattgaaaatatggaaggccaagccgctgctttttactttccacagctttttggtaaaggcttcaaacgtatgcaagaaagctttactaatgcagcgctagattatggttatgccgtattgcgcggcacgattgcacgcggcctggttgcacatggcatgatgcctgcgatgggtatttttcatgccagtgaacaaaatgcatttaatctggctgatgaccttatagagccattccgcccattagtggatttatgtgtcaaaaacatgcccatgccagcaaatgatgctttaacgccactacacaaggcgacattggttaatctgctcaatatagatattgcgatgccgcgtggcaccatgtcagtgttatcagccattgagcatactgtagaaagtcttgcccgagtcctggatggtggcacgcctgagttattagagctgcccatgctcataggcttggagcaacatcaactagagtattaaccatgagcggggagaccagacgatatatgcgattgctagtattatttgacctccctgttgtgaccaaggctgaacgtagagcctacacactttttagacgttttttgatcaacgatggctacgacatgattcaattctcggtttatggccgtctaatcaatggtaatgatgcgctcgataaacatctcaaacgattagcagataacttgccacctgaaggctcagtgcgctgtttaagcgtgacagaaaagcagtatgccagcatgaagttactggttgggctgccgctttttcaagaaaaaaaggtcaaatcagaccagcttcttctgttttaaatcattgttttaaaaaattaaacccgccccaggtgttagctggtgcgggtttggtgagagcctattgtagatcatccggggtgagagagggagctacaactggcgtagcatcgggaccatcgcctttgtcattgtagatcatccggggtgagagagggagctacaaccagcgtcgcaatcacgtgttcaaccagcatattgtagatcatccggggtgagagagggagctacaacggatcaaacgttgtaaccgccaatcctctgattgtagatcatccggggtgagagagggagctacaacggtggcctcggttctgttatttctgccggtattgtagatcatccggggtgagagagggagctacaactttaaaaacagtacgatcactgaaatcaaaattgtagatcatccggggtgagagagggagctacaacccacgtagtcgttcgagcagctatcccaaaattgtagatcatccggggtgagagagggagctacaacgctgcaatgtgtggcaaccaagacaatataattgtagatcatccggggtgagagagggagctacaacgcggagtgactgctataagcatcgcatttgattgtagatcatccggggtgagagagggagctacaacgtcgagcataacactatggaaacagaacttattgtagatcatccggggtgagagagggagctacaacatgattatcgacgcatgggcaacccgatggattgtagatcatccggggtgagagagggagctacaaccctctgcatgacgagggtttaacttgattgattgtagatcatccggggtgagagagggagctatcctacttctagattagcgtaatggatatataaaaaaagcgactgtgcatagtcgctttcatggctaagatttgagggtttatgcacaaccgcagcctcttcaccatagaaggacaaacgcccctcaaaattaaatagcaaatattacgcctgataaacctttttccaaaatcccagggagtgagtttttatcttaacgtgcaatcggtttgtagcggatacgcttgggtttggcgccttcttcacccagccgttttttcttgtcggcttcgtattcctggtagttaccgttaaagaaggtccattgcgaatcaccttccgctgccagaatatgcgtcgcaatccggtcgaggaaccatcgatcatgtgaggtcaccagtacgcaacctgcaaactccagcaaggcgtcttctaacgcacgtagggtttccacgtcgaggtcgttggatggttcatccagcagcaagacgttggcaccagaaatcagggttttggccaggtgtaaacggccacgttcaccgccagaaagctggccaacgaccttttgctgatcaccgcctttgaagttaaaacggccaatataggcacggcttggcatttcaaacttgccaacgttcaacatatccaggccaccagaaatcacgtcaaacaccgttttgctgtcatctaagccttcacgcgactggtcaacggctgccagcttgacggttggccctgtgataatttcaccgctatccggctgctcctgaccttgcaacatacggaacagggtggatttaccggcaccgttagggccgatgacaccgacaatcgcaccgggcggaatgctgaacgacaggttatcaatcagcagacggtcgccaaagcctttagagacattattaaactcaatgacttgattgcctaagcgctcgcctggcggaataaaaatctcctgtgtttcattgcggcgctggtactcaacactggacatttcttcgtaacgggccagacgcgccttgctcttgctttggcgtgcttttgcaccctggcgcacccattccagctcttgcttcatggctttgcggtgggcatcttcctgtttctgctcttgtgccaagcggtcttctttttgctccagccagtttgagtaattacctttccatggaataccttcgccacggtccagttccaggatccactcagcagcattatcaaggaagtagcgatcatgggtaacggcaaccacggtgcccgggaaacgcaccaggaactgttccagccagtccacagactccgcatccaggtggttggtcggctcatccagcaacagcatatccggtttggagagcagcaatttacacaaggccacacggcgcttttcaccgccggacaatggtccgatcacggcatcccatggtggcaggcgcagcgcatcggcggcaatttccaactgttgctcgacatcgctgccgctggccgcgaggatattttcatacttggcctggtcttcggccagtttgtcaaaatcagcatctggctcggcataagccgcgtaaatctcttccagcttttgcttggcttccatgatggcacccaaaccagcttcgacctcctgacgcacagttttgtccggatccagctgaggctcttgcggcaaatagccgatggacaaattaggctgccattgtacttcgccttcgtactctttatcggcacccgccatgatgcgcaacacagtggatttacccgagccatttaaacccagcaggccgattttggcacccgggaaaaatgacaaggagatatttttaatgatttgccgtttgggcggcacgattttgctcacgcggagcatggacatcacatattgcgccatgagaaattccgggacggtgattgaaagtgcgtattttaatacgcgcggtcaaaattagcttgtagataaaagtattcgacatgaaaaaagggcctttcggcccttttttattttgccatcacttaagcggcggcacgttgttcaataaacgtggtgttggcttgtgcttgtgtgccgatctcgattttgcgtggcttcaaggcctctgggatttcacgcagcagggcaatggttaacaggccgttttcaaggttggctccggtcactttgacatggtcagccaactggaacttgtgttcaaaatcacgcgtggcgataccacggtgcaaaaaggtggtttcctgctcccttttcgctttgcggccagtcacacgcaaagcctgatgttcggtttcgatttccaactcgtcctgctggaacccggcgacggccatcacaattttgtaggcgttttcgtcgaccagttcgatgttataaggcggatagctgatttcgttttcactacgctggttttcgttgagcattttagccaaacggtcaaaaccaatcgcggttctgtagaaagggcttaagtcataagtacgcatgggttgatccttttaaaaataaagcgattaacatgattcacagaccttaaactgcaagcatctgtatgttcaatatgggaattcgctttattttttcaagggtcagcggactaaatacccaaggtctccgtccaggccaaggcatccatatgacactggttcactttgtctggattcaattgcagcaaggatgccagttgcaagatttcttcattattggcgtcttcgcaagcttcagtcagtttgagaaacggcccaaaaataccttcacgtttggtcaaggcatccacaatcggctctggcagttgcagtttctccagtacattatccatcggcactttcagcatcacatccagtaatgaaaacacaccgaccacaaataaattgtcacggtcacgcttatcaaaaaagggctcacctaacaactcggtcaagcgtccacgcgtgatcgaagttttcatcagggcaggggagctggtgttattgcctgccgtcaccatcaataacgttaaccagcgatagagctggttacggcctaaaatcgtcaaggcatgattaatggactgcacctcgcaggacaaaccaaaaccaaccgagttaatgtaacgcagcagtttgtagctcagggtggtgtctcgcttaaatccattttcaatggttttgttgtctgcttcctggctcaccaggttcaataaatgcagtacgccatcaaagctggggttaatgaccttgctgttgaggttttccggtttagcgtaaaaatagccttgaaactgctggtagcctgcgtccagcaagctgctgaattgtgcattttgctcaactttttctgcaattaagctgcaaccggaagcctgatattttttcagccacagcgtggcctgggcaatatcgacgtcacgcatatccagcttgatgtaatccgcatatggaatcagcgcttccagctgcgggtgatgttgcgggttatccagcgcaattttgaatttatttgcctttaactcaccgcagcgcgcgatgatttcaggcgtgacttgcacggtgtgcacaacctcaagcactgttttttctgccggcatcaactccagaaatacactgttaagcatgacatgatcaacgttgataaaagccagttgctgccccaacagccagctttcgtgcatctcatcaatcgtggttgagaggattttggcgcaggtttgaatatcctcttcaaaaggcgcattgctgccattgctatcgttcctgaaaaagaactcatagccgataatctgttgttgactgttaacaatcggctggcggccgataatactgtgttgcgacgtggtcatgactgccttcctgatgagcatctaagatcagtataagggaaactggtcgttttcttattcgaaaaaagccccgattatcggggctttttaggtctttatcgcttattctacggtcacactcttagccaggttacgcggtttatccacatccgtgcctttaagcaaagcagcatgataagccagcagttgcaccggaatggcatgcaaaataggcgagagtacacccacatggcggggtgttcgtatcacgtgtacgccttcagactctttaaagtgactgtcggcatcagcaaacacaaataactcgccaccacgtgctttgacttcctgcatattggattttactttttccagcagagcgtcgttaggggcgatgaccaccaccggcatattgctatcaaccagtgccaacgggccatgtttcaactcaccggccggataggcttcggcgtgtatgtaggaaatctccttgagtttgagcgcaccctccatcgcgatcgggaagtgcacgccacgtcccaggaacaaggcatggtctttgtcgccgaaacgatgtgcccattcacggatttgcggttccagattcaacgcaatctgtacgccgcctgttagctgacgcagatcggataaatattgctgctcttgtgcctgactgagtaagccacgtgctttgcttaatgttactgccaacacaaatagcgcgatcagctgtgtggtgaacgccttggtactcgccacaccgatttcagcgccggcacgggtgtagaaaatcaatgatgaagcgcggggaatcgcactttcctgcacgttacaaatcgccaggctgtgcgcgtggcccagtttctgcgcgtgcttaagcgcttccatggtgtccagcgtttcgccagactgcgaaatcgtgactatcagctgtttaggattaggcacagattcacggtagcggtattcactggcaatctccacggaggtcggaatttttgcgatgctttccaaccagtattttgcggtgaggccggcgtaataactggtgcctgccgccaggattaatacactgtcaatttgagaaaatacggcagccgctgattggccgaacaactcactcctgaacgcgccatcgtcaatcagggcttcaatggtgtcactaatcgcacgtggttgctcatggatttctttttgcataaagtggctatatgggcccaactctagtgaggccagtgacacatcactcatatgcactttgcgttcagccacttcgccacgtttgtctacaatcaccacggcatccgtctgcaaagtagccacatcaccgtcttccaggtagattactctacgggtcgcagacaaaacagctgagacatcagaagcgacaaaattttcgccatcaccgaggccaatcaacaaaggacagccgagacgggcaacgaccatttgttgggggtgctccaaagcaatcacgctgattgcataagcgcctgtcagctctgcaatcgcctgtttgaccgccgtgaacaagtcatggctttgctggtaataataatgcaccagatgggcaatgacttcggtatcggtttgtgaataaaactgatagcccaaggcctttaaacggtcacgttgttcgtcatggttttcgataatgccattatgtaccacggcaatttgcgcctggtcttgcccaggggagacatgcgggtgtgcattttgctcggtgacgccaccatgtgtggcccagcgcgtatggccgatgccaacatggctatgcatgccttgtgcttttaactgcaactcagccacgcgaccaaccgcgcgtgcgcgctctatggtttgattaagcacggcaatcccggccgaatcatagccgcgatattcgagcctgcttaagccctcgatcaggagtggaacgatatttctattggagaccgcaccgacaatgccgcacatacgcttattttttcaccttttgtggacgtttccatccctgaattgaccgttgttcccgcgcacggcacagcgttaagctatctgccggcacatctttggtaatggttgagcctgctgcaatcgttgccccacggcccacagtcactggcgcaactaattgggtatcggagccgacaaacacatcatcttcaatgacggttttatgtttgttcgccccgtcataattacaagtgatcacaccggcaccgatattcacattggcaccaatgctggcatcaccaacataagtcaaatggttaactttgctgccgacgcccaccgtggcatttttgatttcaacaaaattgccgacatgtgtctctgcggctaactgcgtaccagggcgtaaacgcgcaaacgggccgactctgctgcccgcgccgaccttggcatcatcaatatgcgtaaatgccgccaggcgtgcgcctttggcgatcacggcatccttaatcacgcaatgcggaccaatctgtacatcatcttcaagcgtgacctgaccctcaaagacacagttcacatcaatcaacacatcgcggccgcattgtaatgcgccgcggatatcaatacgctgcgcatccagcaaggtcacgccttgtgtcatcagaacatttgcctgacgcagctggtactcacgctcgatttgctgcaaatcgagtttggagttaatgccggtgaccgaccaggcatcggcgaccacatgaggcaacaccgcactgccttccttgacggagagggcgatgatatcggttagataatattcctgttgcgcattctggttgctgatattagccaaccaatgtttcaactgtgcattcggcatcgccataatgccggtattcacttcctgtatcgcgcgttgcgctacgctggcatctttatgctcgacgatcgcgacgacttcgttgttgtcattacgcacaatacggccataaccgctggggtctgccttgataaacgtctgcaccaccaggtgctgatcggcttgcgtcaacatgtcacggcaagccgccacatcgaccaatggcacatcccctaaaagaatgagtgttttaccatgttcaggcaaggtgggcagggcttgttgtaccgcatggccagtgcccagttgttctgcctgcaatacccattgcaggtcatcgcctggcgtctgctgctgtacttgttcgccgccaaagccatacaccaccgtgatggtttgtggatttagctgacgtgccgcgtcaatcacatgatgcagaataggcttaccgcccaccgcatgcagcactttgggcaggtctgatcgcatgcgtgtgcctttacccgcggcgagaattacgatattcaaatcagtcatgctgttattttatctcagaaacaaaaaaggcggctcgaaagccgcctgttttattgccagactccacaggaatctagtgcacagatttacgcaatttctggattgcctggatttgtgcgatcgcttctgccaattcagcctgggcagctgcgtaatcgatctctgaagaacggttacgcaatgcttcttctgcggcttccttagctgcgatggcttttgcttcatccagatcctggccacgaatcgctgtgtctgccagcactgttaccagtcctggttgtacttccagcatgccgccggaaatataaatcacagtttcttcttgctcggcagtttgcttgatacgcaatgcgcctggcttgatggtggtaatcatcggtgcgtgatgtggataaatacccacttcacctgcgccagctggtgcaaccacaaactcggcttcaccagagaagatggactcttcggcactcacaacatcgatatgcactgtatttgccataatgttctcttttctatatcactgaagatttgtgatgcaggcagatatttaaacccgcccgcacaaacaacgattagttcagtgttttagccttttcaaccgcttcttcgataccaccaaccatgtagaatgcttgctctggcaagtgatcgtattcaccagccacaatcgctttaaagcctttgatggtttctttcagtggcacgtatttgcctggcgcgccagtaaacacttcagccacgtggaaaggttgtgacaggaaacgttggattttacgcgcgcggcctactgccaatttgtcttctggagacaattcgtccatacccagaatcgcgataatgtcacgcaactc

SEQ ID NO: 2864 - DNA, 23393 bp, synthetic construct
  misc_feature 1..23393: note = Synthetic
  source 1..23393: mol_type = other DNA
ttcatcgtgatatttcggattcaaagcggcgcaccgaccttcgatctggcgcgatccaggccaggggacgccgcgcaagggccgccaagccgcgtacgcggcgcttcgctggcgtgcgctggcgttgtcccccttcccccagcgcgaagcgcgtagagagaagggggaagccgcgcagcggctcagggggttgtcgcctgatcatttcatttccacggccggtggtaagcacccagcgtgtgctgctggccttctgccacctggtccaggctggccatccagcgcgtcttgggcgcgtagcggtgggggtgggccaggcactggtccatggcctcgcgccagacctgggtgacctgcgccacatacgcggggctgcgctggcggccttcgatcttgatggcgcgcacgcccatcttgagcagctggggcagcagctccagcgtgttgaggctggtgggctcttcgatggcgtagtagttctcgtcatcccccacgtcgaaacgccccttgcacagcgtggggtagcccgcgttctcgccgggcgcatagcggtcgatgagcacgccgttcaggcgcgactcgcggccctgcggcgtctccacccagcgcacggccttcgggggcgagcacacgccgtgcgtgttgggcgattcgccggtcacgtacgacgacagtgcgcagcgcccctcgaccatcacacacaggctgccgaagccgaagacttcgatctcgaccggcgtgcggtcgatcacctggcgcacctgctccatcgagagcacacgcggcagcaccgcgcgcacgatgccgaactgctcgcggtagaagttgatggcctcgtagttggtagccgagccctgcaccgacaggtgcaggcgcagccggggatggcgctgcaccgcgtagtgcatgaggccggggtcggccaggatgaccgcgtccacgcccaggtccaccgccttgtccagtgcgctgcgccacgggccggggttgctggcctgcgggtaggtgttgagcgccatgaagaccttgcagccgcgtgcatgcgcataggcaatgccgttggcgatggcggcctcgtcaaagttgaggcccgcaaagttgcgcgcgttggtggcatcacgcaggcccaggtagacgcagttggcgccgtggtccacggcagctttcagggcgggcaggctgccggcggggcagacgagttccagggcgggggctgcagcctcgtcggcacgcaccgcctccatcgggttcaggggttgcatcacaaacattcaaacgccggccccgacagggagccacagcactgggcgcgaccatacgggggaggccgcacgcatccgctgatcttcatcaacggcagtgcacaatgccgcagcaatgcagtcgggttttgatgtgcccctaccttcccggtgcgccgccctgccgaccggccttgacttgcatcagtccaccctcccaacgccctaccgcacgccccgagcgctcccctgccgtgaacaagaacctgtggttgctggccctgtgccagggccttttcctgaccaacaacgttgtcttcatcgccatcaatggcctggtgggcctgcagctcgcgccctttggctggatggccacgctgccggtgatgggctatgtggtgggcggtgcgctgtccacaccgctggtggccaggacgcagatgcgctggggccgcaaggtgtcgttccagatcgggctggccgtggccgtggcatcggccgcgctgtgtgcctgggcggcgttcagcgcaagcttctggctgctgtgcaccgctacgctggtggcgggctactacagcgccaacggcggcctgtaccgctttgcggccgccgagctggccaagccggactaccgcgaaaaggccgtgtcgctggtgctggccgggggcctgctgggcgccgtggcgggccccaatctggccagcgccacgcgcaccttgttcccggtgccgtttgccggcgcctacatcgcgctgatcggcgtggcgctgttgtccatgctgtgcatgtcggcgatccgcttcgaagcccagccggtggtactcaacgcggcgggccagcgcgagcaggggcgccccttgactgtgctgctgcgccagcccgcgatggtggtggccatcctgggcgcggcgctgggctacggcgtgatgaacctgctgatggccgccacgcccctggccatgcaggtgtgcgggtttgactttgatgcgtccgcgctggtgctcgaatggcacgtgatcggcatgtttgcccccggcttcttcaccgggcacctgatcaagcgcctgggcgtgctgccggtgatgggcgcgggtgtggcgctgaacttcgcttgcgtggccgtggccctgatgggtgtggagctgcaccacttcggcatcgcgctcttcctgctgggcgttggctggaactttctgttcaccggcggcaccgccctggccatgacggcctaccgccccgaggagaaagaccgcgcccaggccgccatcaacttctgcgtgtacgccacgctcgcgctcagtgccttttcatcgggggtgctggtcaccacgcagggctggacgctgctcaatgcgggctcgctcgtgcccattgcggtgacaggcgcggcgctggtatggctggcaaggcatcgccgccgtgcggtgccggagacaccagcctgacaaacggacaaatgctatattatttatagctgctaacgcttgtcacacaagcgccggagcccatttttgctttgagtcacgcgggacaacgctgcaccagccaccgccggagcatgtcgaacaccggctcggccagttccgggctttcgttgaacagctcgtggtacaggggctcgaagcagtgggactgcaccacggccttgggcgctgccgcggcaaacgcccggctgccggcagggttgaccagcttgtcgctgcccgcccacagcagcagcgtgggcacgctccagtgcgcggcccgcgccaccgtggcgggcccggcggaggcgatgaagcgggccaggcgggcgctgatgcggtcgtggcacagcggatcggccaagtaggcggcggcaacggcagggtcgtgcgacaggtactgcgcgtccagcccgttgcctacccgcaggttgggtgcgacgtgcggcaaggtggccagcagcagcttttgcacggcgcccagccccgcgtcgagcgcgggggaagacagcaccagtgcatccacgggccgcatcttcagcgacacaaagcgcgacgccaccagcccacccatgctgtggcccagcagcaccaggggctggcctgcagggacgcgcgcccgggtggcgtccaccaggtcggcaaggtcgtccagcagccgcatgtccgacgtcagcccgccgcgcggcccggccgattcaccatggccgtactggtcgtagccgcgcgcggcaaacccccagtcgttcaggcggcgtgccagtgcgtcgtagcggcccacatgctcgcccaggccgtgcaccagcagcactgtcccccggcagggctcaccttctggcaagggccagtcctgcacggccaggttctcgccatcgctggcggtgaaggtggtcagggtcgagggcgcaagctcgtcgtcgtcgagggtcatggtcaaagggctgggtcggacaagggaacaaaacgcggatcaggcggggcgcaataccggggatgccgagcaagggccgccccgcagcgagggcatcgtcctccttcccgaagccgcgcagcgacttcgagcgaagggggggaaggcgcgcagcgcctcagggggttgtaaccgagttttccgccatggcggcaatcacatgggccaccgacgccgtaaggcgcttggcgtaaggcacatgcaaaaactcgttggggccgtgcgcgttgctcttggggccgagcacgccgcagaccatcatctgcgctgtggggaagccttcgctgagcatgttcatcagcgggatggtgccgccctggccgatgtagccgcaggacgtgccgaaatgcgcctgggaggcctcgttgagcgcctgctcgaaccacggcgtggtgctgggcgcgttccagccggtagcgccgctggtgccctggaaggtgaccttggcctggtagggcgcgttgtcttcgagcagggttttcagctcctgcacggcctgggctgcatccaccagcgggggcaggcgcaggctgagcttgaaggcggtgtaggggcgcagcacgttgccggcgtcctgaagcgcgggaaagccttcggcgccggtgacgctgagcgtgggttcccaggtgcgcttgagcagggcctggaccgggtcggtggtggtgggcagcgcgaaggtggtggagccgccgcagtcgtagtgcgcccagggaaagcggcggtagacctcttcgcccaggatggccgccgtggcgcgggcctgggccaggcggtctgcgggcacttcgcagtggaagctctggggcagcagacggccggtcttgctgtcttccagccggtcgagcacctggcgcatgatgcggaacgacgagggcaccaggcccgaggcgtcaccggagtggatgccctcggtgaggatctccaccttgagcgtgccagtggccatgccgcgcaggctggtggtgagccacagctgttcgtagttgccggcgcccgagtccaggcacaccaccagcgccacgttgcccatgcggggcttgagggcgtcgatgtagggcagcaggtcgcgcgagccgctttcttcgcaggtttcgatcaggcccacgatgcgcggatggggcacgttctggcgcttgagctcctgcacggcggcaatgctggcatacaccgcgtagccgtcatcggcgccgccgcggccgtagagcttgccgtcctcgtacttgggggtccaagggcccagatcgctgcgccagccagagaactcgggttgcttgtcgaggtggccgtacatcagcacggtgtcggtggcgccggcctgggtggactcgatctcgaagaacagcacgggggtgcggccttccaggcgcaccacttccagcttcagcccctccaccttctgcgattcgacccaggcggcggcgttgcgcaccacggtgtccagcaggccctgctcggcccagtcgggcgaaaacatcggcgacttggcggggatggcgatgtagtcggtgagctggcgcacgatgtcgttgtcccaggcctggctcacccgctccagggcgagtgcaggttgcaggacattggggggaacacgggcgttcataaaaaggctctcctgaaaacgggtgatcttgtggaccgaaacctgcattccaacacaaggtctgtgcagacgccaacctagccgcacatgcccgcgctcagtaccgggatgccgcgtccgcgcccgaatagctgtcggcggtggcctgggatgcggggcgccgcaaggccgtggccacctccacgcggttgcggcctttttccttggcctcgtagagcgcccggtctgccgccgctatcagcatgtcccagctgtcgccgggctccaggcgcccaccgaacacgccgatgctcacggtgacggcaatggtctggccctccgcgctcgcagcacccgcgcccgcatcgccgctggtgcgaaccgggcagcgggattcttccaccgccctgcacaggtaccgcgccagctgctcggcgcctgccagcgtggtgtcggggagcaccaccatgaactcctcgccgccatagcggcccaccaggtcttgcgaccgcacgcgcgcactgagcacattcaccacactgcacagcacctggtcgcccacgggatggccgtagcggtcattcacgtgcttgaaatggtcgatgtccaccatcatgagcgcgatcgattcgcgggtgcgcacggcacgggccacgtcacggtccagcgcggcaatcagcgagcgccgattggccacccccgtgagcggatccagcgcggccatcatgcggttgttctcgtcggcgcggtcgcgtgacatgaacacaaaccctatcgagctgaccagcaccaccgtgaacgtggccacaaaggtgagggtctgcaggccgctgccctgcaggatgttcgtggcgcctgcgcccccctgcaaccccatggccagcaacgaccggcccagcaacaccgcgccttccagcgcaaacccggccaccagcagccactgcccgcgccccacggtggaccggcggtgctccagcgcgatggccatcgcccacagggcctgcagcccgatcatgagaccgacccagcccacccgcgccgcgaagttgtccatgaacacgatcaccagtgccgtaaccagcgccggcggcaccaacagcagcagccagcggggctggcgcccctggaactggtagatggcggcaatcatcgccacgaacacacaggaccacagcaggttgcccaccacgatggacagcacatccggtacccggccgcgcagcatgagcagcacatgccccagcgcgttgacgagcaggcccgccgcccagtagcccagcccatcgcgtcgtcgcccccagcccaccacggccagggaggccgccatcagcagcgaactgacgatgatcatcgccagcatggtgggaacgtgggcagccatgaaatgcagggacagcaaaggatggggggggtttcaggccagcataaaccaaggtgggcaaaaccggagccagaaaaattgcaccagcccccggtgcaacccgctgcggttccggctactcgctgccgacttcctgccgggccaggcgctcgctcttccagtacacatcgtcgccgccatccacgcggttgagcacgcgggcgagcacgaacatcaggtcggacaggcggttgaggtactggcgtggagcgtcgttgatcgcctcctcattgcccagcgccaccaccgcccgttcggcacgccgcgctaccgtgcggcacacgtgggcctgtgatgccgcacgtgtgcctgcgggcaggatgaattcctgcagccggggcagtgcagcgttgtgctcctccagggcctcatccagctgcagcacggcctctttcttgagcagttcaaaccccgggatcgagagctcgccacccaggttgaacaactggtgctgcacctgcaccagcaacccgcgcacggcgtcaggcagcggctcgcacagcaacaggccgatgtgcgaattgagctcatcgacatcgcccatggcgtgaatgcgcaggctgttcttggaaacccggtggttgttgcccaggccggtggtgccggcatcgccggtgcgggttgcgatctgtgtgagccggttgcccatggtgacctcgtgatggttatgtaatggcgcgaggagcgcgcacggtccgcgcggcccactcgggtgaatatgaccattgtggccgctgccagccaacacggtgattgctccggctaaagagccctcgccgccaccgggccagtcgtccggactacacatttcgccacaacccggccacaaaggttcacacgcgggccccacagcgttacaccgcgctggcaaatgttggcacgggcaacagcgggcaagagtgctggcgctgccagtgctgccgcggtgcaataaagccctgttcaacttcgaaggagcctggctcttatgaaagcactgcaacgacgcagctattcgttcgatacccgcagcgtgatgctttttgcggcccttgccttgggcggcgcggccgcattgcacgcacaaacggcaagcgcatccccccagttcggtcccggcggcaaaggcaacgcccagagcagtggctctggctacaccatcggcccggcccccgccaactccaaggcacccgccaccgcgagcgccgcgtccgcagcgttcgagcgggcggataccaaccaggacggccagctgagcgcgcaagaagttgcccgcctgccggccatcgtgcagaggttcaacgagctcgacaccgacaagaacggtacgctgtctcgcgaagagtttgaaaaaggagcacagtcctgaccctgcccggaaagcgccagcccgggccgccatgccctgccgacgccttccccccgtagacgggtgctagcccgtgaaggcctgtctgcgctggaactccagggcgtggacaggccttcgcacgttccaagcgtcgcgcagtacatccaggtggtattctttttggccctttccggagacatgccatgaacgccccgaccgccgccgcccacctcctacccgagatccacctgcgggacgtgccacaggccctcatcgacgggctgcaggcgcgctttggcgcgcagtgctccctggcccaggcggtgcgcgagcagcacggccgcgacgagggctcgctgcaggccccaccgcccagtgccgtggtgtttgccgaaagcacgcaggacgtggccgatgtggtgcagctcgccagtgaatatgaagtgccggtgatcccctacggcgcgggctcgtcgctcgaaggccatctgctggccgtgcagggcggcatcagcatcgatgtgagccgcatgaatcgcgtgttgagcatcaacgccgaagacctcaccgtgaccgtgcagcccggcatcacacgcaagcagctcaacgaggccatcaaggacacgggcctgttcttccccatcgaccccggtgcggatgccagcattggcggcatgtgcgctacccgcgccagtggcaccaacgccgtgcgctacggcaccatgcgcgagaacgtgctggcgctgcaggtggtcaccgccggcggcgaagtcatccacaccggcacgcgcgccaagaagagcagcgccggctacgacctaacccgcctgatggtgggcagcgaaggcacgttgggcatcatgaccgagatcacggtgcgcctgtacccgctgcccgaggccgtgagcgctgccatctgctcgttcccgagcattgaagcggccgtgcgcaccaccatccagaccatccagctgggcgtgccgattgcgcgcgtggagctcatcgaccaccacaccgtgcgcatggtcaacgcacacagcaagctcaccctgcgcgaggaacccatgctgctgatggaattccacggctcccccgccagcgtgaaggagcaggccgagacggtgcaggacatcgccagcgagtttgggggcaacgcgtttgaatgggccagcacgcccgaagagcgcacacgcctgtggacagcccggcacaacgcctacttcgccgccgtgcaaagccgccccggctgccgcgccatcagcaccgacacctgcgtgcccatcagccgcctggccgactgcctgctcgactcggtgcaggaggccgaggacagcggcatcccctacttcctcgtcggccacgtgggcgacggcaattttcactttggctacctgcttgaccccaacatccctgaagagcgcgtgaccgctgaagacctgaaccacaagctcgtggcccgcgcgctgagcatgggcggcacctgcaccggcgagcacggcgtgggcctgcacaagatgggctttctggtggatgaaaccggcgctggcgcggtggacatgatgcgggccatcaaacgtgcgctggacccgaagaacatcctgaatccggggaagattttttcgctgtagtcgcaggttgaatgcgctcagggcggaacgctatgttttttatagctattagcgcttgtccaataagcgctggacgccgttttgactaggattttctcctcaaaagcaccgcagcttttttaaagagcgccgcttgcggcgcttttttcatgccctttgagccttcacgtcggcgaatagcaagggagcaaggctcaacttagagatacattttttgacaaaagcctgcgaacccagacaatgaaaaagcctggcaggttgccctgccaggcttttgggtacggacggggcctttcgacccctccttattgcagcaacggctctcaccccggataactacaaacggtgcgagtgtagcagggagaccacatgaatcaagcggcaaatgacacgcctcccatcaatcaatttcttacgctgggcctggacattggcattgcttcggtcggttgggccgtcttgaacgaggcacgcattgtggacattggcgttcgctgcttcgacaaggcagagacggccaaagagggcgagtctttgaacctggccaggcgccaagcccgccttttgcggcggcggctgtaccgcagaagctggcgcctaaccaagctggggcggctgctcaaacagcaaggcttgatcgatagcgctgcgtttttcaaacagctgccatcggcttcggtaaccacctggcaattgcgcgttgaggcgctcgaacgtttgctgtcaaaccaagagtgggctcgtgtgatctatcacctgtgcaaacaccggggattccactgggccagcaaggccgaagagatgcaggccgaaggggatgccaagggcgaaggcggccgcgtaaaaaagggcctggccgacaccgccgcaaagtttgccagcaagggctatcgcactgcagcggaaatggtgctggccgagtttccgcacgcccagcgcaacaagcgcggtgaatacgacaaggccctttcaagggtcctgctcgacaaagagtttgcgctgctgttcgagcaccagcgcagatttggcaacccgtacgccagcgctgattttgaagcgcgcgtgcgcggcgacggcgaccgcaagagtggcctgttctggaaccagaagcccgcattagcgggcgcagacttgctcaaaatgctgggccactgcacctttgagaaagccgagtttcgcgcccccaaggccagcttcaccgcagagcgccatgtgtggctgacccggttgaacaacctgcgcgtgatagtggacggtgcatcgcgtgctctgacgcaggacgagcgcgcattggcgctgctgctgccctaccagaccgagcagttcaagtacaaaacgctcaagactgcgctcgtcaaggccggtcacatacccgacactgcccgatttggcgggctggcctatcccagcgaggcacaaaaggaagcaggcaaaaccaaagaccccgaagaccagcctttggtaaagctacccgcttggcatgacttgcgcagagcgctgaacaaggcagggctgcaagacgcttggcggcagatcagcgtggcagccttggacggacggccgcagtggcttgacagcgttggctgggtactcagcgtgtacaaggacgatgccgaagtggagcgcgaacttgccgccctggcactgccgcaagcgcaggccgtcatacccgttttgttggggctgcgctttgacaagtttcacgcgttgtcgctcaaagcactgctccagatcgtgccgcacatggagcgtggtttgcgctacgacgaggcggtcgcgcaaatcggcgactatggccaccacagccagcgcgtggtgctgggcacgggcacaaatcgctacctgccgtcgttttacaaggacgaacgcagcagcaccggctccatggtgttccgcgatgacatcgacgtgccgcgcaaccccgtggtgctacgagccttgaaccaggcgcgcaaggtggtgaacgccatcatcaagaagcatggcagcctgtccgcagtgcacattgaaatggcgcgagatctgtcacggccactggatgagcggcgcgaggtcaaaaaactgcaggaggaattcagagatcgcaatgacaaggcgcgagagagctttgaacaagaccatggctatcgtcccaagggcattgtttttgaaaagtggatgctttaccgcgagcagcatggcaagtgtgcgtactcgctggaaggcctagacattgatcgcgtgctcaacgatgccaactacgcgcagatcgaccacgcgctgccctactcgcgcagctacgacgacagcaagaacaacaaggtgctggtgctgacgcgcgagaaccagaacaagggcaaccgcacggcgtatgagtacctgaccagctttgctggcggcgaggacggcgaccgctggcgcaactatgcggcgtgggtcaacagcaacaagagctaccgcatggccaagcgcaaccgcttgcttcgaaagaactacgggccagaggaggccagcggctttaaagaccgcaacctcaacgacacccgctatatctgcaagttcttcaaaaactatgtagaagaacacctgcagctggcaccgcgtgccgatggcaatgccaacaagcgctgcgtggtggtcaatggtcaactcacggccttcttacgcgcccgatggggcctgagcaaggtacgcagcgagagcgaccgccaccacgcgctggatgccgccgtggtggccgcctgcagccacgcaatggtgaaagccctggccgactacgcacgcaatcgggaagtggcttacctgaaggagggattccctgacccggaaactggcgagatcctcaaccccgaggcccatgcgcgcggtgtgcagcactttcccgaaccctgggcgcacttcaggcacgagctgcagacgcgcttgtacacggacgaattgcaggcgttgcgcgaggatttgcaaaggctgggtacgtattcagcgcaggacctgctggaggtgcgcacgctgtttgtgtcacgcgcgccccagcggcgaaacgatggcgcggcacacaaagagacgatttacgcccagcctgaaagcctgcgcaagcaaggcggcgtggtgcagaaagtaccgctagcaagcctgagcctcaaggacctggacaatctggcagacccgcaccgcaatgccaagctgtatgcagcgattcgcgcacgcctggaggcccatggcggcaaatcggacaaagcgtttggcccagaccaaccgttctacaagcccggcaagagcggcgaccccacaggccccatcgtgcgcaccgtcaagctggtgatcgacaagctcagtggcattcctgttcgcggtggtattgccaagaacgacaccatgctgcgtgtggacgtgttcaccaaggcgggcaagttccacttggtgccggtgtatgtgcaccatcgggtgactggcttgcccaaccgggcaattgttgcgttcaaggacgaggaagagtggacgttggtggatgagagttttgagtttttgtactcgttgtttcctaacgatctcgttcgcgtccaacaaaagggcaaagcggcactgacgggctactttggcagttgtcaccgaggcacgggcaatatcaacctgtggctgcatgaccgaaatacggtgagcaccaaagtgggagcgatcgaaggcattggagtcaaaaccgctctatcttttgagaaattgaacgttgatgtgcttggtcacatccacccctcccgtccggagcagcgccatggtctggcgtagcgtcatcgtcagcaagcccgccaagctcaagcgcgagcatttcgcgctggtggtggagcaagagcaatcggcccgcgtaccgtttgaagacatcgcggtgatcgtgctcaaccaccgtgaaattacgctcacgcaccccgtgctctcggcctgcgccgaatacggcattggcatgtacagcacgggcgacaaccaccagcccaatggcgtgttcttgccctttctgcagcacagccgggccacccgcatgcagcgcctgcagctgagcattgacaagcccaccgccaagcgcgcctgggccaccatcgtgcaaagcaaaatcgacaaccaagcccggtgcatgcaactgctggcggtggccggagctgaccgcctggcttcgtatgcgcgtcgggtgcgctcgggcgacaccggaaatatggaggcgcaagccagcgcgtactactttccgcaactgtttggtcgcagcttccaccgcagccaagagggctggatcaacgccgcactggactatggctacgccgtgatgcgtggtgcctgtgcccgggcgctggtcgctcatggcttgctgcccagcgtggggctatttcactgcagcgagcaaaacgccttcaacctggctgacgacctgatagagccctaccgcgccatagtggacttgcacgtggcgcaaacctgcgctgctgagacggacggtgaattgcgacccgctgacaaggtagccctggtgggccttctgaacgtagacgtggccatgccgcggggacgtatgagtgtgctgtcgtccatagagcaagcagcagagtcgctggccaggctgctaaatggtggcagcgagcaggtgcttgagctgccaacactgataggcctgacccagcacagctttgagatgtagccgtagcagaacttcaatatcgccaccatgggccaggccacgagacgattcatgcgcatgatggtgttcttcgacttgcccgtggtgaccaaggccgaacgccgcgcctacaccgtgttccgccgctttttgctcaacgacggctacgacatgatccagtactcggtgtatggccgcatcttgaacggcagcgacgccgaagagaaacacatgaagcgcttgctcgcgaacctgcccccagaaggctctgtgcgggtattgacagtgaccgaaaaacagtttgccagcatgaagatgctggtcggactgccgctgtttcaggaaaaaaaggtgaatgcagcccagattgcgctgttttgaaaagccgtttttcaaaacggaaacccgctccaagccaggcctggagcgggtttcaagggggccagagtgtagctatccggggtgagagagggagctacaacagattgccgctgccatccgcgcaaggggcagagtgtagctatccggggtgagagagggagctacaacaggcgaacgatcttgttcacgatggcctgggagtgtagctatccggggtgagagagggagctacaacacgttgcggagtatctggaccagcgccgccggagtgtagctatccggggtgagagagggagctacaacaacagcggcgctggcgagtttgacgacaacgagtgtagctatccggggtgagagagggagctacaacgctgacttgagcgtttcgccacttgagccagagtgtagctatccggggtgagagagggagctacaacgaacagcgcgtgctggcccgcgtcaacggagagtgtagctatccggggtgagagagggagctatggcctcggtttggcgggtaaacccaccaaaccgaggccagcgcttcgcgcggtcaatcaaaaacagcttcgcgtctcacgctcctttgccccgatgaagacattcatactctcgcaatggccaataccctattgctcttcattgccacggccctcgccgaaatagtgggctgctatctgccctggctctggctcaagcacggcaagccagcgtggctgctgctgccggcggcgctgagcctcgcgctgttcgcgtggctgctctcgctgcacgacaccgcaggcgccggccgcgtctacgcggcctatggcggggtctatatcggtgtggcgctggcgtggctgtgggtggtggatgggatccggcctacggcatgggacgtggcaggggtgctggtggcgctggcgggcatggccatcatcatgctgcagcctgcgcgctgagcacaaaaaaagccgctgcacactgcgcaaccggtgcgaccctgttccgtgccccagtacagcggacgtgaggccgctgaaatggccacacatattcacggccactgggagagaagtctgcgcaggggcgccgggctcagttgagttttatcaagcgccagtcaatccggttgtccggccgctgcaccagctccacgtttttcttcatggcccacgccagcatctggttgtgcagagggatgtgtgccacggtgtcgttctgtagctgcaggccttcggtgagcaagcggttgcgcacgggcaggtcggtttcggtcttcacacggtccacgatgtagtccatgcgttcattggtgtagcggcccaggttgtagttgccgtcgccgcccgtggtcttggtgcggacgagtgattgcagggtgtacagcgcatcgaacgtgggcacaccccagctgagtagcgcaatgctggcctcgtgccgctgtgccatggggtagtaggtgacagcgggcagcgtgcgcagccgggccttcacaccaacgcgcgaccacatggaagtgatggcctggcacagctcttcgtcctgcacgatggcgttgttgctgcaggcaaagtccacctcgaagccgtccttgtagcccgcctcggccagcaatgccctcgcggcgttagcgtcgtacggcaggcgctggtccacggcttccgtccatccgttcaccagcggcgacaccatggcgcccgtgggcttggacacgccgcgcatggtcacgcgctgcagcgtggcgctgtcgatggcctggtagagcgccttgcgcacgcgcaggtccttgagcgggttcttgcctttgatgttgccgccgggcagctcgtcgcggaactggtccatggccaggtacaccgtacggttctccaccatctccatgaccttgagctgggggttggccttgatgcgggccaaatcctggatgctggtgtcgcgcaccatgtctacctcgcccgacagcagcgctgcgatgcgtgtggcttcggatttgatgggggtgtaggtgatctcggtcacgttgccttcggccttgcccgcgttccaccaattggggttggcggtgaacacgatcttctggtcgggcacccattccttgagcacaaacggcccggtgcccatggcattgcggtgcgaataggtttcgtccttggccttgatgtccttgggctccaccgaattgttcttctcggcccaggccttgctcatcacgcgcagctcggtcaactgattcagcaacacggggttggggttcttcaggaaaatgtcgatggtctcgccatccaccttggcgatgcggtccatgccctgggtgtagatggaatacgtggaggtcttgctcatagcgcgctgcagcgaatagaccacgtcgtcggccgtcatggtcgagccatcactgaacttcaccgcctggcgaagtttgaagcgcatttgtgtgggcgtgacctgctgccaggatgtggccaagagcggctcgaccttgagcgtgcggctgttgaacatcaccagcgactcgtacaccgccgcgtggatgccgttgcccagggcgctgttttgcgagtggatgtccatggtctggatgtcgctggagcctgcccacttgaagggttttgcccaagccatggtgggcaccgtgcatgtcaaaacagccgccaatgcggggactgataaccgcgagaaacgatgaaaacgtaatggcatacaaacctctaagttgttggtagcacgcaatgtgcaatacctcccctcttctgcggatatggaaatcccttggatggtgttcccacggcacgaggagagggcaaacaatgtacatggcatgccaaccaaccgaggaggaaaacggtccattacatctcttacatcgccaccttggaatgcacggccagaatcactggccccctctgcacaactccaatcccacaatgccagagccaaccctccgcgctgtctttcgactggccgccgttgtcgctgcttcacttctcctagctgcgatgaccacgctgggctatctctttgccgtagaggactacgtgacgcggcccggctcgcccgtgtactacctgggcatctcatcactggtccgcgatgtccaggtgccggacggcgcacagggccgcgaatacttcggctcggtcggtgatgggaacaagccggcccaatcgcaattgagcttcaaggtgccgcctgacaccgccgatgcggtgtgggacgaaatgacccggcaactgcaaaacttggccctgcactccgtcagcaccggcggcaatgacccgacggtggtcagcaacaagaacaccgtctctccgggaatcagggaggcgcaatacacctccgaaaagcacgatttggtcctgttgactacctaccaggacagtgatgcgggcgccccgtcgatccgctttgaaatcactcactttgattgattcgtcccaagacacagccctcccacaaggggcggccttcttcttcaccacttcctcgttgaacatccatgtcatctcgctctgacattcccaatcgcctcatctacacgtgcaattgcggctggatcgatataggtcaccttgtgtcggtcgagtaaccggcaaaccgccatgcgagcgccgcctatctatggaaggacgtgtcgctggagcgtggcttgcaggtcaccgggcgtccggaccaccatgtggtgatgtaccggcagggaatgcgcaaattcggcctctcgcgcgatttcgcgaagttctatttcatccgcaaggggctgccgctggccacccagcgatctgtggcgctggccatcttcaaagaagtatcgatgggatttgaggatgtccaggcctcgctctccgccttcacagacagcggcttcagcgaagaagatctcgtgtcaaaccttctcggcttctacgtggcagttctgggcaatgtcgattggcgcggccactgcaaaccggtgtcggccgaagcttcacgcgtcgtgtgggacaccctgggcccagtgggttcacgcaagaaccaccaatttgttcccaagctgcatgcctgcgaagaatgcaaggcgaagcaccacatcacccggccgcattttccacccatcttttcgtccatccgtcccgcccagcaaggcgcggacttcttcgaggcgacggatgccacgcccggcctgcctgcctgtgccgatgcacatgttgtccaccttgttcatctgaagcgcccgcgcgtctataggcgttttcgcccgctttcgcggcaggatcgcttcccttcaccgcttcgaggtcgggtagcgcacaccgccccgctcggtccccacctgcaacaggttgatcacccccatcacgtcgtccaccagccacacggccttctccagcgcttcggcctgttcctgcgagcgcacgcagcccatcagcgtcaccagccgccgctctcccagcacccacacgctggtgtcgtcaaagcgcccgtcctgctggatgtagcgctgcacgcgcgggatgatctcggcgtcgtacaggtaggagttgggcagacggcagcgccccacgcggtggcagctgccgccgtgctgtgagcgcacatgggccagttcgcgcacctcagcctcggtgtacagcgggccctccggcacggggcattgcggcagcgcgcgggtgacctgcacgaacgggtcgttgaaggcgttggtgcgcgggggcgggctacctgcagcctgggcccaggtcagcagtggccaaaggacagcggatgtccccagcatgaaacgcagaaacctgcccacatcgcgcatggtgtgctccctgaggtgcccggccggtgacgttgcacggccacgatctggtaccgcaagacaaagcggttttggcctgcagacagcggggctgtgcgcaggatgatgagcatagcaacgcgtaatcggcagtaaaggtgatcgccgtgtgttgctccgttattgatagctgttagcgcaatatgggtatgcgctggaggttgtttttattcatattctcgacgcaaatgcccgcgccgcaaaccccggaccccaccccggcttttgcgtgccgcctacgatgcttccttgcccatgcccagcagcgacctgatcgtccaccgccccgaaggcctgtactgcccgcccggggacttctacattgacccgtggcggcccgtcagccgggcggtgatcacgcatgcgcactcggaccacgcacgcatgggctcggcccactacttggcgcataccgacagcgcgggcacgctgcgcaaccggctgggggcggacatcgcgctgcagacgctggcctatgccgaggtcatcgaccaccacggcgtgcgggtgtcgctgcaccccgcaggccatgtgctggggtcggcacaggtgcgcatcgagcacgctggccaggtgtgggtggcctcgggcgactacaagctcgaagacgacggcacctgcccgccctttgagcccgtgcgctgccacaccttcatcaccgaatcgacttttggactgcccatctaccgctggccatcgcaacccgcgctgtttgccgacatcaatgcctggtgggcagccaacgcagcggcgggcaaggccagcgtgctctatgcctacgcatttggcaaggcgcagcggctgctgcatggggtggacgccagcatcggacccatcgtggtgcacggcgcggtggagccgctcaacgccgtgtaccgcgcggccggtgtggcgctgccgcccacgctgcgcgtgacggacccgggcctgaccaaggcggacctgaaacgcgcgctcgtgctggcaccgccctcggcagcgggcacaccgtggctcaagcggtttggcgaacactccgacgcgtttgccagcggctggatgctggtgcgcggcgcgcgccgccgccggggcgtggaccggggctttgtgatgagcgaccacgccgactggcccagcctgcaaaaggccatcggcgccaccggggccgagcgcgtcatcgtcactcacggcagcaccgaggtgatggtgcgctggctgtgcgaacagggtctggacgcgcaggtgttcaagactgaatacggcgccgacgacaacgaggacgacgccaacacaatggtcccttcggcccctgctgaggagccgggcacgcaacccgaggccgcgccatgagggcctttgcccagctgttccaggcgctcgacgccaccaccgcgcagtcggccaaactcgcggcgctggtggcttacctgcgcgtggcaccgcccgccgatgcagcctgggccacgtactttctggcaggcggcaagccgcgccagatggtgcccaccaagcgcctgaaagcgctggcgcaagaggctgcgggcctgcccgagtggctgtttgaagagagctaccaggccgtcggcgacctggccgaaaccttggccttgctgctgcccccgcccgcccagcccattgaactgactctggccgaatggatggcccagctgctgcccctgcgcaccctgccgcagggtgacgccgatacccggctgcgcacgcaatgggacatgctggcgcccgagcagcgctttgtgtacttcaagctcatcaccggcaacttccgcgtgggggtgtcgcgcctgcaggtgacgcaggcgctggccacggtgagcgcgctggaccccaagcgcatcgcccaccggctgatgggctacacgcagatcggccggcagccgcaggccagcgactaccaggcgctgatcgcgccggtggacgacgaggcaagcgcgcaggatgctgccgatgcaggccagccctacccgttctttttggcccacccgttcaaccagcccgtggccgagatgcccgcactgctgggcacgccaggtgactggctggtggaatggaagtgggacggcatccgcgcgcagatcgtgcgccgggacggtgcggtgtggatctggtcccgcggcgaagagctggtgaccgaccgcttccccgaactggccgaggccgcgatggagcagctccctgacggcacagtggttgatggcgagattctggtgtggctgccgggcgagccccagccccgcccctttgccgacctgcaaaagcgcctgggccgcaagacgctgacccccaagctgttgcgcgagctgcccgtggtgctggtggcctacgacctgctcgaacacgccgggcaggacctgcgccaagagccgcagcaggcccgccgtacgctgctggaggccacgctgcaacagcgtgatgacaccaccatcgcacccgcaccgcacaagaccttgcaactgagcgagttgctgcatggcgccgactggcaagacctggcacgccagcgcgaggccgcgcgcagcatgggcaccgagggcttcatgctcaagcaccgcagcgcccactacggcgtgggccgcaccaaggatgtgggcgtgtggtggaagtggaagatcgatcccatgagcgtggacgccgtgctcatctacgcccagcgcggccacggccgccgcgcaagcctctacaccgactacacctttgccgtatggaccgggccgcaggacgacccggaccggcagctggtgccctttgccaaggcctattcgggcctgacggatgccgagattgcgcaggtggacgccatcatccgcaagaccacgcgcgagagcttcgggcccgtgcgcagcgtggatgcgacgctggtgtttgagctgggcttcgaaggcattgcgcgcagcccgcgccacaagagcggcattgcggtgcgctttccgcgcatgctgcgctggcggcaagacaaacccgtggccgaggccgataccttgcaaacgctgatggcactgctgccggggcaggacgcggccatatgagcacgacacgccgcccgcgcaagcccctgcccccggtggcaccgagtgccgcagccgcctggatggcggcgcgcgggtggcagcccttcggcttccagcaagacgtgtggcgcgcgatgggcgaggaccgctcgggcctgctgcacgccaccacgggcgcgggcaagacctatgcggtgtggctgggcgcgctgcagcatctggcgcgggccgatgcagcaccagcgcccgaagaagcccccaacgcccgcaccgcgctgcgcacccgccgcgctgcggcaccacccctcaccgtgctgtggatcacgcccatgcgcgcattggctgctgattcgctgcgcgccctgcaggcaccgctgcccgacctcgcgcccgactggaccagcggcctgcgcacgggcgacacggccagcggcgagcgcgccgcgcaagaccgccgcctgcccacgttgctggtgaccaccccagaaagcgtctcgctgctgctggcccgcgccgatgcgcgcgagcgcctggccagcgtgcgcctggtggtggtggacgagtggcacgagctggtgggcaacaaacgcggcgtgcaggtgcaactggcgctggcgcgcctgtcggggtggaacccggcgctgcaggtgtggggcatgtcggccacgctgggtaacctggaggaggccctgcacaccttgctgccccagcccttgcccagcacggcggaagcgccacagccgccgcccgccgtgctggtgcaaggccgcatcgacaagcggctggaggtgcaggtgatgctgcccgcgcgggccgaccgctttgcctgggcgggccacatggggctgagcctgctgccgcaggtggtgcagtcgatcgaagcggcagcgtccaccttggtgttcaccaacacccggtcgcaagcagagcgctggt

SEQ ID NO: 2865 - DNA, 23390 bp, synthetic construct
  misc_feature 1..23390: note = Synthetic
  source 1..23390: mol_type = other DNA
cgcggatcggcacgctctccggcggacagaaaaagcgcgtggcgctggcccaggcgcttgcggccgcccccgatgtgttgctgctcgacgaaccgaccaatcacctcgatatcgcggcgatcgaatggctcgaagagttcctgctcgaaaaccggctgaccctgctgttcgtcacccatgatcggcgctttctcgatcgcttggcgacccggatcgtcgagctcgaccgcggccgactgaccagttatcccggtagcttcgcggcctaccgggagcgcaaggagcgcgagcttgccgacgaagcaaaggcgcagcagcgcttcgacaagctgctgaaggaagaagaagcgtggattcggcagggcgtcgaggcacgccgcacccgcgccgtgttccgcgtgcagcggctcgaacggctgcgcagcgagcgtgcagcacgacgtgagcggctcggcgcggtacgcttgcgcctcgatagcggcgataagagcgggcaggtggtggccgagctcgaacacgtcagcaagtctttcggcgcgcacacggtggtacgcgacttctcctgccgcatcctgcgcggcgaccgtgtcggcatcatcggtccgaacggcgccggcaagaccaccctgctgcgcctcatcctgggtgaggtcaagcccgacagcggcacggtgaagcgcggcacgaagctcgcagtcgcctatttcgaccagttccgcgcccagctcgatcccgaggccacactcgccgacatcatctcgccgggttcggactgggtcgagatcgccggcgcaagaaagcatgtcgtcggttatctcggcgacttcctgttcgcgccgcaacgggcgcgctcaccggtgaaatcgctctccggcggagaaaagaaccgcctgctcttagcgcggctgttcgcgcggccggccaacgtgctggtgctcgacgagccgaccaacgatctggacatcgaaacgctcgacttactcgaagacctcttgcaagactatcccggcacggtattcctcgtcagccacgaccgtgtcttcctcgatgccatcgtcacccagaccatcgccgccgaaggcgacggcatctggcacgaatatgccggtggctacagcgactgggcggcttaccaaagccagcgcaaagagtccaaggccgaaacacaacgcgaaccgacagcgaagtcggtgctggcgacacggcacgaaaataaggcaaagcccgacaaactctcctggaaggaacgacgcgagctggaagccctgtccgagcagatcgccacgctcgaaaccgaacagcaggcactggccaaacgtctggaggatccggcactgtacgacgagccacaacaggcgcaagccgtcgcgacgcgcttggccgaaatcgacgacgaactgctggccatgctggagcgctgggaaaacctcgaaactcgactaaagtgatatggcaggattttttccgtccagacggcaggcggaaagagggcatttcgggttctcgtcaatcccccccagccggacacggattccgcagcgcaacaaaacagcgctttccgcgaacgcccacgagtccgcacaacagactgatttttggcgctcttttttcgcacccgacctactagatctagtggtaaaaaattcttcgcctactaggaaagaatataactatctgattttcctgtgagcaaaaatttttttctttgatgtttcccgggttctcgttaagcttcggccttgcccgatttccgatcaacccaacccatccacggaccgaccatgacgatcgaacagaccaccgacctagacagcattggagaagcccaggaacacaccggccagctcggtcttctcctgccgcaagagatttccggcgaggttttgctcgaaaagtacgccaagggctttgagcgcaacgtccatgacgtgcgcgcccgggttgcccacgcgctggccagcgtcgaagcggaagaacgccgcgcctattggcaggagcgcttcctcgatgcccaggaaaacggcttcattcccgccggccgcatcaactcggcggcgggcaccgacctgtgcgcgacgctgatcaactgcttcgtgcaacccgtcggtgactcgatctcggaagtcgtggatggccgccccggcatctacaccgcgctggcgcaagcggccgaaacgatgcggcgcggcggcggcgtcggatacgacttttccagcatccgcccggtcggcgccttcgtgcgcggcacccattcgcgcgcttccggcccagtgtcctacatgcgcgtcttcgaccgttcctgcgaaaccgtcgaatccgccggcgcacgccgcggcgcgcagatgggtgtcttgcgctgcgaccaccccgacatcgaagccttcatccacgcgaaggatcatggtgatctgacgaatttcaacatctcggtcggcgtcaccgatgccttcatgcaagccgtcgaggccggcagcgaggtcgaactcgtgcatcgcgccgaaccgaccgacgagctgaagcaggccggcgcctaccaacgcgacgacgggctgtgggtctatcgcaaggtgccggcgcgcgagctgtgggaccagatcatgcgttcgacctacgaccacgccgaaccgggcatcctgttcatcgaccggatgaacaaggacaacaacctcaactactgcgagacgatcgaggccaccaacccctgcgccgaacagccgctgccgccctatggctgctgctgtctcggctcgatcaacctgacgctgttcgtgcgtcagccattctcggagactgccgacttcgattacgccggcttcggcaaggtgatcgaggtggcggtgcgcatgctcgacaacgtgctcgacgtcacccactggccgctgccgcaacagcaggccgaagccgcggccaagcgccgcattggcctgggcttcaccggcctgggcgatgcgctgatcatgctcggcctgcgctacgattccgacgaagcgcgcaagactgctgccaggatcgccgagttcatgcgcgaccgcgcctacctgacctcggtcgagctcgccaaggagcgcggccctttccctctgttcaacgccgatttgtacctgaccggcggcaatttcgcctcgcgcctgccgcagcacatcaaggacgtgatcagaaaacatggcatccgcaattcgcatctgttgtcgatcgcgccgaccggcaccatttcgctggctttcgccgacaacgcctcgaatggcatcgagccgccgttctcctggacctacacgcgcaaaaagcgcatgccggacggcacccacaaggaatacgccgtcgaggattacgcctggcgcctctataagcatctcggtggcgacaccaacgccctgcccgactacttcgtcaccgccctggaaatctcggccaaggcgcatgaggagatggtcgccgcggtcgccccctacatcgacacctcgatctccaagaccgtcaacgtgccggccgactacccgtacgccgaattcgaggatctttatctggtcgcctggaaatccggcctcaagggactggccacctaccggccgaatgcggtgctcggcagcgtgctgtcggtcgaaccgcagcaaccggcccaggggcagaaagcccagaaacagccgcaggacgtcgtgatcgacggcgccaaccggcgcctgtcgatcggctcattgcccgcaccagtgcttgcctcgctgcgctggccgggacgtccgcgtctgcctgacggcaatagcgcatggacctacatgatcgagacgccgcacggcgagttcgcgctcttcgtaggccagatcgagaacgagaaacaccagcaggtgcctttcgaggtctgggtcaacggtaccgagcagccacgcggcctcggtgcggtggccaagaccctgtcgatggacatgcgcgccaacgaccccgcctggctgaatctcaagctcgacgtactggccagcacggtcggcgacgaacccttcgagatgcccttcccgccgcatggcgagctgaagctgatgcccggcacggtgtcggcgctggcgcaggtgatccgctaccgctgcgaacagctcggcgcgctggtcagcgatggctccacccccgtgctcgattgcatgttctcgcgcgacgagccgaagaccggtaccgacggcacgctgtcctggaccgtcgacatcgtcaatccggcctcgcgcgaggatttcgtgctcggtctcaaggaaatcacgctgcccgacggcgtcacccgtccctattcctgctggctctccggcaattacccgcgtgccctcgatggcctgaccaagctgctctcgctcgacatgcgcgtgatggatccggcgtggatcggcatgaagctgcgcaagctcctgaattaccccgagccgctgggcgacttcatggcacgcgtgcctggctcgaacaagcagcagaactggccctcgacggtggcctacatcgcgcgactgatcatccaccgttacgcgatgctcggtatcctcgacgagcagggcttcccgacccgcgaaatgggcatcctcgagcggccgagcgacaagaagggcgaactcaagatcactcagggatcgttgtgctctgaatgcggcaacatgaccgtgatccgcaaggatggctgcgacttctgcactgcctgcggcgcagtcggcacttgcggctagacatccggacctggcccgggctcacacctgggccggaaattctggtagatttgatgtccccgcgacactctcaaagcaatggcatccaaccgtggggatttttgggttgcgtcgtgagcacccagccgtcatgaacgcagcgacggcgaatggcatgcctggcatgtcgcatttccaattttttgattgatcgagaagcccttggagaacgaagacctttcctctccggtcgccgcgtccgacgcagccgtcgcggcgcccactgcacccaatgtggtcagcgcgtcacccccgcccccggcattcgatccgcgccgccgcatccgtgaattgctggcgattccggaacgcgaccgcaccgatgccgaatgggacgaactgaacgagctcgaaatccagaccgcaccgggcaaccgcatcggcaaccagccgccggccagttattccggcaagcctgccttccatgccaagcaccgtatgaaaggcaaggccaagggcaagcccggccagagcggaaaccggccgccgggcggcggaaaagcgcagaatcacccgaacaagccgcgccccgcataaagccgccgaggcggaactgcattcgcggtcgtggccttttgctgcccgcgctgcccaaatgaccgcgcccatcgccacgcgccctccaaccaccaacggcggacagctatggtggtggttgccgcgtctgtcgatcctgctgttccttgccgcgatcattacgctgttttggtatctcgaacgcagcgaccgcgaagagaaacacgcgacactgatcagcgatatgctgtggctcgagcagaatctgcgcttcctgctccaccacaacgaagacctgttcgggcgtttcgatccgcagcgcatcggacagcgcgaaaccttccaggcccacgtggcgcccgtcatcgccagtaattccggtgtcattcaagtgctctggctggctccgtccggagagagactggatgcctacccgcccgtttccagcgcgccatccaccgagactgccgtcgcgcaggccggcgtgcaacggcttgccgggtcggtggcccatgccgtctatggcccaccctaccccgtcggcggcgactggcgattcgaagtgcacgtgccgattttccatgccggagaactcgccggcatcgtcgtcggggtttattcgatcagccgtctgctggcggatggcgttccgtggtggatcgccgaacgttatcaaatcgcgatcgccgatccctcgggccagtcgcttggccagcgctccaacatcacggagatcgacaccgacaacgcttaccagatgcctttcgacccgcccggccacggtctgatcctgcatgcgatctcctaccgtagcgccacgccgatggccggccgggtgatcatcgcggggctgactttcctcgccgcgctggtgctgttcagcctgtggacgctgcgccggcacgtgcagggccggctggcggcggaaagcgcgctgcaaaacgaagtcgcgttccgcaaggcgatggaggactcggtgcagaccggcctgcgcgcgcgtaacctcgacggcatgatcacctacgtcaatccggcattctgccgcatggtcggttattcagccggcgaattgatcggccgccggccgccgatgccctactgggccgaggaatatctcgacgaaacgcgcgcgatgcacgagaaagtgctcgccggccaggcacccagcgagggtttcgagatcaagctcaagcgtcgcaatggggaaatcttcgatgcgttgatcatcgaagcgccgctgatcgacagccaaggccggcatactggctggatgggctcggtggtcgatatcacggagagaaagcgcgtcgccgagctggcgcgccagcaggaagaacgcttgcaggccagcgcccgtctgatcacgatgggtgagatggcctcgagcctcgcccacgagctgaaccaaccgctggcggcgatttccagttatgcgaccggctgccgtaacctgatcgcggccggcgcgccgcaaaatgaaatcgacggtgcgatcgccaagtgccaggaacaggcccagcgcgccgggcgcatcatccgccgcatctacgaattcgtgcagcgtcaggaaccgaaaaacgaatcttgcgacatcggtcttttgatcaatgacctgatcatgctgctggatggcgacgcccgccgccagcgcgtgcgcatccagcgcgagatcgcgccagacctgcccgtctggcaagccgatcgtattctgctcggccaggcgatcctcaacctgatgaaaaatggcatcgacgcgatggctcagacggaagaagccgcacgcgtcctcaccgtgcgcgcggcaagctttgccggacaggtgcttatctcggtcgccgatcgcggctgcggcatcggggcggaaaccgccgcgcagctgttcgaaccgttctacaccaccaagcaagagggcctcggcatgggcctgaagatctgccgctcggtggtcgaagcgcatcatggccggctctggttcgaaacgaacccggccggtggcacgattttccacatcgcgctaccatgcccgacgacatgacctccgggatggcctatctcgtcgatgacgacgccgcgatccgcgatgcgttgccctggctgctgcgctcgcgtggcattgcctgccgcgcctgggcatcggccgaggcattcctcgccgactaccgcgacgagatgagcggctgcctgatcctcgatctgcgcatggccggcatgaccggcagcgagctctttgagcgcctgctagagcgcggctgcgcgatgccggtgatcttcctcaccggtcacggcgacgtgccgctggcggtcaacgccttgaagcgcggcgccttcgacttcatcgaaaaacccttcaacgacaacgagctcgccgaccgcgtgcatgaagcgctgcaatacgaaaaaaatcggcgccggcaggacggcatgaaagccgcggtgctggaacgactggccacactcaccgagcgcgaacgtcaagtgatggaacacatcctcgccggcaagctcaacaaggtgatcgccgacgagctatcgatcgcgatgcgcaccgtcgaagtgcaccgcgcgcacatcttcgaaaagatgggcgtgcgctcggccgtcgagctggctcagcggctgtcgctgctcggcccacccggctccagatgaatccatccgcgacggcgcagcagccgatggttgccgagctcgacgagcggatgacgatcgcttgcagcggcgagcatctggcgtaacgcttcacgcagccgggcatccgacggaatcgcgacctggttgtgtgcgagcaggtaacgcagcacattgcgcgcgcgcggctcgggcagcgcctgcaagcgctcgacgggaagcggaaagccttcgcaacctgccagatcgaggcgcgccagatcgtcgagcagcgcttcggcctcggcaaagcgcgccgcggcggcggcgagattgcgcgtcgcggccggaaagcgccccaaaagcagcttcagaacacggtgacggaggaagttccttgtgtgacgaatgtccgcattgctctcgtcctcgatccattccagcccttgcgctttggcatacgccgcgatctcggcgcggcctacggtcaagagcgggcgcaacaggcggccgctcgcctgacgcatcgccgccgcgccggccaagccggcgccgcgcagcagattgaacagcaaggtctcggcctgatcgtcgcgctgatgcgcgagcacgatccaatcggcaggtatccgcgcgaacaccgcatgacgcgcgcgccgtgccgccgcctccaacccgtcgggcgaaccacgttcgaccgtgacgcgcacgcactggaatggcacgcccaggctgcgagcgaaagccgcgcagaaatcagcccaagcatcggcatgctggctcaaaccgtgatggacgtgcaatgcagaaagcccctcaggacgcagccgagccaaactgtgcaacaggacgacggaatcgatgccgcccgacagagcgacggccagccgcgcaccgggcggcgcgtagttttccaggcaggccgtcagggcgcgttcgatcgcgtcaatggacggcgagttccttgaacttgccatgactcatcaagcgctgatagcgacgctcgacgagttcgtcggcggaaaggccctgcaaaccacgcaatgcatcctgcaaggcctttttcaacgcggcggcagccgcacgcggatcgcgatgcgcgccgcccagcggttcgttgatcacgcgatcgatcagcccgagcgtcttcagacgcgctgcggtgatgcccagggtttccgcggcatcgggggcgcgttctgcgctcttccagaggatcgacgcgcagccttccggcgagatcaccgaataagtcgcgtattgcagcatcatcaccacgtccccttgggcgatcgccagcgcaccgcccgaaccgccctcgccgatgatcgtgcataccagcggcactttcagctcggccatcacgaacagattgcgcccgatcgcctcggactggccgcgctcttcggcaccaatacccggataggcaccgggcgtatcgacgaaggtgaataccggcatgccgaatttctccgccaaacgcatcagccgcaaggccttgcgatagccctcgggccggggcatgccgaaattgcggtggatcttctccttcgtatcgcgacccttctgatggccgatcacgacgcaggactggccattgaagcgcgccaagccgccgacgatcgccggatcgtcggcaaaggcgcgatcgccgtgcagctcgacgaaatcggtgaagatcatgccgatgtagtcgagcgtataggggcgctgcggatgacgcgccacttgggcgatctgccacggcgtcagcttggcgtagatctccttgatgagcgccgcgctcttgctctccagccggccgatctcgtcggagatatccacagccgaatcgtcctgcacataacgcagctgctcgattttctcctcgagctcggcgatcggctgttcgaaatccagaaaggtcgtcttcatggcggggattctactggaaggcgcaagccgaacggcaagtgccgaaacgaagcgtgggatatcccgagccgaagccgagcatgacggcgcgcacaatgacaaacgcgcgtttgtcggacataaaatggaagagcccaacgggtttccccgctgggcccggatacgactcggagtcttacgactccagcttattgtagcaacggctctcaccccggatagccacaacgaagcgaatgataagggaggatggcatgggcgacaagacctcgcaaaatttggccttcggtctggacatcggcatcgcttcggtcggctggtgcgtgctcgacgacgagcgcatcatcgacctcggcgtgcgctgtttcgacaaggcggaaaccgccgacaagggcgaatcgctcaatctcgcgcgacgcatggcgcggctgatgcgccgccgtctgcgccggcgcgcctggcggctcgtcaagctcgcccgcctgctcaggcgcgagggcttgatcgatcgcatcgaagccgtgcgccgcccatcgtcgatttctccctggaagctgcgcgtcgaaggcctcgaccgtcgcctggaaccgatcgagtgggcgcgcgtcatctatcacctcgtcaaacatcgcggctttcactggatcagccgcgccgaggaaaagaaagccgaaggcgacaagaaggaaggcggcagggtcaagcaaggactttccgacacccagcggcgcatggccgaaaaaggctatcgcagcgccgccgagatggtgctggccgaatttccggatgcccagcgcaacaaggccggggaatacagcaaagccctctctcggacactgctcgccgacgagctggcgcttttgttccgccgtcagcgcgaactgggcaatccgcatgccggcgccccactggaagagaagatcctcggccgcggtgaccgcaagagcggcctgttctgggagcaaaagccgccactttccggtgccgatttgctcaaaatgctgggcagatgcaccttcgagagaacgggagggcctgacggcaagggcgaataccgcgcgccgaaagcgagcttcaccgccgagcgccatgtctggctcacccgcctcaacaacctgcgcatcgtcgtcgatggccgcacgcgagcgctgaacgagaccgagcggcagctcgttctgcctttgccctatcagcgcgccggcgacttcaagtacgaacacctgcgcgcggcgctcaccaaggccggactggcgaatttcagctttgccggcatcgccgaggagaaggaaaaggaggtgctcgtcaagctgccggcatggcaaaccctacgcaagacgctcaaggacaaaggcttgcaaacggaatgggagagcatggccggacaggcgatggccggcgatccgacgctgctcgacgaaatctccctcgtgctctcggtcttcaaggacggcgccgaagtcgagacggaattgcgcaagctcgatctacccggcggcgaaaagatgatcgaggcgctgtccgaaatcagcttcgacaagttccacaacctctcgctgaaagccttgcgcaagatcgtgccacagatggagaagggcctgcgctacgacgaagcttgccaggtcgtcggctatcaccacagccagccgcaggccgccgagacgaggaaagacatctatctgccgcctttctaccttgggcgcgaaaagaatggacggctcacactcaacgaggaactggatattcccaggaatcccgtcgtgctgcgcgcgctcaaccaggcgcgcaaggtgatgaatgcgctgatccgcgcctattgctcgccgcacgaggtgcatatcgaaatggcgcgcgatctgtcccgcccctccgatgaacgcaacaaaatcaagaaggcacaggaggaataccgcgagcgcaacgaaaaggacaaggcggttttcgccgacgaattcggcatcccggccaaaagccgcgagttcgagaaattccagctctaccgcgagcagcagggcaagtgcgcctactctctgcaagcgctggatcttcagcgcgtgattttcgatccggggtatgccgaggtggatcatgcgctgccctactcgcgcagcttcgatgacagcaagaacaacaaggtgctggtgctgggcgaagaaaaccgcaacaagggtaaccgcaccccgtatgagtacctgaccagcttcacgggcggcgagcaaggcgaacgctggcgcaacttcgtcgcttacgtcgaagcgaacaagaactttcggctcgccaagcgccagcgcctgttgcgcaaggatttttccagcacggccgccgaggagtttcgcgagcgccacctcaacgacacccgctacatctgccgcttcttcaagaactacgtcgagcggcatctcaaactcacgccgaaagtcggcgctgatgggacggcacttaccgaagcgaagcgctgcgtcgtcgtcaatggccagctcaccgctttcctgcgcgcccgctggggcttgctgaaggtgcgcagcgacagcgaccgccaccacgcgctcgacgccgccgtagtcgccgcctgtagtcatggcatggtcaaacgcctagccgactatgcgcgcagccacgaactcgaaaacctgcgcttgggctttcccgacccggaaaccggcgagattctcgatccggcgatgttcgcgcgcctgactgcgcatttccccgagccgtggccgcacttcaggcaggagctcgaagcgcggctgttcatcgacgacgagcaagccttgcgcgagcgattgcaggctttcggcacctatccggccgaggcgctcgccaacgttcgcccgctgttcgtctcgcgcgcgccacagcgcagaggtagcggcgcggcgcacaaggacaccatctacggtcagccggaacgactcaaggcgaaaggaagcgtcacgcagcgagtgccgctttccagcctgaaactggccgacctcgacaaactgatcgacccgcaccgtaacgagaaactctacgccgcgatccgcgcacggctggaagcccacggcggcaagggcgacaaagccttcccatccgacaatccgctgaggaaacccgaccgcgacggcaagccgaccggcccgatcgtgcgcagcgtgacgatggtgatcgacaagctctcaggcattcccgtgcgcggcggcatcgccaagaacgacaccatgctgcgcgtcgacgtcttccgcagcaaaaaggacggcaagttccatttggtgcctgtgtatgtgcatcacgtcgcgatcttcaagcgcaccggggaattgccgaaccgggcgatcgtggctttcaaggacgaggaggaatggacgctgatcgacgaagcggatttcgactttctattctccgcacatcccagtgatttgttgcgcgtcaagctgaaaggagaagtgctgacgggttattttgccggttgtgatcggtcaaccggcaatattggtctctgggcgcacgaccggaacgccagtgtcggcaaagacggattcatccgcactggggtgaaaactgccagcgggttcgaaaaattccacgtcgacgtcctcggcaacgtctaccctgcgccgaaggaagcgcgccgtggtctggcgtagcgtgatgatctcgcgtcccgcgcggctacggcgggagcattattcgctggccatcgaccaggaggaaaccgccttcgtgcccttcgaggacatcgcggtgatcgtcttgaaccatcgcgagatcacgctcacccatccagtactctcggcctgcgccgaatacggcatcgggctttttgccaccggcgccaaccaccagccggccggcgtgttcctgccgttcctgccgcattcgcgcaccacgcgcatgatgagaaagcagcttgggctaggcaagcccgcggccaagcaggcctgggctgctctcgtgcgccgcaagatcgagaaccaggccgcctgtctcaagttgtgcggcaaagaaggcatggatcggctcgcctcctatgcgcggcgcgtgcgctccggcgacccggacaatctggaagcgcaagccgcggcgttctatttcgcgcagctcttcgggagcgatttcaaccgcgccgaggcgcgctggacgaacgccgcgctcgattacggctatgcggtattacgcggcgcgatcgcgcgcggactggtggcgcatgggctgcatccgaccgtcggcctgttccatgacagcgagcagaatgccttcaacctggccgacgatctgatcgaacccttccggccgatcgtcgatctacacgtcgccaagcatccggcctcgactgagggcgatttgattccgacggacaagcaggcgctggtggcgctgctcaatgtcgatgtcggcatgccacaaggaaggatgtcggtgctctcggcgatcgaatacgcggtcgaaagcctggtgcgggtctatgaagacgaaagccgccagctccacctgcccgcgctcatcggtcttacggcgcaccggctggagtattgacgtgggcatagagacgaggcgatacatgaggctgctggtatttttcgacctgccgatggtcaccaaggccgaaaagcgcgcctatgtgcagttccgcaaattcttgctcaacgacggctacgacatgatccagtggtcggtctatggccgcatcctcaatggcagcgacgccgagaaaaagcatctggcgcggctcgccgagaacctgcctccggaaggctcggtgcgcgcgatgaccgtgaccgaaaagcagtatgccggcatgcgcctgttggtcggcatgccgctttttcaggaaaaaaaggtctcagcggcgcaactggtgctgttctgatccgggattggagaagaaaaatccccgccaagccttggccggacggggatcaagatacagccaaattgtagctatccggggtgagagagggagctacaacgattgcagcaaaattgcatcatgattgcataattgtagctatccggggtgagagagggagctacaacgcaaacttctacaaccttggcacgatcaaaaattgtagctatccggggtgagagagggagctacaacgatgctgcctgatctcttgcttttttgatgaattgtagctatccggggtgagagagggagctacaacggtcgaagaccttggcgcgcatcgacttcaaattgtagctatccggggtgagagagggagctacaacacagacgctcaacatcccgcttgaccaccgaattgtagctatccggggtgagagagggagctacaactacagcgccatgcgcgttatatatattcttaattgtagctatccggggtgagagagggagctacaacacgcaggcactggccgagcacttgcgtcataattgtagctatccggggtgagagagggagctacaacgaaacatggcgcgtaactccgcagatgctcaattgtagctatccggggtgagagagggagctacaaccagcatcgaacgagcgaacagcacgaagcaaattgtagctatccggggtgagagagggagctacaacgtttgtctggtatggtcatgatcttcctccaattgtagctatccggggtgagagagggagctacaacgtgatttcgccactttggaaatgatttctgaattgtagctatccggggtgagagagggagctacaacggggggtcgtatccaacgccagcgcagattaattgtagctatccggggtgagagagggagctacaacaccggccaatgtctggccgaacgaaatcgaaattgtagctatccggggtgagagagggagctacaactcggaagatgttatatgattgtttcgcctaaattgtagctatccggggtgagagagggagctacaacgtttcatgcgggagctcgcggcccccgcatgaaacgtgccgcttcgcggccagtctgtaaggtgccgtcccgccagcgccgagtgttcgagatgactcggcacccggcgggacgctctcgtttccgccaccgtcgacgctcacgcccggcgccaggtggtgccttgcgggccgtcttcgaggatgatgccgacggccttcaattcgtcgcggatgcggtcggcttcggcgaagtttctcgccttcttcgcggcggcgcgcgcggcgactctggcttcgatttccgcagcgctcatgccctcgcccgccgccggcccggcttgcaggaattcgattggatcgcgttgcaagaggcccagaatcccgcccagccctttgagctgcgccgccagcgcggcatccttgctgcgattgacctcattggcgagatcgaacagcacggcgatcgcttccggcgtggcgaagtcatcgtccatcgccgccttgaaacgcatcgcatgcggctcgttccagtcgacgctcggcgcaacaatgaagcctttcagcgcggtatagagacgggtcagagcggcgcgcgcgtcttcgaggtgggcagcggaataattgagcgggctgcggtagtgcgcgcgcaggatgaagaaacgcacgacttcggggtgatatttcttcaggacgtcgcggatggtgaagaagttgccgagtgatttcgacatcttctcgtcatcgacgcgcacgaagccattgtgcatccagtaattgacgaagacatgaccatgcgccccttcggattgggcgatctcgttctcgtggtgcgggaactgcaaatcctggccgccgccgtggatgtcgaaatgttcgccgagcagcttggagctcatcgccgagcattcgatgtgccaacccgggcggcccggcccccacggcgaagcccatttcacctcgtccggttcatccgctttggcgtgcttccagagcacgaaatcgagcggatcttgcttgccttccatgacatcgacccgctcgccggcgcgcaggtcttcgagtgatttgccggaaagcttgccataggcgggaaacttgcgcaccgcgaagcagacgtcgccgttggcggcgacataggcgtagccattcttttccagcttgtcgatcagcgccagcatcgccggcacgtattcggtggcgcgtggctcgaaatccgggcgcgcaacacccagagcgtcggcgtcctcgtgcatcgcggcgatgaaacggtcggtgaggctgcggatcgactcgccattgtccacggcgcgcttgatgatcttgtcgtcgatgtcggtgatgttgcgcacataggtgacccgatagccgctggcctcgagccagcgcaccaccatgtcgaagaccaccagcacgcgggcgtggccgagatggcagtagtcatagacggtcatgccgcacacgtagagacgcaccttgccaggctcgatgggcacgaactcttgcacggagcgggtcagcgaattgaagattttcagcatgggagaagcgtcgcacaaaaggctagaatcatacgtcgtttgttccggacggagatatcatcccaaattgaccattagaccgggctgattcgccatgagcattcgatacgatcatttcaacgccctacgcggcggttttcgagctgcgggcggcatctttgcgcccccgctcctcgccaataggctccgctattggctcgtcgcggtaacgcaaacctgctcgccctcgcttttgatacccgctcgcgttccaatggacaatctgggatcatgaaacatttgttcgcgctgttgtccgcgctgtttttcccgttggccgcggccgccgccaatccccaggtcgagctgaagaccagcctcggcgtgatcgttctcgaactcgatgccgccagagcgccgaagaccaccgaaaacttcctgcaatacgtcaaggacggcttctacgacggcacgatcttccatcgcgtgatcgacggcttcatgatccagggcggcggcatgacccccgacatgaaggaaaagccgacccgtgcgccaatccccaacgaggccaagaacggcctcaagaacgtcaccggcagcatcgcgatggccaggacgcgcgatccgcactcggccgcggcgcagttcttcatcaacgtcaaggacaatgccttcctcgactatccgggccaggacggctggggctatgccgtattcggccaggtcgtgcggggcctcgatgtcgtgcagaaaatcgccaaggttcccaccggcaatgccggcttccaccagaacgtcccgctcactcccgtcgtcatcgaaaccgcccgcatcctcgacaagaaataaggaaccccagaatgatcaagctcaccaccaacctcggcaccatcacgctcgaactcgacgccgagaaggcgccgaagaccgtcgccaacttcatcgattacgtcaaggccggccattacgacggcacgatcttccaccgcgtgatcgacggcttcatgatccaggggggcggcttcctgcccggcatgaaacagaaaccgaccaacgcagcgatcgagaacgaggcagccaacggtctgaaaaaccagcgtggcacgatcgcgatggcgcgcacctcggacccgcactcggccaccgcgcagttcttcatcaacgtcgccgacaacgactttctcgattttcgcgcgccctcgggcaatggctggggctactgcgtgttcgggcgcgtcgtcgagggcatggacgtcgtcgacgcgatcaggcgcgtgaagaccggcaacaggggcttccaccaggacgtgccggtcgaggacgtcgtgatcgagaaggcggaagtcgtctgagcgagctattcatctccgacctgcatctctccccgaccgagccggggacggtgcagaccttcctcgatttcctcgccggcccggcgcgcgaggcgagccgactgaccatcctcggcgacctgttcgaatattgggccggcgacgacgatctggccgatcccttcaacgcccgcatcgtcgccgccttgcgcacgctatccgacagcggggtgcggctcgaattcatggccggcaaccgcgattttttgatcggcgcagcctttgccggcgcggccggcctcaccttgctttccgatccttgcgtgcgggaaatcgacggcatccgcaccgtgctcacgcacggcgatcagctgtgcaccgacgacatcgactaccagcgcttccgcgaagaggtccgcaagccggcctggcgggaggcttttcttgcccggccgctggcggatcgcaaacgcgagatcgaagccctgcgcgccttaagcgaaaaggaaaagcaacacaagccggctcagatcatggacgtgaatgccgacgcggtcgctgccatgtgcgctgcgcatcgcgcccaggcgctgatccacggccacacccatcggcagggacgtcacgagcatctcgtcgccggcaaaccctgcctgcgctgggtgctcggcgactggaaccctggccggctcagcgcgcttttctgcgcggcggcgaactggcggttttccgtttgaatgtccgttcgccctcgcccggcttggccggacggatcttgagcggcagatgacgcacccgcgtgcgcttgagcgtttcgagcacctgcggcggcaactcgggcagctccaccgtgctgtagtcatcgaacagatcgatctggccgatcagcctgccgtcgatgccgccttcgttggcgatcgcgccgacgatctctttcggcaacgcgccttggttgcggccaacctcgatccggtagcgtagccgcggtgccgcatcgaaatcgcgcccggccgccggcattgaacgcggtttgcgctccgctggggccagactcggcgctggcacaacggcacgtttgctgcgcgctggggcggcgcgcggcacgctgggcgccggctcatccaacccctctggctgcaaaggccgctcgcgctgagcaagaaacgcgagcgcggcggcgatctgccgcgtcgccagaccgtcttcgttttccatgcgccgcaccacgtcgtagaagaagtcgagattctcctcggcgagtgtgtcgagcacctgctggcggaactgttgcacgcgccgctcggccacttcgccgcgtgtgggcagcgccaccggctcgatcggctggcgcgtggcgcgctcgatggttttgagcatgcgcatctcgcgcgggctgacgaacaggatcgcaacccccgtgcgaccggcccgaccggtgcggccgatgcggtgcacataggcttcggtgtcgtaaggaatgtcgtagttgatgacatggctgatgcgcggcacgtccaggccgcgcgcagcgacgtcggtggcgacgacgatgtcgaggctgccattcttcaaacgttcgatcacctgctcgcgcaagccctgcgtcatgtcgccgttcagggccgccgcctcgtagccgcgtgcctccagcttgtcggcgagctcgaccgtcgcggtcttggtgcgcacgaaaacgatcgccgcctcgaaatcctcctcgacttccagcatgcgggtcagcgcttcgagcttgtccgcgccggaaaccttccagtacttctgcttgatcgccgcgacagtcgtggtggcggcacggatcttcacctgttctggatcgcgcagataacggctggcgatgcggcggatcggctcgggcatcgtcgccgagaagagcgccgtctgtctcgtcgccggcgtgtgttcgaggatccattcgacatcgtcgatgaaccccatgcgcagcatctcatcggcctcgtcgagcaccagcgttttgagatggtcgagattcaggctcttcctttccaggtgatccatcacccgtccgggagtgccgacgatcacctgcgcgccgcgcgcgagagcccgcagctggatcaccatgctctggccgccgtagatcggcaagacatggaagcccggcatctggtgcgcatatttctggaacgcctcggcgacctggatcgccagctcgcgcgtcggtgcgagcaccagcgcctgcggacgtttgtcggcgagatcgagccgcgccaggatcggcagggcaaacgccgcggtcttgccggtgccggtctgcgcctcgcccaagaggtcgcgcccagccaacagatgcgggatgcaggcggcctggatcggcgacggcgtctcatagccgacttcggcgagtgcggaaaggagatacggcggcagcgcgagcgccgcgaaggagtcgagggtgtcggtcatgggaaagcctgcgtctggcagggtgaagaaaggcctttcaggccgcgcgggccggcattatcgcagaatctggtaaggcgcagggtcgatggccggcgcacgccccgaaacgagatcggccagcagccggccggagccgaccgccatcgtccagcccagcgtgccgtggccgctattcacatacagcccgccgatcggcgtcgggccgatcagcggcacgttgccgggcgtagccggacgcagtccggcccaaggttcgacggcgtcgtcgcgcaaggcaagccgcgggaagatctgccgcacgcggcggatgagcggcgcgatgcgcgcgggattgatcgacgtgtccagaccagtgaattcggccgtgccggccacgcgcaggcgctcgcccaggcgcgaatagacgatcttcgcgccatcgtcggtcagactcacgctcggcgccggcgcatcgggggacagggcaatggtgatcgaatagcctttggcaggatagatcggcaggcgtatgcccagcggccgcaacagcccgggcgtgtagctgccgagcgcgacgacgcaggcctcgccggcgatgcgtttgtcattgacgaggcgcaccgcattgaaccgtccgcccgcggtttcgatgccggcgattgcgctgccgtaaaggaacctcacgccgtgctgccggcaatggccagccaacgccagggtaaaacgccgtgcatcgcccgattcgtcgcccggcgtgtaggtgccgccgacgatcggcagcgtcgaatccttgagcgccggctcgatcgccagacattcggccgccgacttgacactgcgctcgcagccgaactgctgcatgaattcggcctggggaacggcgcgcgcgaattcctgctcgtcggtgtagtaatgcaggatgccacgctccaggcagtcgtattcgagccccagctcgtgacgcaaggctttcacgcgcgcgcggctgtcgagcgagagcgcaaggatcgcgcggatgttggcgcgtgtgcggctgggcgtgcattcgcgcaggaagcgcaatccccagcgccattgggcggcatcggcgcgcagccgccacaaaagcggcgaatcctcgcggcccagccatttgaggatcttcagcggtgtcgcgggattcgcccacggttcggcatgactggtcgagatctggccaccgttggcgaaactggtctccagcgccgggccgggctgacggtcgatgacggtcacctcgtgaccctcccgggcgaggaaccaggcggaagcgacgccgatcagtcccgctccaagcactacaatacgcattcgagtttcccattcaccgccagcgcaggattataggcacccacatgaagttcctcttcgacctctttccggtcatcctgttcttcgtcgcctacaagttcgccggcatctatgtcgcgaccggcgtcgccatcgtcgcaacctgcgcgcagatcggctgggtgcatttccgccacggcaaggtcgacaagatgctttgggtcagtctcgtgctgatcgtcgtcttcggcggcatgacgctgctcttgcacgatccgacgttcatcaaatggaaaccgacgatcctctattggctgttcgcgctggtgctctccggctcggcctggctgttcgacaaaaacctgatacgcagcatgctcggccagcagatgaccctacccgacggtatctggagccgcctcaatctcgcctgggccgctttcttcgcgctgatgggtgcactcaatctctacgtcgcctaccacttcagcgaggacgcctgggtgaatttcaagctgttcggcggcatgggcctgatgctcgctttcgtcgtcgcgcaggggctgttcctcgccaaacacctcgaagacaaggagtcgcattgatgctctacatgatcctcggcagcgacgctccaggcagcctcgacaagcggttgattgcgcgccctgcccatctcgaacggctgcaagtgctgctcgccgccggccggctgatcctcgccggcccctgcccggcgatcgacagcccagaccccggcccggccggcttttccggcagcttgatcgtcgccgagttttcttccctcgaggaagcgcaagcctgggcacaagccgatccttacaatgccgccggcgtctatgccagcgtgacggtgaagcccttcaagaaggttctgccatgagcgccgtcgagctgatccgggcacgcctcgccgctctcgcgcccagcgcactcgagatccgcgacgacagcgcccagcatgctggccatgccggtgcgaaagaaggcggccactacgccatccgtatcgtcgcgccctgctttgccggcctgtcgaccttgcagcgccaccgcctggtgtatgatgccgtcggcgatctgcccaatgcccgcatccatgcgctgagcatcaccgccaagacccccgaagaaacctaatttttcacccg

SEQ ID NO: 2866 - DNA, 23381 bp, synthetic construct
  misc_feature 1..23381: note = Synthetic
  source 1..23381: mol_type = other DNA
tgacgaagcgcaaaccacggcgtgccacatcggccaggctgccgatgcggtgtggattgccgcgcgccacgaacaagccctgggtgcgcacggccagctgcaccagccggtgccgctgcggctgcagccaggggcggtaacgctgcaccgctgcggcctggaactcgcccatgggcacatggaagccggccaagtcgcaatcgccttgcgccagggcggccacggcttccaggctgctgcgatagcgccattgcagctcgatgcgccgcgccagcagcagctcgcgcaacgccgccaccgcaaagccatggctggcctgcagccgcggcatgctcggtgcgcggtggccgttgcggcccaggtccgcttcgatctcgctggccaacgactccaacaacggctgcaggcgcgcgttgctgcgcgcttgggcccagatcaaacggcgggccatgtcggtgagccgcgagccgcggccgcgcccacgctgcagcaacggctggcccagcagcgcctcgccttggcgcagcaggccccaggcatgtcggtatgaccagcccagcgcacgcgcggcctgggcaatgccgccaccgtcttgcacggcctccagcaaggccagcagcggatcggccacgaagccgccgtcgtcggggccaaactgccattggagcgagacgcgcaccgacgtcatggacacctcgtcgcaacaaatatgcaagccagtgcatattaaagggccccggacgcgctaggctgcctctgcccccacgaacgaagatccccggccatggatgccaagatcatccccctgcaccccgagggtgctcccagccgccaacgtcgtcggcaagccccccgtggacggcccgtgagccccgaagcgctgcgcgaggtgcaagccacgctgcagggcgtgctgccgcggcgcgaccagctcatcgaggccctgcatgcgctgcaagaccgctttcatcagctgcgcaccgaccacctcgccgcgctggcgcaatggatgcggctgtcgcaggccgaggtgtatgaagtggccagcttctaccaccacttcgacgtggtgcgcgagcggcccgatggcagcttcgaagcgccgccggcgctgaccgtgcgggtgtgcgacagcctgtcgtgcgagctggccggcgcgcatgagctgttgcaacggctgccgggtctgctggggacgcacgtgcgcgtcgtccccgccccctgcctgggccgctgtcatgaggcgccggtggccctggtgcatcaacgcccgatcgggcgggccaccgccgcagccgtgcaagccaccatcgcccagggcctgcatcacgaggacatgcccgcggccttgggcttggacgcctaccgcgcccaaggcggctatgccacgctgcaggcctgcgtgagcggccagcgcccggtggaagccgtgctgcaggccctggacgactcgggcctgcgtggcctgggcggcgccgggtttgcggccgggcgcaaatggcgcatcgtgcgcgcgcagccagcaccgcggctgatggccgtcaacatcgacgaaggcgagcccggcacgttcaaagaccggcactatctggagcgcgacccacaccgcttcctcgaaggcatgctgatcgcggcctgggccgtgggggtggaggccatttacatctacctgcgcgacgaataccacggctgccgcgcgatgctggcccgtgaactcgccgccttgcaagccgctgcccccgtgccgctgccgcacatcgagttgcgccgcggcgccggcgcgtacatctgcggcgaagagtcggccatgatcgaatccatcgaaggcaagcggggcctgccccggctgcgcccgccgtatctggccgaagtgggcttgttcggtcggcccacgctggagcacaacttcgagacgctctactgggtgcgcgacatcgtcgagcgcgggccacagtggttcgcctcgcacggccggcgcggccgcaagggcctgcgctcgttttccgtgtcgggccgcgtgaagcagcccggcgtcaagctcgccccggcaggcatcacgctgcgcgagctgatcgacgagcattgcggcggcatgctcgacggtcaccagctgtacgcctacctgcccggcggggcctcgggcggcattctgccggcccgcttggccgacctgccgctggacttcgacaccttgcagccctatggagccttcatcggttcggccgccatcatcgtgctgtcccaacatgaccgcgcagtgcaggccgcgcgcaacctgatgcgcttcttcgaggccgaatcctgtggtcagtgcacgccctgccgcgtcggcacgagcaaggcgcgtgcgctgatcgagcagccgcgctgggacactgccttgctggcggagttgtcgcaagtgatgcgcgaggcatccatctgcggcttgggacaagccgcccccaacccggtggactgcgtgatcaagtactttgccgaggagctcgcatgaatgcggtgatgtcgcccgaggtcgtcatcgacttcaccctgaacgggcagccggtgcaagcccgtgcgggcgaaaccctgtggaccgtggcccggcgtcacggcatcgaaatcccccacctgtgtcatgcccagggcctgcgcccggccggcaactgccgcgcctgcgtggtcgagatcgaaggcgagcgggtgctggcgccctcgtgctgccgcagccccacgcccggcatggtggtgcgcagcgacagcgcacgtgcggtggcggcgcagaagatggtgatcgagctgctgctgtcggaccagccggccaccccgcgcaccggtcgcaacgagctgaccgaatgggccgccaagctcggggtgggccagccgcgctttgccccgcgcacgcaacccgcacccgatgtctcgcacccggccatcgcggtgcacctggacgcctgcatccattgcacccgctgcctgcgcgcctgccgcgaggtgcaagtcaacgacgtgatcggcctggccggccgcggtgcgcgcaccaccatcgtcttcgacatgggcgatgcgatgggcgcctccacctgcgtgggctgcggtgaatgcgtgcaagcctgccccaccggcgccctcagcccagcgcaaggcgcgggcttgcagcaggccgatcgacgcgtggagtcgatctgcccctactgtggcgtgggctgtcagctcacctaccacatcaaggacgagcgcatcctgcgcgtcgaaggccgccacggcccggccaaccagggtcgtctgtgcgtcaaagggcgctatggcttcgactacgtgcatcacccccaacgcctgaccgtgccattgctgcgccgcgaaggcgtccccaagcacaccccggtcgatcccgagcgctggcacgaagtcttccgcgcagccagctgggacgaggccctggcgcgcgccagcgagggcttgcgccgcatccgcgacacgctggggccgcgcgcgctggccggcttcggctcggccaagggcagcaacgaggaggcctacctctttcagaagctggtgcgcaccggctttcgcagccacaacgtcgatcattgcacgcgtctgtgtcatgcctcgtcggtggccgcgctgctcgaaggcattggctccggcgcggtgtccaacccggtgcgcgatgtcgcacaggccgagttcgtgctcctgatcggcgccaatcccacggtcaatcacccggtggccgccacctggatcaagaacgcggtgcgccaaggcaccaagctcgtcgtggccgacccgaggcgcaccgaactcgcccgccacgcctggcgcgtgctgcagttccgccccgacaccgacgtggcgctgctcaacgcgatgatgcacacgatcatcgccgaagacctgatcgactccgccttcatcgaggcgcgcacgaccggtttcgacgccctcaaggcccatctcgcagcctaccgccccgaggccatggccccgctgtgcggcatcgacgccgacacgatccgtgaagtggcgcgcgcctatgccaccgcgcgcgcctcgatgatcctgtggggcatgggcatcagccagcatgtccatggcaccgacaatgcccgctgcctgatcgcgctggcgctgatgaccggccagatcggccggcccggcaccgggctgcatcccttgcgcggacaaaacaatgtgcaaggcgcgtcggacgccggcttgatcccgatgatgttcccggactaccagcgcgtcaccgatgcggccgcgcgcgccaagttcgaacggctctggggcgtgccgctggacgaccagcccggcctcaccgtggtggaagtgatggacgccgccttgcgcggcgaggtgcgcggcatgtacatcgtgggcgagaacccggcgatgagcgaccccgatgccgagcatgcgcgccaagccttggccgcgctggaccacctggtggtgcaagacatcttcctcaccgaaaccgccgcgctggccgacgtggtgctgccggcctcggccttcccggagaaaaccggcagcttcaccaacaccgaccgactcgtgcagcttggccgtcaagccctgcagccgccgggtcaggcgcgccaggactgggagatcatccagtccatcgcccaaggcctggggctgccgtggcactacaccgacattggccaggtctatgaagaaatgcgtcagtgcatgcccagcctggccggcctgagctgggcccgcctgcaacgcgaaggcgccgtcgtgcacccctgcccggatgaggacgcgccggggcaggccgtggtgttcaccgaccacttccccacgcccgacggccgcggccgcttcgtgccagtcgatctcgtgtcggccgacgaacgccccgatgccgaccatcccttcgtgctcatcaccggccgccagctcgaacactggcacactggcagcatgacccggcgcagccgggtgctcgatgccctggagccagacccggtgggcctgatgcacccgcaagacttgcaacgcctgggcgtggcccccgggggcctggtcacgctgcgctcgcgccgcggtgaagtgtctctgtacgcccgcgccgacgaaggcacccccgtgggcaccgtcttcgtgcccttctgttatgccgaagccgccatcaacaaactcaccaaccccgcgctggacccctacggcaagatccccgagttcaagtactgcgccgtcagcgtgcgcgccggcggctcggtgcccggcccccatccgacccgcagccccacgaagatgtgaccagatgtaaggcgagccctcctcgggcgtcccgtttgcttcgtccaagccacgccagtgccacggcgtgcagccgcgcggcagaaccgccacaccgtgacgttttctgacacagcgcgtcacaccgcgggtgacactttggcgcccgacaccggagagcttgcccttggacatccgcaacgtggacacgcccctgacgcgcgcacgacgtctggcgcggggtgccgcctcatcggccgtgatgtgggtggccttgctgggcttggccgcctgtggcggcggtgcgagcagcccgaagaccggctcggagccgaccgcaccgccggcatccagcctgcccgaccaacccaccacccagcgcgacgccgtgcgtctggccgatcaggccaccttcggccccaccgaagccttgattgccaccatccgcacccaaggcccggccaaatggatcgccgagcaaatgaacctgcccatgtcacgctacaccagcggcggcaccggcgccgtgcaccagcacaccggcagcggcaacttctgcgacggccgcggcgcgaactgctggcgcgattggtggtctgccactccgttggtgtgggacttctaccgcaatgccgtccacaacccggaccaactgcgccaacgcgtggcgctggcgctgcagcaaatcctcgtggtgtccaacctcgaggtcgaaggcacctatggcttgcgcaactaccacaacatgttgctggaacaggccttcggcaactaccgcgaggtgctgcgcaaagtgagcctgtcgccggtgatgggcgactatctgaacaatgccaacaacgaccgcgccgcgccgaacgagaacttcgcgcgcgaactgctgcaactcttttcgatcggcacctgcgagctcaaccccgacggcacgctcaaaagcggcaaatgcattcccacctacgacaatgacaccgtacgcgcctacgcctacgccttgacgggctggacctatccccccggtggcgccaccgcctggggctgctggccgcagggcacccactgccgctattacggcggcgacatggtgcccgcggcggcctaccacgacaccggtgcgcgcacgctgctgtcgggggtgagcctggccgccggccacacggcgccccaagccctggaggccgtgctcgacagcctgatgaaccaccccaacatcgggccgttcatcggcaagcagctcatccagcacctggtcaccagcaacccctctgcggcctatgtgcaacgggtcagcaccgccttcaacaccggccgcttcgacagcttcggcagcggtcagcgcggcgacctgcgcgccaccatcgcggccatcttgctcgacccggaagcccgcaacgccaaccccgggcccgaattcggccgcctgcgcgagccggtgcaagtcttcaccggcgtgttgcgtgcgctcaacggccgcaccgacggcgatgccctgggctggtggtggggtgaacagttgcgacagcacctcttccgcgccccatcggtgttcaatttctaccccccggactaccccgtggccggcaccgcgctggtgggcccggctttcggcatccacaatgccaacaccgccttgcagcgcatcaattacgtgaactacttggtgttttggggcggctcggccccggcatcccaagtgcccaatgccgtgggcacccgtgtggacctcagcgcctttgcatccgatgccgacgaccccgccaagctggtcgatcggctgtcgatgctggtgctgggcgagcagctaccggccggcccgcgcagactggtgatcgacgccgtttcggcctttggccctggcagcaacgagaccgtgcgactgaaccgggtgcgtcaagccgcctacctgatctttgcctcgccgcaataccagatcatccgatgaggccgcccatgaaaccacgcactgccgccgaagcctgggtcatgacgcgccgccaatggctcaagttcaccggccgcaccctggccggcgcgctgggcctgggtggcctggcgagcttgctgcacacccccgtgcaagcacagtccggctacaaagcgctggtttgcgtctttctgtacggtggcaacgatgggctcaacaccatcgtgcccaccgacaccacgcgctatcaacaatatgccagcgtgcggggcccgctggcgctgccgcgcagcgcgctgattcccttgggtggcagcgattacggcctgcacccggccatggccgcgctggcaccggtctggagccaaggacacctggccgcggtgttcaacgtgggcccgctgtacgcccccttgaccaaagccgaataccgcaatgcgccggccaactcgccgctcatccctgatgcgctgttctcgcactccgaccaacaactgctgtgggaagccgccagcaccagcgccatggtgcgcaccggctggggcggccgcgccgccgacgccctggccacggccaacccggtgatctcggtaggaggcaacagccgcttcggcttgtccacactgaccgctcccctggtgctgcccagccctggcgccaccttcgggctggaagggctgagcgacacctcctgggcaccggtggccgctcgcaaagccgccgttcaagccctgtacgccggcaaccacccccatgccctgctcgacgcctacatgcgccaacagcgcgatgcgctggccgtgtccgagcgactgggcgccttggtgaagaccaccccgtcagacccccaagcctcgaccgcgatcaaccaggccttcgccccgctgatcagcgacggcaacatctcctccagcctcggccagcagctctaccaggtggccaagctcatcgaaagccgagccacggtgcaaggcgaacgccagatcttcttcgcctcgctgggcggcttcgacacccacggccagcaaatcggcagcagcagcaccaccggcgagcatgcccgcttgctcggcatccttgcccaagccctggcctgttttcaccaagccatgctcaacctcggcttggcccagaacgtcacgctcttcacccaaagcgacttcggccgcaccttcaagcccaacaacagcgccggcaccgaccacgcctggggcaaccaccatctcgtgatgggcggcgcggtggccggcggcacctacggccgctaccccgaactggtgctcggcgggccggacgacgtgggcgtgcatggctgggaacagcacggccgctggattccgaccctctcggtggaccaatacgccgccaccttgctgcgatggttcggcgccagcgatgcccagctcgacaccatcttgcccaacctgcgccacttcagccagcgccagatcggcttcctctgaagaatccgacctcgatcgccgcacgcggctgcgagcccatggtttgaccgtgacacggcggcttgcccacaacctgccggatgcacgcgttccgtccccggcccggaccgcctgcctcccccttcggtacccccgatcaagaggaatgaccagcgcttacatcttctggcaaggtttggtggcaaaccacccgccggttcgagacgaccgtcggccacggcacaggcccaagctcatcagccgcgttcgcggctgcggtcactgccgctcgagcgcccaccgatcgaccggccgcaaggtcaaaacagccgtcacttcgacaatcagacgccgaaaagccggtagcgaaaatcggaaccactgcttcaacgccgccccggcgcggccagtgacgacgcaatgcaccactgcgccgcccaataggtggacagcacccacaacgaagcctgcggcagcggatccaggaacatgttgatggccaacagggcgtcggagcacacgaagagcaagccccccagcgccgcgcaacccgcctcgcgcgaggccggggccccggccgcgtgcagccaccaggtggccgcctgcgcggccatggcggccaaacagatcacataggccaccaccgggagctgcaatgccgccggcacgcccggccacaactgcgccagcagggccacgctggccaccccataaaacacccagggctgccagaccgcggccagccgcgtggtggacgtgaaggccacgagatacgccagatgggccagcaagaaggccgccagcccggccacaaaaccgcccggccacatcaacgcgatgtctccggccagcgagaacaccagccccaccagcacccaagtgcgacgccgcggcccatcgccagcccgcgaccaggcatacgcaatgatgagcacggtggtcagcggcttgaagacgaagcgcaacacctcggcatcgagcgcatgcggcccgctgaagatggccagcagggcgctggccaccagcacccacggcagggtgtagcgccaggcggtggcccaggggatggcagtgtgtgtcatgggcgccgattgtgggtggcccacccgggtaatgccactgggaatcgcccgatgagggcatgatcggctcgtcgatgatgcagccgtggcacccgaggcttcagtacaacgtcacggatcgtgacggtgtgccgcccctggctcccccctaaggggggtactcaagcgcgccagcccgacgcacgattccttaccaagagaaacgccggcagggcaacctgccggcgtttcgggtacgaactcggtctttcgaccgattcttattgcagcaacggctctcaccccggatagctacaacggggtggattatgcgaagggaaagaatgtccgacaagtcccccatgaatctcggtcccttgacgttcgggttcgacatcggcatcgcctcggtcggttgggccgtactgggcgagaaccgtatcgtggatctaggtgtcagaacgttcgagaaggccgagacagcggaccgtggtgaacccctgaacctggctcgtcgcacggcccgtttgatgcgacgccgcctgtaccgacgtgcctggcgtctgaccaaactggcccgtttgctcaaacgcgagggattgattcccgcggcagacttcttcaaatcacagcccggattcgtcgactcgacctggtcgctgcgcaaacaaggcttggaccgcaagctggaacccattgaatgggcgcgtgtgctttaccacctgtgcaagcaccggggcttccactggttcagcaaggcagaggaagccaaggctgaagccgatgccaaaggtgagggtgggaaggtcaagcaaagcctgtcgcgcaccaacgcgatcatgcaggagaagggctaccgcacagccgccgagatggtacttgccgagtttcccgacgctcagcgcaacaagcaaggcagctacgaaaaggcgctgtctcgcgttttgctcgatcaggaactcggcgcgctgttcgccgcgcaacgctcccttggaaacccacatgcgggtgaggccctagagaaggcaattcgcggcacaggtgatcgacgcagcggcctgttctgggagcaacgccccatgcagtccgtcctctcgatgcttggcaaatgcaccttcgagaaggatgagttccgagcgccgaaagccagcttcaccgctgagcgccatgtctggctgacccgtctcaacaacctgcgcgtcatcgtcgatggtgaatctcgtccgctcaacgaggcagagcgccgacatgcgctccccctgccctaccaagcgggcgagaagtacacctacaagaacctgcgtacgtcgctggtgaggtccgggttactgcccgacaccttccgcttcgggggcttgtcctatcctagcgaagcgcagaaggaagccggcaaggcgaaggacccggaggagcagatcctggtccggctccctgcgtggcatgcactgcggctgcacctcaagaaagtggggctggaagccgaatggcagcagatgtcggacgccgcgctggaggggcaacctgatctgctggatgatattgcctgggtactcagcgtctacaaggacgacgctgacatccgcgcagaacttgcgaagctgcctttgccagggggcgatcggatgatcgaggctctaatggcactgagcttcgacaaatttcatgccctttcgctcaaagcgctgcgcaagatcgtcccgctcatggagctaggcctgcgctacgaccaggctgtcgagcagatccccgagtatgggcaccacagccagcggtttgtggctggcggcggagagcacaagtacctgccgccgttctacgagagcaggcgcaccaaagacggcagcatggagttgcgcaaagacctggacgtcccacgcaatcctgttgtgctgcgtgcgctcaaccaggcgcgcaaggtgtgcaacgcgctaatcaaggaatacggctcgcccgcttcggtacacatcgagatggcgcgagacctgtcccgtccgctggacgaacgacgcgatatcgagaaactgcagaaggagtaccgcgacaggaacgatgccgagcgccagcgcttcatcgaagagttcggccgcaagcccacgggcgtagagttcgaaaagtggatgctgtaccgcgagcagcatggcaaatgcgcgtactcgcttgagccgctcgaactcgatcgggtcatcaacgacccgagctacgtgcagatcgatcacgccctgccctactcgcgcagctacgacgacagcaagaacaacaaggtgctggtgctgacgcgcgagaaccagaacaagggcaaccggactgcttacgagtacctcaccagcttcccgggaggcgaggacggtgatcgctggcgacagttcaagtcctgggtggaaacgaacaagtcctaccggcaagccaagcgcaaccgcttgctgcgcaaaaactatggcccccaagaagctcaaggcttcaaggaccgcaacctgaacgacacacgctacatctgccggttcttcaagaactatgtcgagcagcacctgcaactcgccagcgacagcacggcccaacgctgcgtggtgatcaacggccagctcacctccttcctgcgggcacgttggggcttattgaagatccgggaggaaagtgatcggcaccacgcactggatgccgctgtgatcgccgcgtgcagccacgcgatggtcaaacgcctggccgaccatgccaggcgcaaggaactggagtacctgcgtcaaggcttccccgaccccgagaccggagaagtcctcgaccccggcgcgcatcaacatctgtccgaacgcttccccgaaccgtggccgcatttccgccatgaactggagaagcgtctcaagatcgactccgtcgaggagctgcgtgccgaaatggcacggctcgggacctatccgcctgaagcgctgcaggccttgcgaccgcttttcgtctcacgtgcaccgcagcgtcgcaatgggggagcggcgcacaaggaaaccatctatgcacagcccgaacgcctgaaggccaagggcagcgtcacccaaaaggtgccattgtccagcctgacactgaaagatctggacaagctggccgacccgcatcgcaacgagaagctctatgccgccattcgcgcccgtctggaagcccatggtggcaagggagacaaggccttccctccgaacgacccgctgcgcaaacccgacaaggaaggcaacccgaccggccccattgttcgctcggtgaagatggtcatcgacaagatgagtggcatcccagtgcgcggcggcattgccaagaacgacagcatgttgcgagtagacgtgtttgcgaaggatggcaagtactttctggtgccggtatatgtccaccaccgcgtcaccggcctgccgaatcgggccatcgcggcattcaaagatgagagcgaatggaccctaatcgatcagagcttcgagtggtgcttctcgctgcatccgaatgatctggtctgtgtgcacctgaagaaggagcggttgaccggctactacgcaggctgtgatcgttctggcggcacgatcaacatttgggctcacgatagaaatgctggcattggcaaagacggcttgatccgcggcattggcgtcaagaccgccatcaaggttgaaaagctccacgtcgacctcctcggccgcatctatccagcgcctccggagaagcgccgtggtctggcgtagcgtgatcatcaaccagccggctcgcctgaagcgcgagcacttctcgctcgtggtcgagcaggagcaatcggcgcgggtgcctttcgaggacatcgccgtgatcgtgctgaacaaccgcgagatcacgctgacgcatccggtgctgtcggcctgcgcggagtacggcatcggcttatatgccaccggtgacaaccaccagcccagcggcgtcttcctgcctttccagagccacagccgcgccacgcgcatgctgcgcctgcagctggcactggacaagcccaccggcaagcgcacctgggcggccattgtgcagcgcaagatcgccaaccaggccttctgcctgcaggtgatgaaggccggcgaccatgagcgcctgatgtcctacgcccggcgtgtgcgctcgggcgatacgggcaacatggaagcccaggccagcgcctactacttcccgcaactgttcggccacagcttccaccgcagtcaagaaaactgggtcaatgccgcactcgactatggctacgccgtgatgcgcggcgccgtcgcacgtgcactggtagcccatggcctgctgcccaccgtcggcatcttccacagcagcgaacaaaacgccttcaacttggccgacgacctgatcgagccctaccgaccgctggtggatcttcacgtggccaagcaccgcaatccaaacgacgaggcgaagctggcgcccgccgacaaggctgccctggtggcgctgctccatgtggatgtggccatgcctcgcggcatgatgagtgtgctgtcatcgatcgagcaggctgcggaatctttggcccgcatctacgaaggcggcagcgaggtgctgctggagctaccccagattgtcggcctccagcagcaccaccatgaaatgtagccatgcaagaccatgggccgagacacgaggcgatacatgcgattgctggtgttcttcgatctgcccgtgaccacccgcgccgatcggcgggcctacacgcagttcaggcgattcctgctcaacgacggatacgacatgatccagttctccgtctatggccgtatcttgaacggcagcgacgctgaggagaagcacatgaagcggctgctggccaacctgcctccagaggggtcggtgcgggtcctgaccgtcaccgagaagcagtacgccagcatgaagctgctggtgggcctgccgatttttcaggaaaagcaggtcaacgccagccagatcgtgctgttctgaccgtttcatggaaaaggaaaacccgcccaagccaagcctggagcgggttgccgcgggccgtgagtgtagctatccggggtgagagagggagctacaactctctgcgcgcagggcgtcacgctcggcccgagtgtagctatccggggtgagagagggagctacaactgtcgccctggccgttcatggcgtggcgcggagtgtagctatccggggtgagagagggagctacaactgcgccgggctcataaagtcaccgatgactgagtgtagctatccggggtgagagagggagctacaactcccgtcgctgacgccatcactcggtgattgagtgtagctatccggggtgagagagggagctacaacgtcgcctggggttcaggcagccgccggcaggagtgtagctatccggggtgagagagggagctacaactcgtcggcgaaaccccttcaccttgtctcagagtgtagctatccggggtgagagagggagctacaactgaagtgcgacggccaccgcgtcacgttttgagtgtagctatccggggtgagagagggagctacaacataaaaaggaggctttccttgagtcgccccgagtgtagctatccggggtgagagagggagctacaaccttcttgatagcaggtgcgccgccagtggagagtgtagctatccggggtgagagagggagctacaacttcgaggctgttgtactcctggtcgagcccgagtgtagctatccggggtgagagagggagctacaaccaccttcatggattcctcgctcacgcgcttgagtgtagctatccggggtgagagagggagctacaaccccagccacggcggcggggaccgagaccccgagtgtagctatccggggtgagagagggagctacaaccgtatgcgcgagagcgacccgcacaagggcgagtgtagctatccggggtgagagagggagctacaacgagccgctttgcgatccccctccactccaggagtgtagctatccggggtgagagagggagctacaactcgtaggccgtggcatagcggacgatgcgggagtgtagctatccggggtgagagagggagctacaaccatgtcgtaggcgctcacgcgctccgcctcgagtgtagctatccggggtgagagagggagctacaacaccggccaacgcatgcggcgcaacagcagcgagtgtagctatccggggtgagagagggagctacaacgtcacggcaggacagcatccgccatgatttgagtgtagctatccggggtgagagagggagctacaacctctggaatgcgcaccccgggcttcgcgtagagtgtagctatccggggtgagagagggagctacaaccctgcgcctggtgcaggctcatgaactcgagagtgtagctatccggggtgagagagggagctacaactgggactgtcacgttcaacgcggacacgaggagtgtagctatccggggtgagagagggagctacaactgttgggacgctggatgtagccttttctgagagtgtagctatccggggtgagagagggagctacaacgctcggaatacacggccgaaccgatgtcgcgagtgtagctatccggggtgagagagggagctacaaccgcctcgctggccggctcaccgctggtggcgagtgtagctatccggggtgagagagggagctacaactttgctcatcgatatagagcacggtcgaagagagtgtagctatccggggtgagagagggagctacaacgcgaaacagattaaaacgataagcaggattgagtgtagctatccggggtgagagagggagctacaacctctcaccatcgattcttttactgcactcggagtgtagctatccggggtgagagagggagctacaaccgttcttgggcgataaatgcagttcgttgcgagtgtagctatccggggtgagagagggagctacaactcatgaatcgtcctcggacgcaaacagcgcgagtgtagctatccggggtgagagagggagctacaacaagcccagtaacctgtccagaggacacaccgagtgtagctatccggggtgagagagggagctacaaccggctgtcgtcgcgggcgcactctccaccggagtgtagctatccggggtgagagagggagctacaacaaggtcgcacatatcctcgacggtgtgcccgagtgtagctatccggggtgagagagggagctacaaccgccgtcttgccggtgccgggggcgccggtgagtgtagctatccggggtgagagagggagctacaacggtcagcagggcggccgcacgcgggccgccgagtgtagctatccggggtgagagagggagctacaaccagcttgctggtgaaatgcgacgggcatcggagtgtagctatccggggtgagagagggagctacaactgtgaagggccggttctcccaggccacagggagtgtagctatccggggtgagagagggagctacaacccgcttggaacacggcgcgagcgacattcagagtgtagctatccggggtgagagagggagctacaactgggagcgcggcaccacggaaaagtcccgcgagtgtagctatccggggtgagagagggagctacaaccagggcctgcacctcctggcgcagctgctggagtgtagctatccggggtgagagagggagctacaacatgacgtgaagtacgctggcatgtccacgcgagtgtagctatccggggtgagagagggagctacaacactgatgtagctctcagcgtccgccagcccgagtgtagctatccggggtgagagagggagctacaacggtcagcagggcggccgcacgcgggccgccgagtgtagctatccggggtgagagagggagctacaactggtgtttcaggcggcgcttttgcaagagcgagtgtagctatccggggtgagagagggagctacaactactttagttgccttgtgtttggcttatttgagtgtagctatccggggtgagagagggagctataacgtgcccttgatcagcggagcagcgccctactgagcaagggcacgcgctgcgcgcgatctgctgatgacgtgcagtcagtcgtgataccgcaactgcgccgccagcgaggcatcgcctaccaccttgtagaccatccgatgctcctcggtgatacagcaggagcagaaaccggttggagcgtgcttcaagggctcgggcttgcccaggccatcgaaaggctcacgctgggttcgcggatgagcttgtcgatgcgctccaccatgcggcggtcctgttttgcccgtcgaggaagtcctcccaggcggcttcggcaaagcccagcctcagtcgaccagcccgcgttcctggcctccccgctgcgggtgatgatcacagctcaaggtcagtgcacacccgatccatcgtactggccaggtgggcgcgggcggcagattacgtgatggcatccatgacaggctccttgtacgtatacaagtttcgctgccaaaagttcagccctgctgccccgcccgctgtgcggctcgcagcgcaaattccgcgcgcagggccttgagcttctcgcgagggtcttccttcatggtcttttcgtccagcttcatctcgccgatgaagcggctgggaatgcccgcgacgaactcgcggcctttcttgcggcgcttgagggtgctgaccaccagcgtggtgcgcgcgcgcgtgatgcccacgtacatcagccgacgctcctcctccaagcgctgcggggtcatgtcctcgtcttcgctcttgaagggcagcaagccctcgttcaccccggcgaggaagacatgcggccactccaggcccttggcggcatgcagcgtagacagcgtcaccacgttggtgtcgccgccgcgctcggccaggctcaagatgaccgagatcgtctgcgccacgtccagcacgctgtggcgctcggtctcggtggtgacgcccccttcggtgtgcagctcgccgccacagcgccgcgcaatccagtcgatgaagtccagcacgttttgccaacggctggcggcgagcttttcgttgtcttccgcctcgtagagatgctgctcgtagccgatgtccttgagccagtccatcagcgcgggcttggccgcctcggcgcccacggcatggccgaaacggtacgccaggtcgttcacatagcggccaaactcatgcagcgcgcccacggcgcgcgcgctgacggcgctgcccagcgactcggcaaacaaggcctcgaacagactcacgcgccacttgccggcaaactcgcccagctgcgccagcgtctggtgaccgatgccacgcttgggcgtggtcaccgcgcgcaaaaaggcagggtcgtcatcgttgttgaccagcaggcgcaaccacgcacacaggtctttgatctcggcgcggtcgaagaagctttggccgcccgagactttgtagggaatgttggccttgcgcaaggcttgctcgaacacgcgcgcttggtggttggcgcggtagagtatggcgaagtcactccactgaacctgccccccttgggccctgagcccctggatgcgggccaccgcgcgctcggcctcgtgctcctcgttgtcgcactccagcacgcgcaccggctcgccctcgccgaattcgctccagagcttcttttcgaagatcttggggttggcggcgatcacgtggttggccgcgcgcaggatggcgccggtggagcggtagttctgctccagtggaatgaccttgagctgcgggtagtcctgcggcaagcgtttgaggttttcgatggtggccccgcgccagccgtagatggactggtcgtcatcgcccacggcggtgaacatggcgcgctcgcccaccagggccttgagcagctcgtactgcacggcattggtgtcttggtattcgtccaccagcacgtagcgcagggtgtcttgccacttggcgcgggcctcggcgtcacgctgcagcagcttcagcggcaagccgatcaggtcgtcgaagtccaccgcctggtaggccaccaagcgttcctcatagcgctgcatcacgcgggcggccacacgctcgtcctcgtctttggcggcccgggcggcctgctggctgtcgagcccttggttcttccacaggctgatggtccattgccagcgccgcgccgtggccgcatcggtggtgccgccagcctcgcgcaggatggacagcacatcgtcgctgtcgaggatggagaacttttccttcaggcccagtcgggggccatcggcgcgcaagatgcgcacccccaggctgtggaaggtgctgatcaccaagtgctgcgcggccttggcgcccaccaggccacgggcgcgctcgcgcatttcctcggccgctttgttggtgaaggtgatggccgcgatctggcccggggcgtagccggcctgcaacagccgcgcgattttgtgggtgatcacccgggttttgcccgagccggcgccagccagcaccaggcaaggcccttgcaggtaatgaacggcttcgagttgcgcaggattgagggatggaggctgggtcgacacggggcgagatgataccggcggcgtttttcaggccgtcgtcaggcagagttcgcgccggcttgcgatactgcgcgccgcatgcaagcgatctttcaagtcactttcccgtttttcgccttggtgctgtgcggctatgtggcagcacgccgggggctgttgcccgagtcggccatccccgggctgaacatgttcgtgctgttcttcgccttgccttgcatgttgtttcgtttcggggcgagcacgccctttgcccagttagtcaaccccgtgtggctgggtctgtacatcgcctgcgcgctgctgatcgtcttcgtcaccgtggcgcattcgcgggcccagggcatcagtctcaaggacagcgccttcggcgccttggtggccgcgtttccgaataccggcttcatgggcgtgccgctgatcgtggcgttgatgggcgagcgtgcagccgggccggtgatcgtcaccatcttggccgatctgttcgtgaccagctcgatatgcttggccttggcgcaaagtgggggcggccactggcgtgagagcctgggcaaggccctgcgcggtgcgttgagcaacccgctgccctggtcgattgccgccggcgcggcggtttcgctgctgcaaatgaccttgcccggcccgctggagcgcatgatcgcgatgctgggccaagccgcctcgcccgtggcactgttcaccatcggcgcggtgctgtggcgctcgcaaaagaatctgcagcggcccaccccggtgtcggactacgcgcccatcgttttcatcaagctggtcgtgcaccccctgctggtgctggctgccggcctggcggcgctacgcctcgggctgccgctggagcctctggcgctcaccgccttggtcttggcggcagccttgccgtcggccagcaatgtatccctgttggcagaacggtttcaggccgacaacggacgcatcgcgcgcatcattttgtggtcgaccgccttggccttcctgagcttttccggggcggtgcgtttgttcgggattgccccgacggccgcttgagctcgatagtcataagctatctgtcatatcgataggttccatttcccatcgtccgcttcagcgcctatcctttcattgccgatacctatcgcgtgataggcatcgatagaaaggagcctgccatgttcgacgccgtcctggaagttctggctgcgttggcgcaggccatgtgagcacgcgggccgcccttcgggtgcgaccgccctcgtcgaactccaaccccacaaggagagatgcatgaccgctgaaagcaaatgcccgttccacgccgtcgccggcgcgggcacgacgaacaaggattggtggcccaaccagctgcggctggatttgttgagccagcactcggaaaaatccaatcctctgggcaagaacttcaattaccgtgaggagttcaagaagctcgactatgcggcgctgaaggcggatctcaagaagctgatgaccgagtcgcaagactggtggccggccgaccatggcagttatgccggcttgatgatccgcatggcctggcacagcgcaggcacctaccgcatcggcgatggccgtggcggtggcgggcgcgggcagcagcgctttgcgccgctgaattcctggccggacaacgtcaacctcgacaaggcccggcggctgctgtggccgatcaagcaaaagtacggcaagaagatttcctgggccgacttgatgatcctggccggcaacgtggcgttggagtccaccggcttccgtacctttggcttcggcgccgggcgggaggacacatgggaacccgacaatgacgtgtattggggccgcgaaaccacgtggctgtccgatgaccagcgctacagcggccagcgcgagctggaaaacccgctggcggccgtgcagatgggcctcatctacgtcaaccccgaaggccccaatggcaacggcgacccggtggctgccgccaaggacatccgtgagaccttcacccgcatggggatgaacgatgaggaaaccgtcgcgctgatcgccggcggccacaccttgggcaagacgcatggcgccggcccggcctcgcatgtgggccccgaccccgaagccgccccgctgcatgaacaaggcctgggctggaccagcagcttcggcaccggcaaaggcaaggacacaatcacctcgggcctggaggtgacctggacgaccaccccggcgcgctggaacaacgatttcttcgaaatcctgttcaagtacgaatgggagcaaacccgctcgccggccggtgccatccagtgggtggccaaaggcgccgacgagatcatccccgggcccacgccggattcgcccaagcgcaagcccacgatgctgaccaccgacttgtcgctgcgctttgacccggtgtacgagaagatctcgcgcaaattcctcaacgacccgcaggccttcgccgatgcctatgcacgcgcctggttcaagctgacccaccgcgacatgggacccaaggcacgctacctcggcccggaagtgccgaaggaagatttgatctggcaagaccccctgcctgcgccggtgcacaagcccacggcggccgacatcgccgatgtgaaagccaagatcgccgccagcggcctgtcggtgggcgagctggtcaccacggcctgggcctcggcctcgaccttccgcggcggcgacaagcgcggcggcgccaatggcgcgcgcatccggctggcgccgcaaaacgactggccggtcaacaagatcgccatgcgcgtgctgcccaagctggaagccatccagaaggcttcgggcaagatgtcgctggccgacgtgatcgtgctggccggcggggtgggcatcgaaatggcagccaaggccgccggcctgaacgtggaggtgcccttcacgcccggccgtgtggatgccggccccgagcacaccgacgtggaaggcttcaaatacctcgaaccgttcgccgacggcttccgcaactacctgaaagccaagtcgcaggtgccggccgagcatttgctggtggacaaagcccagcagttgacgctgaccgcgccggagatgaccgcgctcatcggcgggctgcgggtgctgggcgccaactacgacggcagctcgctgggcgtgttcacccaccgccccggcaccttgacgaatgactt

SEQ ID NO: 2867 - DNA, 23372 bp, synthetic construct
  variation 14697..15957: note = note, n is a, c, g, or t
  source 1..23372: mol_type = other DNA
  misc_feature 1..23372: note = Synthetic
cctgttgctacccgacctgaacgaagctgctcatcggctgatcgcacatctggacgacgcacgccccatctgcgacagcaaatcgccggactgaacataccgggcagcaccacccggtgcccccaacgctgggagagcctccctccccttggccctacttccgaccgatggctgtcaggtccggcagggtaccgtaaatgtgaaccggaacccgcacggatgacacggaggtctgcagggtcacggccatgctgccatcaacctgcccgtcgcgcccggcaacgaactggccggatgctgtcaccatgccggcctccatgcgaaggtctttcgaaacgacctgacttggcgtgacattgaccgttgcacgcaagcgatcgaatttggtcgtcccggcgcgcacctcagaaacaccgttgcgccttgccgcctcgcccagatcgacgccatgcagcgccccacgggtcacctcagtatccaggaccgcctcgacatcccgccacaaaccggcccaatcacggctgccggagcgcatgcggagcgtgccactgacctccccctccagtttcaggcgcggcgcgaaggctgcagcgagcttgcgcgcatcgatccggctcaaactggcatcgcccgccatggccagcccgctgctccagtcgagtagccagttaccgcgcagaatgccgcccaaaaaggtggtatcgatgttctggatcagcagtttttccggttgcaacacccctttcgcctgcaaggaggcgaaggaagcggtcggtcccaaaggctgccaggcccggccctcgatattcaaggcaacgccgagcggactgggctgcgcttcgatcagcaaactgcgatcggcgctctcgatgctcgctttttccagttgcgcaccgggcaggaagctcaattcaccgaaagcatcctgaaggccaaccccctcggccagcattatctcggaatgctcgatcagcaccttgccaacggtcagcacagccggcttggcggtttcgttccggaaaaacggcatggcaaccagttgccggctcggcaaacgtgccccgctgacatggattcgcccaacggtaaacggtgccgagccaagcagggccaagggggaaccaacccgaacttccgcgacgctaccctctcccgcctgaccaatacgcaggctgctgagccgcagatgaggcaccggataaaaggccatgtccacccgctcgatccggaccggcgccccgacaaaatccgacgccgccgcctcgatggccggtttgaatcgatcatagggatacaggaccagcgtaccggcagctagcagcagcgcagcccccatgccaagcgcaatacgccgcagcgtaaggatgggcgatgcgcgctccacggtcgaaaattcgggcgcgggccgatccggcggcggcgccacagagggcttgaatgcgctatccggctttacattccgggtcggcaaaatcggcttgccaaaggatgaaaaattgctggcggcactggcggcgctggccgacatgccggaatccgcgcccatcgcgcttcgcggtccgaatacggaaaactgcgacagcggctccgtcgcatcggattcacctgccgcctgagcagccttcctcgtttcttcccaaaccgatgcagccacgagagcgggagcgatgtaccccccctcctccaattcgcgcagagccgcatgcaccaagcgaggattgccgatcttgtttgacaactcctcaacgctcatcttgccgtccacctggaccaacaccatacgcagattgcgttgcacgacgcgggtgctttgcctgaccgcctcatccccgatcggggttttggcataaatgagattggcgtccatatatcggcttttattgttgttgagcaggggcaaacggcttgaccgaagggaattctactcctataatgcgcctctctgttccccgatagctcagtcggtagagcgccggactgttaatccgtaggtccctggttcgagcccaggtcggggagccaacccaatacagatttgggcacttcaattgaagtgcccttttttgtatctgcgacggccatcgcaagcttctccttgctgcccgtgaccagcacctcaccgccggtgactctgacctcattgaccaagcagttgagatacgccttgccaaagccgctggagcgatccagcagtttttcccgtagtgccttgcagaagttggagacctgccccgcctggatttccggaagcgcacgacgacggctgaagcgattcatcttgctgactacttcctcacgctgggcttgcagcttctcgctgcggacccgcagagtttggtcaagcgggaagaggcctttctccaccgcttcgtagagccgggctgtcgccttgtcgagttcctccatctctttctgcaaaccggcaatctcgttcttctccttgttctggcacgcctcaatttcaccccgtaattcggtcagcatcgccatgacccgttcaggcgtaaaaacctgctcggccagcagaccgagaatggcatcatcgagcttgtccatcggcattgccgggttctcacagaggtgattacctttgcacgtacgggtagcacacttgtaatagcgatacttgcctcccttgcccgtcaccagggtcatccccgcgccacagagtccgcacttggcgatccccgtcagcagtgttttggaccccacgatggccggattgaccacatcagcactacgtgaagctttgcgctgctgaacggtctcgaatgtattccggtcgatgatggctggtacggacatgtgaatccattcggcctcgggcttcttctcgccggttttgttgcacacccggttgaaataaaaatcgccgacataggtgctgttcgacaggacttcatgcacgcgcccgcgagtccacgtcgttccacgatgggtgtagcccagacggttcaattccgtggcaatgagcttagccccctggccagcgccactgtcaccccgcaagtacccctcaaatatctggcgaacaattcgggcttccatctcgtcaatgaccaagcgcttcttgaccttgtccttgctgaccgtgaccacctcggtggtataaccaaatggcggacgcgagccattccagtagccctgacgcgcgttctcccgcatcgcccgcagggtgtgcttgccgttttccttactctggtattcgtcgaatatcgaaaaaatcttgcgagccatctcccctgaggggtcatcgctcgtctgctgcgtaatcgaaatgagcttgaccccgcactggttgagccggcgctcgtacaaggcaaactccagcgagtcacggtaaaagcgtgacaggctgtgcacaatcaccgcctcatacggcgacggcttttggcaagcctcggcaatcaattcctgaaatgcaggccgccggtcatcggtgccggatgcccctttttcgatgaacgctttcgcgacgacatagccatgctgctcgcaccactcccgcatttgcttgatttggtcgggaatggacaagtccttctcgaactgacgtacagttgagacacgtccatagagtgcgacagccatgattattcctcgctatcaacggcagattcggtcattagctgcccgaggagttccggtagcagccccgaaatcaacgccaactctgcagcgctcggttgagcagtcactggcgcgcgaagtgccaattggcagatgattctaggtaccttagcagattctgccgaaggcatgccagggtgatttttgattggcagggaaagttcgatgatgcgagacatgatgggcactcaaagtgagtgcccgtgcgggttggatggggtgtcctggtgcgccttactatcatcatgtcctcagagaaaccccgtcacgggcagattaaaaaagtatctgcccggaggggcattgcgatgtatagcgatcagacgagcaagtttccgaatttttttcgaaatcaacagaagcatcgcccgtccctgaagccatcaatcctggccggcgctccagttcctcggccggcgtagctgcgagcgtgcgctcagcgaggcaattgcatgggaactgctgaaccacagttgtcgaacctgttcgatggtctctgccgcaaaacggtagcccctcgggaaggcctgacgggctgttggcatcaactcggcaatgtcggcacatgcgctactgacggtgaggagaagccgctgcaagcgtttctccggcgattcgactggctcgcgcgaaggacactcattcaccacccgcgcctccagcacacgctgggtaccagcctgtagttccaggaggaggcgctgaaactcagctgagccggtcaatgtgaggtagcccggcatttccgggatgtctgtcagtccctgaacgacatgaccaagggcagccaccagggctttaccttgacggatagcctcttcctgctgatgccggattcttgccggcctcagcacctcgttattgatacgggcaatcaacgcctggtaacgtgcgggttggcctcgagttgcctcacgcagtgccgtctcgaatggggccggtatgtcggttgctttccttgagaacgaggccaggtaggtctgtatcgaagctccacgcccgtcgggcagtcgaacatactgattggcgtaaagcatgacgctcgtcgcgttaagtttcaggtagactgaattcggtgatggggtcggcattgggcgtatctccggtgagtgatacccggtatagcgatgtctcacgcatttcacgccaggctgatccgcgaccggaagcccatcctcacccatcggtgagcactcagggtgaggcgggtattgccccgccaacccgccggggtgagaccgcttggtggcctcccgctcacccgcaaatctagccggtgaggactatccgctcaccgtgactcaccttctgcgtgtaatagagcaccggcagctcccccgagtgtcccaaacgccgcgccgacagacacagcgcccgagtctgctcacgtacgccatgaaacccgggctgacgcgcgagtcgctccaggaattcggacatcccctgttcgttccggcgaccagcgatgttttgcagcatcaggtaatgctcagccatttcagattttgggcggcgccacgtccaacgggtgcccccacgcgtggcgtgacggaccaactcgtaccccagccagttcagccgtggcttgtccgtgaccagttgcagttgttcgcgctcgaggccagccccgttcgttgcgagcagcagccagtgcgcggccggcgtatccggcggccagtaaatgaccatcaatgcattggccaggccatcccgcttgcgagtcagtcgttgcgccggcgtggccccaatgccgtacaagcggtgaaatttgttggcaagcgtgatgaccttgtcagaggaaacaacgcctgcggtaaagcggacatagccgcgagggacgacgtcaaggatgcgggacagtgcggcggttttgctatgggcaatgggggtagtaggtggcatgggtgcgggattccgtttcgttgggctatatccccgtataggaatcccgcacccatgcagtgtgatttgttgtgacgaagtcacacatattgatgttccaactatttttgcggacatcgctatacctcacaggacactcgcgagcagccgacgcaggtcgactgagagcgcatgccgtggcggtctgcccagagtgcctgatcactcgggttctctgggcagaccgccaactgcaaacacactgccgaaaggcaagctggatcgccaatccagcaggttgaagatcgcctatcttcaaccgagcaaacgctgaagcgcagtgcccgtagttgggctcgctgcgctacgctgggcgctccggggtgcaactccccggttcgacccaatcgcacgtccccgctcgttgcaagcaagcgaccagcgagaaccggggcaataggataacgacgttgggcgaccatgaaacggcatctggcaggaaatggcctgatgacctggttgcgagtgaaagcgggtagatagtcccgccaacggggcgtaccggaagggcgcaacgtctgccgcacacgatggctgatgagcatgcagcgatgcatgagggctgcaaggggaaacctggcgcagttggcacctcgggaaaccgggggtctctggatagctcaagcgtgtaacggcacccacgagggtgctgtgcggagttccgtagagccataggcatgaagccgtggttcgtcgtcgatgaagcatgacctgagtaccccagccgctatggaacatcgggcgggggaaatccaaggaaagccggaaggctagggaaatgtggagacagtggcgctacggaacgcagtagctgcaatctaaatggggagcctctctcctgaccatgacgggtggcaccgtgtggcacgacggagagagagggagactcggtgactagggtttgaccaattggacgatacgaccgaagtcgattgggaactgcatacgcagtggcgaggctggcacctcgtcccgaaagccgggagcgtttgcgacagtgtgttccccgtgaggggaaaaaagggcttggcagcccgttgcaggtttgcggcctgcccgatcgcttggcggcgatggggcagacagcatcgtttggcgacgatgtgagcgcgaaagggttcggcgaagtttgccgagcatgactaactattttccgggcaccccgttttgcggggtgcctgtcttggatcgcgttcctttgccttgacaggcgtgaggcgggaaacgacactttgcgcgctgctgagacaaaggcagccgggggtgagagcccgacttggagatgcgaggtgaagccagagcttgacctcgccgcttggtatgcctatgggcgaccgggcggggggagcctcagtgctcgccggtgctccatcggtctctcaacccctgtttcggtcgcccacccgattgagagcggatgtgcgacttcatttcacgaactggagcacaccatgcaaatccataccccccagacggacctccgccacgtcactggtcaccacgaattctgtgtatttgatgatggcactgaatcccattcactgctcgcggtccaggccggcatcccgatcacccaggcgcttgccgttgctgagcggatttttgaatgtgttggcgaatttgagtgcgaaaaccagcagtcggggcagcacagcccgatgagccaatgggcatcgcgttggctgctgacgatcgccgaggcactggtggtgtcggcgcgcaaaggcaacgttggtacgaagctgattccatgatttgatatttgcccccttctcatgggaagggggctatcgttgattgctgggcagccgctcctcggcctttgccgccgttagctgatcggtcaatgtcggtcagcagtccagcagtaagctgccgttggggccttcatcatggcgacaggcagctttctcatttagcaaatacgtgctcccgacccaatccggtctttcgccgttttgttgttcaaacgggagctttctgagtgaagcggccatagggaacatctagccagtagcggcacgtcggccaaagtggatgattgtggcccgtttctttcgatgactggcctcggggccagtgtttcacccctggcccgatcccgataatggcgacatgcgctttctgcatcgctcacgcagtgcagaagaatgcaaaagcaaaatccacgtcgcttaccgacctgattattcaggcgtctggaaaaggaaatcccatgaaagcccctcagattattcgtacgactctcgttgctggcgcactggtgctcagcacattcgcagcagccgctgatgcagtgaatagcagcgtagtccccacgcaaggccaagccttgaaattccagcaaatccgcaatgccaccatcaagctggactatgcaggaaccaccttcctgattgatccgatgctggccgtcaaaggcgcttacaaaggcttcgaaggcacgccgcgcagccatctgcgcaatccattggtggatttacccatgccggtcagcgaagtgatcaaggccgacgccgtcattctgacgcacttgcatgacgatcattgggatcatgccgcccgtaacctgattccacgcaacatgccgatttttacgcaaaaccagcaagacgccagcaaggtgcgggaagatggatttaccgatgtgcgcgtgcttgccgaacagggcacggacttcaagggcacccgcctttacaagactggcgggcagcacggcagcgataagatgtatgccactcccggcttgcgtgagttgctgggcgaggccatggggatcgtgtttcagcggcccggattcaaaaccacctatgtggtgggagacaccatctggcgcaaggacgttgattcggccctcagccgcttcaagcctgatgtcattttcctgaacaccgggtacgcgcaggtgcttggcttcgagggctccatcatcatgggcaaggaagacatgctccgtgcttaccagatgatgccgcaggccagaatcgttggtatccacatggatacggtcaatcacgccatgctgacccgggcggaactgcgcgcctttatcaaggagaagaagatggacacgcaacgcgctctggttccagaagacggtgacgcctattcattctgagtcagcaacagactatcctgagctgtgacacggcggggcggaccatgaaggtctgccccgcatttccatttcaaaggatgtgacatgaagcctcccgtcgtggctgtagtggcctatcaacacttcagcccctatcacctgtccgtgccctgcctgattttcagtgacgagattctgaacggacagaaactcttctccctcaaggtcagcgcagagagcagtacaccagtgcgggcttcctatggcatcagcctggccgcctcacacgggctggaggtactgcaagacgccgatatcgtgatcattccgggctggcacgatcccgccacaccgccgtcgcccgaacttatcgcggccttgcgcagcgctcacgcccgaggcgcccgcatcgtgggcctgtgtctgggaacctacgtgctggcctacgccggattgctcgatggccaccgggcggcaacacactgggaagctgagagcgacttcacgcgccgattcccgcaagtctgtctggatgccaatgcgctctacgtggatgaccaagggatcgtcacctcagccggtaccgctgcgggcgtcgattgctgcctgtacctggtgcgcagctattacggcagccgcatcaccaaccagatcgcccggcgcatggtggtgcccagttaccgcgagggcgggcaggcccagtttattgaacggccagttccggtttctacgctcgatgcacgaatcaacgcgctactgacttatctgcgcgagaacctgaacgaaaagttgtcgctggatgccttggcacagcaagcgcatatgagccggcgtaccctcacgcgcagttttcatcaagcaaccggcatgtctgttggggaatggctacaggccgaacgcctgcaccggacacaggaactcctggagtccagcgcccacggcgtagaagctatcgcaggactggttggattcggcacggcgacggcgctgcgtcagcaattcaaacagaccttcggcgtttctccagtcgagtggcgaaagcaattccggaaagtggatttctgagtattgattctgccagtggcgatgcaccgtccggagtcgtgcccacagctgtcattgccaagagagatgttgggcgtctgttttggccgaggaccggaagtcggcctttgcggccattggaaaagcctttactcaacggcagctatgtagccagttccggcaattggtaagtcaatgcgcgctctaggaaagtggggcgtttggatgcccaaatgaagaaggcccgacaggtttccctgccgggccggattcggtcgtcacccggaggtgacaccttattgtagcaacggctctcaccccggaaagctacatggcgttattctacgcactttgaatatcgaactgcaaatcatgagtgcggcatacatcctcggcttggacatcggcatcgcatcggtcggctggtgcgtacttggtgaaacccacatcatcgacttgggcgtgcgcgccttcgacaaggctgaaacagccaaggaaggggaatcgctgaatctcgcccggcgcaatgcgcgcctgatgcgacggcgcttgttccggcgggcgtggcggttgaagaagctggcccgcctgttgaaaagtgaaggtctgatcgccgatgccaaggcattccagcccgagcacgctttcacccgcccgctctggcaattgcgcgtcgacggcctcgaccgccgcctgaacgacgaagaatgggcacgcgtcatctaccatctctgcaaacaccggggcttccattggatcagccgcgccgaagcaaagcaagccgagggcgacagcaagagcgaaggcggtagggtcaagcaggggttggctggtacggccaagctgatggcggaaaaaggctatcgcagcgcggccgaaatggtgctgggcgaattcccggaggcgcaacgcaacaaacagggcgaatacaccaaagccctggcgcgggaactgctcgccaaggaactggcactgctcttcgaaaaacaacgagagttcggcaatccccacgcatccagcacgctgcaaaccgccatcctcggcaacggcgacaagaagtccggattgttctggcagcaaaaaccagccctcgccggggcccacttgctcaagatgctcggcacctgcaccttcgaaaaaggcgaataccgcgcccccaaagccagcttcaccgccgaacgccacgtctggctgacgcgcctgaacaatctgcgcatcgtcaccgatggtgtcacccgccaactgaccgagcaggaacgccaactctgcctgcccttgccttaccaacaagccggcgacctgacctacaagcaactcggcacggcgctgatcaaagccgggctgctggaagccggcagcttcaaattcaccggtctcgcctacccgaccgaagcgcaaaaagccgaaggcaaggccaaagaccccgaatccgccacgctgatcaaaatccccgcctggcaggaactgcgccaaacactgagcaaggccggcctcgacgacgagtggaaaaagctctcgggcgatgcactctgcggtcaaccggaaatcttcgaccaaattgcctgggtgctcagtgtctacaaggatgacgacgaagtctgcgccgaactcgccaaactgccgctccccaaccacgacgcgctcatcgacggcctgctcaatatccgtttcgacaaattccacgccctgtcgctaaaagccctgcgcgccattgtcccgcccatggaaaaagggctgcgctacgacgaggcctgccttgaggctggctatcaccacagccagttgcacaaggtcggcgaaggcgaacacaaatatctgccgccgctctacgccgggcgcgacaaggacggcagaatgctcttcgccgaagatgccgacattccgcgcaaccccgtcgtcctgcgttcactgaaccaggcgcgcaaggtggtcaatgccatcatccgccgctatggttcaccggctgcggtccacatcgaaatggctcgcgatctctcgcgccccctcaacgagcgcaacaagatcaagaaggagcaggacgaataccaggcccggaatcagcgcgaccgagaacagttcatcgaattgttcggccatccccccaaaggcctggagttcgaaaaatggcgcctgtaccgggagcaaaacgggcaatgtgtttactcgcagaagccgctggcgccgtcaggcaacgttgccgaaatcttcctcgaaggctccaccgaaattgaccacgccctgccctactcgcgcagtttcgacgacagcaagaacaacaaggtgctggtcctgacccgcgaaaaccgcgacaagggcaaccgcacgccttacgaatatctgggcggtgccgaaaacagcgaacgctggcagcgctacgtcgcctttgtcgaagcgaacaaggcatatcggctggccaagcgcacccgcctgctgcgcaaggatttcggtgccaaggaagctgaggaattccgcgaacgcaacctgaacgacacccgctatatctgccgttttttcaagaactacgtcgaacaacatctgaaactggcggaaggcagtgaggctaagcgctgcgtcgtcatcagcggacaactgaccaacttcctgcgcgcccgctggggactgctcaaggtgcgttccgacagcgaccgccaccatgcgctggatgcggccgttgtcgcggcctgtagtcacagcatggttcaacgcctctccaattactcgcgcacccgagaactggaacaggtccgtgatggcttcgttgatatcgaaaccggcgaaatcgtcaatccagcgatgcatcagcaactgcgcgagcatttccccgatccgtggccctacttccggcacgaactcgaagcccgcctgaagatcgattcgccggaattgctgcgcgaagaaatggcgcgcctaggcagttacagcgaggaagaactcgcaaccctcaaacccttgttcgtttcccgcgcagtacagcgtcgaggcagcggagctattcacgaggaaaccattcgctcatccaagcgaattgccaataaccaaagtcatgtaagagtctcgcttcaaaaactcaagttggcttcgctttcaaacatcgtaggcgctggcgatcctcgaaacgcttcgctaatcgatctgctgcaaaaacgcttgatcgaattcaaggacgatgcgaaacgcgcctttgccgagcccattttcaaaccttcctgcgacggcaacgggccacaggtcaaaaccgtcaaactaatttcaactcaaaaggggggaatgaaagttcgcggaggtgtcgctgagcttggtgacatgctgcacgttgacgtgtttcgcgatggaaagcggattctgatcgaacctgcctacatggctcacaattccgctcgaatcgcacctagctctatccctgacagtgcagagtttctgttctctctgaccaaaaatgatttagtagccgttgcgctcggggatgtcacctatcaagggtactttgtcatgtacgaaagcgatggccgtctaactcttcgtgcccacgaccaacccaagccggacaaagactatttccggaaatccgtggcgagcgcaaaacgaatccaaaaattccacgtcgacaccctcggcaacatctaccccgccccgccggagaaacgtcgtgggctggcgtagtgtgatgatctcccggccggccaagctgcgccgggaacatttttccctggccatcgagcaggaacacactgccttcgttcccttcgaggacattgccattattgtcctcaaccaccgcgaaatccagctgacccaccccgtcctctcagcctgcgccgattacggtatcggcctctacgccaccggcgacaaccaccagcccaacggcgtcttcctaccgtttctcgcgcactcccgcaccacgcgcctgatgcgcaaacagatggagattccccgccccttggccaagcaggcctgggccagcattgttcggcgcaagatcgaaaaccaggcggcggtgctgcgtttttgcgcaaaagccggggttgaccgtatggattcctacgcccggcgcgtgcgttcaggcgacacggaaaacctcgaaggtcaggccgccgctttctatttcactcaacttttcggccaggacttttatcgcgccgaagaacgctgggtcaatgccgcgctcgattatggctatgccgttttgcgcggcgccattgcccggggactggtcgcccacggcatgcacccgcccatcggtctcttccacgccagcgaacaaaacgccttcaatctggccgacgacctgatcgaaccctttcgccccctggtcgacctgcatgtcgccaagaatccggctttcaccgaaggcgatctcagcccgcaggacaaggcagaactggttgccctgctcaacgtcgatgttggcatgccgcaaggcaagatgtccgcactatccgctatcgaatacgcggtcgagagccttgcccggctcttcgaggaaggcaacagcgaactcgaacttccagccttgatcggcttgcaggcgcatcggctggaatgctaaggcatgggattggagacacgacgtttcatgcgactcatcgtcttcttcgatctgcccatggtcaccaagaccgaaaaacgcgcctacgtccagtttcgtcgcttcctgctcaacgacgggtacgacatgatccagtggtccgtctacgcccgcttgctgaacggcaacgacgaccacgaaaaacacctcaaacgcctgatcgatagcctcccgcccgccggctccattcgctgcatgaccgtcacggaaaagcagttcgtcggcattcgcctgctggtcggcatgccactttttcaggaaaaaacggttccggcgaaccagatgctgctgttctgacgcaaatttgcatgaaaaaattcccgctcagctaagccgggcgggaatttcagtttggtcaattgtagctttccggggtgagagagggagctacaacgannnnnnnnnnnnnnnnnnnnnnnnnnnnnnnnnnnnnnnnnnnnnnnnnnnnnnnnnnnnnnnnnnnnnnnnnnnnnnnnnnnnnnnnnnnnnnnnnnnnnnnnnnnnnnnnnnnnnnnnnnnnnnnnnnnnnnnnnnnnnnnnnnnnnnnnnnnnnnnnnnnnnnnnnnnnnnnnnnnnnnnnnnnnnnnnnnnnnnnnnnnnnnnnnnnnnnnnnnnnnnnnnnnnnnnnnnnnnnnnnnnnnnnnnnnnnnnnnnnnnnnnnnnnnnnnnnnnnnnnnnnnnnnnnnnnnnnnnnnnnnnnnnnnnnnnnnnnnnnnnnnnnnnnnnnnnnnnnnnnnnnnnnnnnnnnnnnnnnnnnnnnnnnnnnnnnnnnnnnnnnnnnnnnnnnnnnnnnnnnnnnnnnnnnnnnnnnnnnnnnnnnnnnnnnnnnnnnnnnnnnnnnnnnnnnnnnnnnnnnnnnnnnnnnnnnnnnnnnnnnnnnnnnnnnnnnnnnnnnnnnnnnnnnnnnnnnnnnnnnnnnnnnnnnnnnnnnnnnnnnnnnnnnnnnnnnnnnnnnnnnnnnnnnnnnnnnnnnnnnnnnnnnnnnnnnnnnnnnnnnnnnnnnnnnnnnnnnnnnnnnnnnnnnnnnnnnnnnnnnnnnnnnnnnnnnnnnnnnnnnnnnnnnnnnnnnnnnnnnnnnnnnnnnnnnnnnnnnnnnnnnnnnnnnnnnnnnnnnnnnnnnnnnnnnnnnnnnnnnnnnnnnnnnnnnnnnnnnnnnnnnnnnnnnnnnnnnnnnnnnnnnnnnnnnnnnnnnnnnnnnnnnnnnnnnnnnnnnnnnnnnnnnnnnnnnnnnnnnnnnnnnnnnnnnnnnnnnnnnnnnnnnnnnnnnnnnnnnnnnnnnnnnnnnnnnnnnnnnnnnnnnnnnnnnnnnnnnnnnnnnnnnnnnnnnnnnnnnnnnnnnnnnnnnnnnnnnnnnnnnnnnnnnnnnnnnnnnnnnnnnnnnnnnnnnnnnnnnnnnnnnnnnnnnnnnnnnnnnnnnnnnnnnnnnnnnnnnnnnnnnnnnnnnnnnnnnnnnnnnnnnnnnnnnnnnnnnnnnnnnnnnnnnnnnnnnnnnnnnnnnnnnnnnnnnnnnnnnnnnnnnnnnnnnnnnnnnnnnnnnnnnnnnnnnnnnnnnnnnnnnnnnnnnnnnnnnnnnnnnnnnnnnnnnnnnnnnnnnnnnnnnnnnnnnnnnnnnnnnnnnnnnnnnnnnnnnnnnnnnnnnnnnnnnnnnnnnnnnnnnattgtagctttccggggtgagagagggagctacaacgcacggtcggctatctgcgccagctgcagagattgtagctttccggggtgagagaggggcatgtccggagttttgtgtaaagcagccattagcagttgttctgctgaatggcggctttggccgatatccggcctcatgctagcggcaataggcagcaccttggcctttgctgccgttggcctgtcgcgttcactcaggcggcgatgtgcaggtttcatcaaatcaaggacagcatccaggtcctcgtagccaaacttggcggtccagtcttgaatcttctgcatcgctgttacgaaagggggcggattcccttccaacgtcaggacgcgcaggcgatccatacactcctcccgaaacagcattgggatgatgcggcacacgcccaccaccgaaagatcccctcgtccagtcgctcacaggccgtacccgtgtcctgccggacctatcaggaagggcccattcgctaggttctgtccaagcctcttggcgctcaatggagcgcgcgctccttgatttacacccaaaaacaacattaaatgtaacgtaacatcgtaacgtatcgtaatttagggttggccatggctcgcgaagcaacgattactcaagaagcagttaacaccgccgcggaacaaatccgcgccaccggcgcaaaacctacagcccgggctgttcgtgaggcgctggggtcagggtcgatggccactgttttaaagtacctccaggcgtggcaagcaaatcaggctcacccgatagaagccaatatcgttctaccaatcgccttgcagcgcaccttggtgacgttcattgagcaagaggtcgccacggccaaggctcttcttgaggcagacttggccctggcggagcaagccaatcgggacctgattgctgaatctgagcgacaagccgcaaccatcaacgaattggaacaggaagccacagccttgcgcgcagaggtggctgctgccaatggccgtgtcgctcagctttccagcgatctggagagcagccaccagacagtcctgagcgaacgccaagctggggagttagcccggatagagctaaccagagcaaaacttcagctacaaagcttgtctcgttgcgaagatgagattgagcggctgcgggcaacctcggatgctgagcgtgtcgctcttgtggctgccgagcggactgcagctgtgctgaatgccaaactcgaaaagacagaagcacaagttaatgaccttcaggcacgcctgacccgtgctgaaggtgacgctcgtggcgcaatggcagagacctcgaggattcgggagcagaattcgtcactgcaggcctcatttgacgcagccgtccgcgatggaaaccaggcgcgcgattacctgcgacgagtagaagcagaagcatcagagttgcgtggtcagttgctcgaactgcgcactcgaatcaatgtgggcgcgtcttgaatagaacccaaaccgtttaagtgcctaacttcgatccggtggtcgattttcccgtggacatcgcgcgtttagtggcggccgcgaccaccgccggctagctacctggtgtagccaaaaagtttatgtggcgcgcttgcgaccgcacacgagagagaaaagccgccctcacagtgggccactattgttcggattcctaagcgttaccagcagtttagtcagcttgaccgctcgaaatctccatcttcccccacgtttggcatctgcacgagcaggtcatgcagtcggtacttccgaatcggcaggccgcgacgaacaagcggcaataatgatgtaactgcggctgacacaagtacaccttcgaaatcaacgatgacaacagcgggatcagctgcttctattacaacaccgacggaaccgggatgaatcgatacctcccgctcctcgagaagaccaatcaacgagacaaggttagtgacagcaatattcaattccatttaataagaatatcaccgccgaccggcgctgagttgcgtggtcagttgctcgaactgcgcactcgaatcaatatgggcacgtcttgaatggatcccaaaccgttaagctaaaccgcgccccatgaaacgcctcgttcctgctccgctgaaacttgtgcctaacttcgatccggtggtcgattttccggcggacatcgagcgtttagtggcggccgcgtccaacgccggctatacggtcaccccgcatgatgtcgcggaattgtggcgcaggcatgccggcgacgtgtgcgcaagttgatttgccgtggatggggatgccgggatattttggtggcaccgctcaagcatgccgagatccagcttgactcggcggttagcccgagcccgcccaccggctatctaagctggctcgacttcgctgttgatacgatggataccagagccgaagaacaagaacggctctttgagggcacttcggtatcgagacaatcaatgcgcgacgcggttaaagccgaacttgtcgctcttcggcggaaagctggcgaaatttaaccactggctgtgatctccataggttgttcactcggggtatctccccagagaattggagacgccaaccgtacgcgacgacattgagatgcagcgttcgtatccgcccgaaggtcagccagggggtgttggtcagccagtcgggattgtgcagcttgagtgagcttgccagcccggcaaaggaggccagcaccagccagacgacagcacaggacaagaagatgaaggctgggagcgcgctgctgcggtccgcttcgacccgggcacggagtgcatcctgatccggctgcgtatggtcggtgctatccgggggagccgcctccgtcattcttgaccgggccttctattcaagcttccaacagatctgtttctagtaaattcaagtgcgttagtaattgcattttctactgctggggcggcaaagctgttccagtaattggcatagagcggtagtggggagagtttcagctcactttgcagcagcgtgatctcatgacctttgccgagcgtttgtgctgcggcctttggcagggtcgcaaggccgaagccgctctctaccagttttaccagggctgagattgacgaaatgcaatgcacacgcttgtcggttacgccgacggcgcgcaaggagtcgagcaaagcgatatgcggttgtgagccgcgttggaaggtcatcaattcctgacccagcaaggcgtcgaggctcagttcgggcattccagacatgctgagggggccgacaaaaatcatttccatgggcgccagaggctcattgatgatgccaggaccctcagccggtgcagcggaaaacaccaggtccagtccaccacgccgtatctgctcgttgagcacatgggtcatttcgacgttcaattcgaattctatgctggggtagcgggccttcagtgcctcgatcagaggaatgagccaggtatggagcactgtttcgattcctccaacgcgaagcgagactggcaattgctccggggcgcccaattcctgcttgagttcgagttgcagtgcgaggaagcgctcggcgtagttgagaaaccggatgcccgcgttggtcaggcgaaagacgcgatccggtcggtcgatcagggggacgcccagttcttcctcaagcgatgcaatccggctggagaccgcagactgggtcaggaatagcttttctgccgtacgcgagatactttgcaggcgggccacccaggcgaatgcttcgacaaagcgcaggttcacgttactccctccgggacgtaggccaaagttgctcatggcagctgaaattaggatgtattcagcttaacgcgaatggggggcgaaaaattcaatcgactccaaaaaaatcgatggtgtcacaaagaaatttgtcgtttgcgcactcacctccctgcaacccatactccgcgaaaatcaaaatccaactggagactttcaatgaatacagagacatccaccactgccatgcaactcgttgcacaaaccggcctgcaggcacgccaggcgattcgggccggcctctgggcgggccataccagcggaatggcaccgcattatgttcagggtaacgtggtcatcctgcctgaagtgctagccaatgatttccttcgtttctgccaacgcaatcctaagccgtgtccgctactcgctgtttccgagccaggagatccgaacctgccgcgcctgggagcgaatctagacatccgaaccgatgtgccgttgtatcgagtttggcgctatggcgaactgaccgaagaagtgaccgacatccgtggcctgtggcgtgacgatttggtgacattcatcattggctgttcattctcgttcgagcagcctctaattgatgccggcattccgttgcgccatgtggagcagggcaagaatgtagcgatgtaccggaccaatatccagacggtcccagccggtcccttcagcggtccaatggttgtctcgatgcgaccgatgacgccggccaacgccatccgggcggtacaggtgacggcccgtgtgccggcggtacacggtgctcccttgcacctcggcgatccatccttgatcgggattgccgatctcgccaaaccggatttcggcgatgcggtggacatcctgcccggcgaaatgccggtctattgggcttgcggcgttacgccccaggcggtcgtcatgcaggccaagccggaattctgcatcacccatgcccccggggccatgctggtcaccgatctgttggacagcgaactggcattttaatccccccaaaccgctgaccgccgagcgcagcacagactcgcgacggcggtctccaccgcacaccaaggagacaaatcgtgtggcttaaggaaacaaacactcaggagaggaagacgctggtcgccgcctttgccggctatggcgtcgatgccttcgattacatgatctacacctttctcatcccaacgctgatggcggcctgggcgatgagtaaggttgaggccggctacatcgccactggcgccctcattacttcggccatcggcggttgggcagccggtatcctggccgacaagtatggccgggttcgtgtgctgcagtggacggtgatgtggttcacctttttcaccttcctgtccggtttcaccaactccttcgagcaactgttctttacccgcgccatgcagggctttggcttcggtggcgagtggtcggtcggcgccgtactcattgctgagatgatccagtccaagcatcgcggcaaggcggtgggtctggttcagagcagttgggcggtcggttggggcgttgccgccatcgcgttctgggcggtgtatgccgtgctgccggccgagcaggcctggcgagtgctgttctggctcggcatcctgcccgccttcctgatcttttacatccgtcggaatatcagcgacccagaggtcttccaggtcgcccaagcaaaaaagaaggctgaaggcggcggtaatttctgggaaatcttctcgcccaaatatctgaagacgacgatcctcgccagtcttttgtccaccggcatgatgggcgcctattatgccgccacgacttggctaccgacgtttctcaaggtcgagcgcaaattgtcggtgctgagcaccagcggttatctgctcgtcctcatcttcggctccttcgtcggctacctgaccagcgcctacctatccgaccgtctcggccgacgccactgtttcatgctcttcgcagcctgtggcggtgtgctggtgtatagctacactcatattccgatcaccgacagcatgatgctcttccttggctttccgctcggtttcttcctctccggcattttctccggcatgggtgcctatttggcggaactgtaccccaacgaactgcgcggctcggggcaaggcttttgctacaacttcggacgtgctgccggcgccctttcaccggccctggtcggctacctgagcaccacgatgccgctcggcgaagtgatcggcctgctcgctgccggtggctacctgctggtcattctggtctgcttgccgttgccggaaacccgcggtcgcgatctcgcccagcaaccggcctgaatccaagctcccccacgattggcgattgttccggcgcaccctgcggggtgcccggcaggcccgtcacgagagaaatgaacatgcaaaacacgacagccatcccgtcctatctgtctattgaatcgctcggcccttgggcaacctacctgacccagatcgagcgcgttaccccttacctcgacaaggcattgctaccctgggtcgaaaccctgatccgcccgaagcgcgcgctgatcgtcgatgtgccgatccgtctcgataacggcgtcattgcccattacgagggctatcgcgttcagcacaacctgtcacgcggcccgggcaagggtggcatccgcttccatcccgaggtgacgctatccgaggtgatggcgctgtcggcctggatgaccatcaagaatgccgtggtcaacgttccctacggcggggccaagggcggcatccgggttgatcccaaaaagctctcgatgcccgaactggagcgcctgacccgccgctacgccagcgagatcaacatcctgatcggcccggacagggatatcccggcacccgacatcaatacgaacgagcaggtcatggcctggatcatggacaccttctcgatgaaccagggccggacagcgacgggtgtcgtcaccggcaagccggtgacgctcggcggcagcctcgggcgtcatgatgcgaccgggcgcggcgtcttcatctgcacggtcgaggcggcacgccgcattggcctgtcgattcccggtgcacgggttgccgtacagggcttcggcaacgttggagaggcggcagcgcgcttgttcgccgatgccggggccaaggtggtcgccattcaggatgaaaccggcagcatcttcaacccgaacggtttcgacgtccgccgggttcaccggcaccgtatcgaaaccggccagctagctggcgttcccgatgccgaagcgatcgatgccgaacacttctgggcctgcgacgtcgacatcctggtcgccgccgcactcgaaaaccagatcactgaacataacgcccccgccatccgcgcccgtatccttgccgaaggcgcaaacgggccgaccacgccggaggccgacctgatcctccaggacaacaaggtgctggtggtgcccgacgtgctggccaacgccggcggtgtgacggttagttatttcgagtgggtgcaggacatcagcgcctttttctggacagaggaggaaatcaattcgcgccttgaccggatcatgcgcgatgctttcgctgccgtatgggacgctgcgcagaacaagggcatcctgctgcgcaccgccgccttcgtgctcggttgcgaacgt

SEQ ID NO: 2868 - DNA, 23369 bp, synthetic construct
  misc_feature 1..23369: note = Synthetic
  source 1..23369: mol_type = other DNA
gccgtctgctcgtgcaccgacaggcgctgcgtcagcaggtcggcggtcggctcgtcgtgcgcctcgtccaccagcgggaacaggccgcgcgcggtgcgcgccaccgcctcgtggcccagcgccaggatgcgcaccatctccatcgccttcggcggctcggccggcgcgtccggcagcgagctcaggcgcgcgtactgcgcgtacgaggccggcgccacatgcccgagcgcgcggatgcgctcggcgatcgggtcgatggcgttccacagctcggtgtattgctgcatgaacatgtcgtgcaggctgttgaacatcggcccggtgacgttccagtggaagttgtgcgtcgtcaggtacagcgtgaaggtgtcggccagcagccgctccagcccctgcgcgatggcggcgcgctgcgccggcgcgatgccgatgtccaccggggtggcggcgcggctggcggtcttggtggtgttcttcttggccatggtcgtcaagctcctcgacagggttgggggtacgaaatcggtgtcacaccccatcatagcggcaccgcgccgataatgggcgcatgacgaccgacccggcacgccggcgctggctgcggcacggggccgtcgccacgctggcggcgctggccccgtgggcgggtgcgcgcgcccgcacggcggcgggcgacgacgcgcgcgccgtggtgagcgacgagcaggcgcggctggcctgggtgcgcgcgcggctggcggcgctgccgggcgcggccgactggctgctgctgggcgagcagcatgacgccgacgcccaccagtggctggaggccgccgcggtgcaggcgctggcgcggcatgggcggctggccgcgctggtgctggaaatggccgagcgcggccgcgacaccgcggcgctggcccccgacgccgacgaggccgcggtgcgcgcggcgctggcttggcacgacgccggctggccgtggcggcgctacggcccggtggtgatggcggcggtgcgcgccggcgtgccggtggccggcggcaacctgccgcggcaccagcacggcgaggtgatgcgcgacaccgcctgggacgacacgctgccggatgcgcaccagcgcgccgcgctgcaccgcgcgctggacgaaggccactgcggcctgctgccggccgcgcagctgccggcgatggcgcgcatccagctggcgcgcgacgacgcgatggccgccacgctgctggagcggcgcagcccgggccgcacggtgctgctggtgaccggcgcgcagcacgcccggcgcgaccgcggcgtgccgcaccacctggcgcgccgcgccggcacggacgccgcgcgcgcctgcctcagcatcgagctgcgcgccaccgacgccgcgcgcgccaagcccgacccggcgttcgatgcgctgtggctgacgccggcggtcgcggccgtcgatcactgcgccgggctgcgcggccacggctgaaggcaccgctgccgcccccgcgcgccgtcagggccacgccacgagtggctccggcgcggcgggcccggcggcctgcagcgcctgcgcgacgacgcgcagcacctcggcgccgtaggcggcgcgcttcttctcgcccaggcctgggatgccgtccaggtcgccgtcgcaggccggctggcgctgcgccagcgccacgagcgtggcgtcgtggaagatcacgtaggccggcaggtcgtgcgcacgcgccacctcggcgcgccagcgcttcagcgccgccagcacctcgcgctcgcgcagcggcaggcgtgcctcgctggccagtgcccgcgcctgccgggtggcgcgcccacggcctgccccgctgggcgccgcggccacccgcagccgtaccgcttgctcaccgcgcaggatgggccgcgccgcggcggtcagatgcagggtgtgaaactcgcccgccacctgcaccgcacccaacgccaccagttggcgcagcacgcggcgccactcggtctcgtccagctcgcgcccgatcgcccacgtcgacagccgttcgtgtccgtgctggcgcaccttgtcggtggcctgcccgcgcagcacgtcgatgacgtgccccgccccccacgcctgcccggtttgttgcaggcggtagatgcacgacagcagcttgcgcgcggcttcggtggcgtcccaggtctggggcggcgccaggcagttgtcgcagttgccgcaggggctgctggcctcgccaaagtaggccagcagctgctggcggcggcaggtggtggactcggccagcgccagcagcgcgtccaacttgccgcgctgcacgcgcttgaagtcgtcgctggctgcgctgtcgtcgatcaggcggcgctgctgcaccacgtcgcccaggccgtaggccatccaggcgttggccggctcgccgtcgcggccggcgcggccggtctcctggtagtagccctcgatgttcttgggcaggtctacgtgggccacgaagcgcacgtccggcttgtcgacgcccatgccgaaggcgaccgtggccaccatcaccagcccctcctcgcgcaggaagcggtcctggtggcgctggcgcgtggcggcatccagcccggcgtggtagggcagcgcctgcaaacccgccgcctgcagccgcgcggccaccgcttcgaccttgcggcgcgaggcgcagtagacgatgccgctgtcatggtggccgtcgggcagggtgtgctcgtcgccaatgaagcgcagcaactggcgcagcgtgtcgcgcttttcgacaatggtgtagcggatgttgggccggtcgaaactcgccacgaaggtgcgcgcttgctgcaggtgcagatgcgccacgatgtcggcccgggtcagtgcgtcggcggtggccgtcagcgccacgcgcggcacaccgggcagccgctcggccaacaccgccagctcacggtactcgggccggaagtcatgcccccattggctgacgcagtgcgcctcgtcgatggccaacagcgccagccgccccgccgcgtgcagcgcctgcaatcgggcaacaaagcgcggggtgaccaaacgttccggcgccgcgtacagcagcgtcagttcgccacgcaccaggcgctgctcgacctcggcggcctgcgcgggggttagcgtggagttgaggtacgcggcctccaccccggcctcgcgcagcgcccccacttggtcgtgcatcagcgcgatcagcggcgacacgacgatcgtcacgcccagcccggcgcgttggcgcacgatggccgggatctggtagcacaacgacttgccgcccccggtgggcatcagcaccagcgcgtcgccaccggcggccacgtgggccaccacgtcggcctgcaacccccggaagtccgcgtagccgaacacctcggccagcacggcgcggcctgcctgcagcgcctgtgcgggcgtgagcgcgctcacatctgttcccagggcagcccctcgaagcgccagccgttgcggctggagcggtggaagtgctcgtccagctcgccctcgaagccgtgcaccacgtgcgccacgtcggtgaacccggcggcctccagcgccgcgccggcgtccagcgtgcgcttgccgctgcggcagatcagcagcaccgggcggtccagccggccggcctcctgcagcaccttgcgcgcaaagccctgcggatccggcctcaggtcggggtactcgtaccacgggatgttgaccacgcccggcgggcggccgacgtagagcgactcgatctccatgcgcacgtcgacgaacagcggctgctcgtccggcggcagcccacgctgcgcctgcagccaggcccacgcctccttcggcaaccaatgccgcatcgcgcgccccgccctcaaccctgcgccgccagcttgcgcgccgcttccagcgcaaagtaggtcagcacgccgtcggcaccggcgcgcttgaaggccagcaggctctccatcatcaccgcatcgtggtccagccagccgtgggcagcggcggccttcagcatcgcgtactcgccgctgacctggtaagcaaaggtcggcaccttgaactcgtccttgacgcggcgcaccacgtccaggtacggcatgccaggcttgaccatcaccatgtcggccccctcggccaagtccagcgccacctcgcgcagcgcctcgtcggagttggccgggtccatttgatacaccttcttgtcggccttgccgaggttggcggcgctgccgaccgcgtcgcgaaacggcccgtaaaagctgctggcgtacttggcgctgtaggccatgatgcgcgtgtgcacatggccgcgcgcctccagcgcctgacggatggcgccgatgcggccatccatcatgtcgctgggtgcgacgatgtccacgccggcggcggcctgcaccagcgcctgcttgaccagcacctccaccgtcgcgtcgttgacgatgtagccggtctcatccagcaggccatcctgcccgtggctcgtgtaggggtccaacgccacgtcggtcatgaccccgaggtcgggcactttggccttgagctcggccaccacgcgcgggatcagcccgtcggggttccaggcctcgcgcccgtcgggggtcttcagcgccgggtcgatcaccggaaacagcgccaacaccgggatgccgaggtcggcgcactcgcgcgccaccggcagcagctgatccaggctcaggcgctccacccccggcatcgaagccaccggctcgcgccggccgtggccgtccagcacgaacacggggtagatcaggtcgtgcaccgtcaggtgatgctcacgcaccaggttgcgtgtgaacacgtcgcggcgcaggcggcgcggccgcgacagcggatacggggccggatggccggcgcaggggctgggcacgttcatggacccgtattgtgacgcgactgcgcggcgcacctcatgcgcgcggcacgccctgcgcgacctcgaccacgctgcggtcgcgtcccgcacctttggcacggtagaggcagcggtcggcgcacaccagcaggccgcgcagcaccgcggtcgcctcctcggcgctggccgcagccccgggggttggagccggctgccacacgcaggcgccgatgctggccgtcagcgccagtccggccagcgggcgctgcgccaccgcctgacgcagccgctcggcatgcgccgcggccacctgggggccaagactgggcagcagcagcgcgaattcctcgccgccgtagcgcaccagcacatcctcggggcggacgtgctcgcgcagccgctgggccagcgcctgcaagacctggtcgccgcggtcgtggccgtgccggtcgttgacgtccttgaagtggtccaggtccagcatcatcgccgtcagcggctcgccaccgcgccaggcgcggcgcacgaggcgcggacccagatcgtccagcaggtagcggttgtgcagcccggtcagcgcgtcggtgaccgcttggcgcatcatcaacgcatgctggcggcgcacctgttgcagcagccgccagtagcgcaccaggttgctgacgcgggcgcgcagctcgtcggcgtcgatcggcttggtgacgtagtcgttggccccgcggcgcagcatctccacgcgccgcgcccgctcgtcgtagccggtgtaggccagcaccggcagctcggccaggtcatcgcgccggctgcggatggccgacagcaggcccagccccgtcagcaccccgggcagcacgacgtcgacgatgacgaggtcgaaggcctgctgctccagccgctcgagcgcttcgtgcgcccgcagcacgtgctccacctccatgcccagcggggccagcgcctcggcagtggccgccgccatggtgggcgagtcctccaccagcaggatgcgcgcacgttgcaggtcgacctggcggcgcagcagcgcgcgcaggtgcggcgccaactgctcgggtgctgcgcgcagcagcacctcggtgaagccaccctccagggcgctcaagcgcagcgattcggtggcatcgcccgtgatcagcaccaccggcagcaccgcgccgcccggcagctggcgcagccggcgcaacagctccagcgcccccatgtccggcaggtgccgcgacaccagcacgacgtccacacgcaggtcaccggccagcgccagcagcgcttcctctccgtggccgaaggcgtgcacgtcggcaccttcggcctgcagcagaccctgcacgaccgcgcgcgcggcggcgttggcatcgatcagggcgacacgaacgggcggcgcagcggaggcggcggtttcgaccatcgggcaacggacgctggaggagcgcccatcctaacacgcacgggggccagcgccctcggccgcgcagcgcgggcagaggcaggcgcggccgcgcgccacctcgggcacgcgcgccagcagatccggcgcgaaggagacgcgcgtgcaccagcacggcggctgcggctgaccgctgcggtgctgcgcctgcatcgcgcaggcgttgtcgccgccacacagcgggcagcgagccggatcgacggtcggctcctcggcggtcatcggcgcccctcgttcacctccgtggccggcgcgtcggggggcccccggcgctcagcgcgccgccgcggcggccttgaccttctgccgccaggcgtgcagcagcggctcggtgtagccgctgggctgctccttgcccttgaacaccaggtccagcgccgcttggaacgccatgctggcctcgaagttcggcgccatcgggcggtaggccgggtcgccggcgttttgctggtcgaccttgcgcgccatgcgctcgaaggtagcgcgcacctgctcaggcgtcaccacgccgtggtgcagccagttggccacgtgctggctgctgatgcgcagcgtggcacggtcctccatcaggcccacgtcgttgatgtcgggcaccttggagcagccaatgccctggtccacccaacgcaccacgtagcccaggatgccctggatgttgttgtccagctcggcttgcttgtcggcctcgctccagtggggggtggacgccaccggcacggtcagcaagccggtcagcagcgtgtcgcgctcggcgtcggcgtcgatgcgctccagctcttgctgcaccgccgccacgtccacctggtggtagtgcagcgcgtgcagcgtggccgcggtggggctgggcacccacgcggtgttggcgccggctttggggtgggcgattttttgctccagcatcgcgcgcatcaggtccggcatcgcccacatgcccttgccaatctgcgcgcgcccgcgcagcccgcacttgaggcccaccagcacgttgttgcgctcgtaggcctggatccaggcgctggccttcatgtcgttcttgcggatcatcgggccagccagcatcgcggtgtggatttcgtcgccggtgcggtccaggaacccggtgttgatgaaggccacgcggctggcggccgcggcgatgcacgccttgaggttgacgctggtgcggcgctcctcgtccatgatgcccagtttgacggtgctgtccggcaggcccagcatctgctcgacgcgcgcaaacaactcggccgcaaacgccacctccttgggcccgtgcatcttcggcttgacgatgtagatgctgccggcgcggctgttgcggatcggctcgccgctgggcagcttgccgtgaccctgcaggtcgtgcagcgcgatggtggtggtgatcaccgcgtccatgatgccttcggggatttcgcgcacggtgccgtcggcgtcggtgtacaggatcgcggggttggtcatcaggtggccgacgttgcgcacgaacagcagcgaacgcccgggcaacaccacctcgccctgcccgtcgggcgcggtgtagcggcggtccccgtgcaggccgcgcgtgagcgtgcggccgcctttgtcaaagctctcggtcaaccagccttgcatcatgcccagccagttgcggtagcccagcaccttgtcctcggcgtccaccgcggccaccgagtcctccaggtccaggatcgtggacagcgccgcctccaccaccacgtcgcacacaccggcgcggtcggtcgcgccaatggggtggttgcggtcgatgcggatgtccaggtgcagcccatggtggcgcagcaagaccgacgacggggccgagggcgcgccatggtaccccacgaactgcgccggatccttgagcccggtcaccgcgccaccggccagcgtcacctgcagaccgccattcaccaccgcgtacgccgtggcgtcggcatgcgagccctgcgccagcggggcggcctggtccagcacgccgcgcgcgtaggcaatcaccttggcgccgcgcttgtcgttgtagccggggcctttggcgcagccgtcgtcctcggggatcacgtcggtgccgtacagggcgtcgtacagactgccccagcgtgcgttggcggcgttgagcgcgtagcgagcgttgaggatcggcaccaccaactgcgggccggcttgcgtcgccagctcggcgtcgacgttggcggtggtcacgcgcacctcgccgggcgggggcaccaggtagccgatcgtctccaaaaattggcggtaaccggccatgtcgcggatcgggcccgggttggcgctgtgccacttgtccagctcggcctgcaggcggtcgcgctcggccagcagcgcgcggtttttcggcgccaggtcggccacgatggcgtcaaacccgcgccagaagcgctcgctgtcgatgccggtgcccggcaacacctgctcttcgataaaacggtacaagacgtcggccacctgcaggcggcccttggtcacgcggggcgtagacatgggtgcaatctccgtgatacagggcggcgcaaggccggatcaggcgaactttagcgcaagccaacatcacgatcgagcccctatcaggccatagactcatgacttttagttgcataatttggcatggacaagctcaaggccatcgaaaccttcgtcgccgtggcgcagcgcggcagcctggccgccaccgcccgcgccgaaggggtggtgccggcggtcatcgggcgacggctcgacgcgctggaggagcacctgggcgtcaagctgctcgtgcgcaccacgcggcggctgacgctcacgccggagggcagcgcctttttggaagactgccagcgcctgctggccgacctggcgcaggccgaagccaatgtcagcgccggcggcagccgggtgcgcggccacctgcgcgtaaccgccccggcgggctttgggcgccgccgcgtcgcgccgctggtgccgctctttcggcaacagtacccggaggtcaccgtgtcgctcaacctcagcgaccgcgtggtggacctggtggccgagggctacgactgtgcggtacgggtcggcgacttgcccgactcgtcactggtcagcgtcagactggccgacaaccgccgcctggtcgtggcggcccccgactacctgcgccgccgcggcaccccgcaaacgccgcacgacctgctgcagcacgactgcctgctgctgtcgtccgaggcgtcgcaaacgcgcggctgggccttcaccgtcccggacgaagccggccgccgcaaggtgatccacattcgcccgcgcggcccgctggactgcaccgacggtcaggtgttgtacgaatggtgcctggccggcctgggcctggcatggcgcagcacctgggaagtgcaggccgacctcgacgccggccgcctggtcgccgtgctggacgattacgccgccccccccaatggcatctacgccgtcttccccaccgcccgccacctgccgcggcgcgtgcgggcctggatcgattttctaaaggaccactatgggcgggcggagttttggggggccaacaagtccctttgattcctgctccaaatgaaaagcccagcaagcaagcttgctgggcggatacaggctttcgcctttattgtagcaacggctctcaccccggatagctacaatggccgcattataagggagattcgtcgtgagccacaacaagacaccggaaagtctggtcttcggattcgacatcggcatcgcctcggtcggctggtgcgtgctatccgacactcgtatcgtcgatcttggcgtgcgctgcttcgacaaggccgaaaccgccaaggacggcgagccgctgaatttagcgcggcgcatcgcgcgcttgatgcgccgccggctgcgccgccgtgcctggcggctggtgaagctcgcccgcctgctcaagcgcgagggcttgatcgcccacctcgacgaggtacgcagccccgcgcccgtctcgccctggcggctgcgtgtcgaagggctggatcgccgtttgacgagcgaagaatgggcgcgggtgctctaccacctctgtaagcaccgcggctttcattggctaagccgtgccgaagagaagaaggccgaaggcgacaagaaggaaggcggcaaggtcaaagaggggctcgccaacacccagcgccgcatgaaggagaaaaactatcgaaccgccgccgagatggtgctggccgaattcccggacgcctggcgcaacaaggccggcgcctatgacaagtcgctctcccgcgctctattggcggacgaactggccctgttgttccagcgccagcgcgaactcggcaacccacatgccggtacggcgttggaggcgaagattctcggcacgggcaacaggaagagcggcatcttctgggagcaaaagccgccgctgtcgggcgaggcgctgctcaagatgctgggccgctgcaccctcgagagaacgggcgggcctgatggcaagggcgaataccgcgcgccgaaggcgagctttaccgccgagcgccacgtgtggctgacgcgcctcaacaacctgcgcctcgtcgtcgatggcgtcacccggccgctcaccgaggccgaacggcagatcattttgccgctaccttaccggcaagcgggcgacttcaagtacgaacacgtgcgcaaggcgctcaccaaggcggggcttggcgatttcaccttcgctggcgtcaatgaggacaaggaaaaagacgtgctcgtcaaactgcccgcatggcagacgctgcgtaaggcgatgaaagacaaggggctcgaaaccgagtgggagggcctggccgggcgtgccattggtggcgacccggcgatgctcgatgccatcgcctgggtgctctccgtcttcaaggacggcgccgaggtcgaggccgagctcgccaagctgaacctaccgggcggcgagaagatgatcgaggcgctctcggaggtgagtttcgacaagttccacaacctctcgctcaaggcactccgaaagatcgtgccgcacatggagggcggcctgcgctacgacgaggcctgccaggcggccggctaccaccacagccagccgcaggctggcgaggggaaaaaatcgcgcttcctgccgccgctctattccggccgcgacaaggatggccggatgatcttcaatgaccgcttggacgtgccgcgtaatcccgtcgtgctgcgcgcactcaaccaggcgcgcaaggtgatgaatgccttgatccgggaatacggctcgcctgcggccgtgcacatcgagatggcgcgcgacctctcacggccctttgacgagcgcaacaagatccgaaaggcgcaggaggaataccgcgagaagaacgaaaaagacaaagccgccttcgccgccgaatacggcatcgccgcgaaaagccgcgagttcgagaagttccaactctaccgcgagcagcagggcaaatgcgcctactcgctcaagccgctcgatctgcaccgcgtgatcttcgagcccggttatgccgaggtggaccatgtcctgccctattcgcgcagcttcgacgacggcaagaacaacaaggtgctctcgctcaccgaggaaaaccgtaacaagggcaaccgcacgccctacgaatacctgatggcgatcgacccctcgggcgagcgttggcgcgagttcgccgcctttgtcgaagcgaacaagaactaccgcctcgccaaacgccagcgtctgttgcgcaaggatttcacgggcaaggccgccgaggagttccgcgagcgcaacctgaacgacacgcgctatatctgccgcttcttcaagaactgggtcgaaaatcatcttcagctcgccgaaaaggtcgaggccgacggcacggtgttgcccgttgccaagcgctgcgtggtgttgaacggccagaccaccgccttcctgcgcgctcgctggggcttgctgaagatccgcagcgagagcgaccgccaccatgccctcgacgccgccgtcgtcgccgcttgcagccacagcatggtcaagcgtctcgccgattattcgcggcgcagggaactcgaaaacctgcgcgccggcttccccgaccccgagaccggcgaaatcctcgatccggcgatgttccagcgcctcgccgaacatttccccgagccttggccgcatttccgccaagagttgcaggcgcgcttattcgtggacgacgcggaggagctacgcactcgcctggaggtgtttggcacctattccaaggaggcgctcgccgccgtgcggccgctgttcgtctcgcgcgcgccgcagcggcgaaatggcggcgcggcgcataaggacaccatctatgctcagcctgaacgcttgaaggcccaaggcggcgtgacacagcgcgtgccgctggcgagcctcaagctcgccgacctcgacaagctgatcgacccgcaccgcaacgagaagctctacgccgcgatccgcgcgcggctcgaagcgcacggcggcaagggtgagaaggccttcccgcccgacaacccgctgcgcaaacccgaccgtgacggcaacccgaccggcccgatcgtgcgcaccgtgacgctggtgatcgacaagctctcgggcattcccatgcgcggcggcatcgccaagaacgacaccatgctgcgcgtcgacgtcttccgccacaagaaggacggcaaattccatctcgtgccaatctacgtgcatcacgcggcgatctaccggcgaaccggcgagctgccaaaccgggcgatcgtcgcgttcaaggatgaggaggactggacgctgatcgatgaccagaatttcgactttctgttttctgcgcaccccaatgattttttacgtatcgctttgaaacaggaagtactctcaggctatttcgccagctgcgaccgttcgactggaaatatcggcctttgggcgcatgaccgcaactccggtgtcggcaaggatggcttcatccgcaccggcgtaaaaaccgcaactgctttcgagaaattccacgtcgacgtcctcggcaacctctaccccgcgccgaaggaggtgcgccgtggtctggcgtagcgtgatgatctcgcgtccggcgcggctgcggcgggcgcattattcgctcgccatcgagcaggaagaaaccgccttcgtgcccttcgaggacatcgcggtgatcgtgctcaatcaccgcgagatcacgctcacgcacccggtgttgtcggcttgcgccgaatacgggatcggcctttatgcgaccgggcacaatcaccaacccgcaggcatctttttgccttttctttcgcactcgcgcagcacgcgcatgatgcgcaaacaattgggcatttcaaaaccaacggccaagcaagcctgggccgagatcgtgcggcgcaaaatcgaaaaccaagccgcctgcctggcgctgagcgctcgcgcaggcgcggagcgcttggcttctcatgcccgccgcgtgcgctcaggcgaccccgataatctggaggcgcaagccgcggcgttttatttcgcccagctatttggcaacgctttcaatcgcgccgacgcgcattggacgaatgccgccctcgattatggctatgccgtgttgcgtggcgcgataacccgcggcttggtcgcgcacgggctgcaccctagcatcgggctgtttcacgatagcgaacaaaatgccttcaacctggcggacgatttgatcgagccgtttcggcctcttgtcgatctgcatgtggcgcaacacccggcgagcaccaccggagatctgaccccaagcgacaaagaggccctggtggcgctgctcaatgtggatgtcgacatgcctcaagggcaaatgtccgtgctgtctgccatcgaatatgcggtcgagggcttggtccgggtctatgagggcaaagccaaaggtctggatctaccccggctgctcggcttacagcgtcaccggctggaatactgatgagcggcgagacgaggcgatacatgcggctgctcgtctttttcgacctgcccatggtgaccaagaccgaaaagcgcgcctacgtgcagtttcgtagatttttgctcaacgacggctacgacatgatccagtggtcggtgtatggcaggatactgaatggcattgatgcagagagcaaacacctggcacgcctgatacaaaatctgccatcgcgcggctcggtccggtgcatgacagtaacggaacgacagtacgccggcatacgcttgcttgttggcaagccagtttctcaagaaaaaaacgttactgcctctcagctactccttttttagaaaaattgaacaacggcgcaaactggctaagtcacgccctgacaacgagttacgtgacgggtattgtagccatccggggtgagagagggagctacaacaagcggggccgggccgtgctgccttctggcattgtagccatccggggtgagagagggagctacaaccatcgacggcacaagccgggacaacggccgattgtagccatccggggtgagagagggagctacaaccgtctcgccgtagcggatgcgctcgcggctattgtagccatccggggtgagagagggagctacaacagattttcacctggccggacgattgatgaatttcaaccgtttgcagcactcattttaccttcgcacgcttcaaaccatcgttctgcttgtgatttgcaatatggcaaccacttgcgctgccacagaacagccgaatatcggtctacacgaaacgtgtcgcaaaggcgatagtcgatcgttgtgcgtcggcctatcgtggtggacatgaacacccccctcgccatccccagccgccagggccaggtcagcgacgccgaatggcaggtacgcatggatttggcagccgcctaccggttggtggccgcctttcactgggacgacctggtttttacccacatcacggcgcgcgtaccggggacggacgaccagtttttgatcaacccgtatggcctgctgttcgaggagatcaccgcgtccagcctcatcaagatcgacctgcagggcaacaagctggacgacagcccttacccggtcaacccggccggcttcaccatccacagcgccatccacgcggcacgccacgatgcgcagtgcgtgctgcatacgcacacgctcaacggcgtggcggtttcggcgcaaaaacagggggtgctgccgctgtcgcagcagtcgatcttcgtgctggccagcctggcctaccacgactacgaaggcgtggcgctgcgcgaggacgaaaaggcccggctggtggcagacctgggcgatgcgcattttttgatgctgcgcaaccacggcctgctgacgctggggccgtccgtagccgatgcctttctgtcgatgtacctgttcgaagcggtgtgtgcgattcaggtgcgggcgcaggcgggcggcggcgagctgatccccatcgaccccgccatcatcggcaccgcccaggcccaagcccggcaggtgacgcgcggccagggtgcgggggcgctgacgtggccgggcttgttgcgccggctggatcggatcaatccgggctatcgccaatgagcagcgcctcgccgcgccccgccgcagccaccacccgcccgtccgccgccaccaggcggctcagccccccataccgcgtgtcgccttccgccccgcaggcgttggcgtaggcgatgaccacgcgcgactcggcggccaagcgcggcagcgtcaggcacggcgcgtcgtcgtagggcagcatgttggccgtgggcaccaaaatcacgcgcgccccctgcgccgctagggcgcgaacagcggcacgctgctctacgtcgtagcagatcaacaggccgatgcgccagccttcccagtcaaacggggtacccacttcctcgcccggcgagaagcgctcggcgtctgccgcgccgaaaaggtgcactttgcggtgcacccccagccgccgcccgtcggggccgatggcttgcgctgcgttgtagggtcgagcgcccgcggggtgcgactcgggccagccatagacgatgcccaggcgatggcgctgtgcgatggccgcgaccgcctgcgcccaggggccgtcagccggttgcgcaagcgcagccaactgcgcgggatcgatcatgtagcccgtcatcaacatttcgggcgtgaccagccagtgcgcgccgtgttgcgcggcttgtgctgctgcggcatccaggcacgccagtgcatggccggcgtttccaggcgaggggtggggcgtttgccagagggcaatacgcagcgattgcgctggccgcgcgtggtcgttctccgtttgcatccgtgcgtccatgtctgcaagcgtagcgcaacctgtttccggcagattccctccgtgcacggtgtcaatccggcagcgccacgggcccgatgtgggggtaccaatcgccagggccggggttgtccggatggctggcgccccccaggtggcgcacgatgccccacaccgcgttgagggccgtttgcaccgcgccttccacccacgccggcgtgaaggaaatgtcgtcgcccgccaagaaaataccgcgctcgcgctcgggcagcgcgtcctgcatgaaatgcccgtacatccggtggttgtagcgatagtggccgggtagcgcccctttgaaggcgcccaaaaagtaggggtcggcttcccacgaaatggtgatcgggtcaccgatgatatggctggcgatgtcgacgtcggggtagatcttgcgcagcgcgtcgagcgcgagttgcacgcgcttcgtgctgtcgtagggcagcatcttgagcgcgtcgctcatccacgcatacgacaagcagatgacgccgggcttatcgggcccgttgtcgaacagataggtgccgcgcgtgaggcggtcggcgagcgtcatgcccatcaccggccagccgttggcgcgcaggtcgttccaaaacgggcgatcgaccatcacgaaggtcttggacgactgcatgtagcgcgtgcggtccagcgccatccagagtttgtgcgaaaacagcgactcctcgcacgcgatctgtgtcgtgagcagccagctctggcacgtgaccaacaccgcgtcgtagcggcgcgtcgtgccccaggtgtcggtcacttccagctggccgttgcccccacgctggatggcgcgcactcccgggcgcggtgccccgtggtgcaggcgggccagcgtggtgccctgcggccagtgctcgatgcgcgccggcgcgtgctgccaaaggcccatgggcacctgttgcacaccgccgacgatgtagtgttggttttcgtcgcaaccggtgagcacgacgcgcaggatttcgagcatggagttgggaaagtccgaatcccaccccccggtgccaaagcccacctgcccaaacacctcgcggtggtgaaagctcaagcgacgaaacgcactcgattgcgcgacaaagtcgtagaacgtgcggtcgtcccagcgcggcaccagcgcatcccacagcgccttgacccgctccacgtcacgctcgcgcatggcggtttgcagcgcggtaaaacccgcgccctcctccagcgcgtcggcccaggcttgcgccacctcctggaacagcggtggcagatcctgcagcgtgcgcgcccagtgggtctggccctccagatcgataacggtgcagttggccgcgggcgtcaacgggttggggaacggccggctgcccaaccccaacagatggacgtagtggtaaaaacccgtggaggacagcgggaaacgcatgccgcccagctcggcaatcgcgccctgcccgccctcgaagggctgcgagcgcaaccgcccgcccatgcgcgaggcctcgtacaccacgggcttgaggcccagcttcatcagctcatacgccgcggtcagccccgccatgccggcgccgacgacggccacctcggtgccgtaacggctaaccgggacgcggcccaaaccggcgtggtgagtgagccattcgtcataggcgaagggaaaatccgggccgaagatcgtgatcggtgcgtcgggcgcgcggcgctggggcacgcgcagggtcatcgtggacatgggtcgtctcctcctcagattccatcattcgaacaggctgatgaacagggccgctgccgtgccccacatcatcagggccacaaggccgtcgagtgcgcgccagaccttgagcgaattcagccgccgcccgagccaaaacgccgcgccgcccaacagcaagaaccacaccaccgagccggtcgctgcccccaggccgaagatgggctgctgcgcgccccacgccaacgacgcggtaccgatgaggacggccgtgtccagccaggcgtgcgggttgagccaggaaaacgccagcgcggccccgacggcctgcagcgcactggtcggctgcgcggccggcgtaccgatggcgggcacctggggtgccgccggcccataccagaagcgccgcgccgcttggtaaccatagacgagcaggaacaagatccccgccccgatcaacgcgccgtgcagcttgtccgacaagccgcccaactgcgccaggccggccacgcccagggcgatgagcacgatgtcggccaccgcgcacgtggccacggtcagccacaggtggcgccgctgcaagccggtacggatgacatgcgcattttgcgggccgatggccatgatgagcgacaggctcatcaccaggccggcggtgaagctgggggcagtcaagatcatcggcagcactcctctcgttacacgcgagtgtgctcccgacgcgctacggcattaagtatttcaaaacgaactttacctcatcaagttattttttatttgacctcaagccacgccgcgcgggtttgggagggcgtctcgccgaagagcgtcttgtactcccgtccgaagtggcccatgtgccaaaagccccagcgagcagcgatctcggtgatggtgtgctgcgcctccagcgggctttgcagggcacggcggacagcgttgaggcggacctcgcgcaggtatgcagcagggctgatacccatgacctcgtgaaaacagttctgcaacgtgcgccgcgtcacgtgaagagcagcgcacagcgctgtcaaatggctgaagtcctgcggtcgctccaatatcagctcgcgcgcgcgccgcacgagagtaaggcgacgatgatgtcgccccaccatcacgggctggacctctcggggtaccgccaagtcgcagacaaccgtgagcaccgcatggtgtaacgcctggcggctggcgtcgtggctcaaaacctctggcgtacgttcgacattactgagcacctcgcgcagcaaaccggtcaatcgctggcgctgggcaatggtgaggtgctgcaactgcatgccagaccatcccgtgctcgcaaacgactggccggtgccgcactcacctctcccatctcgccagtgcagatggcgcatcatgtcgcggccgtccaagaccactccgtaaaggccaacccctgccggcacgaaaaggtcgaaaacctggtcatcgttcgcccacatccactgttggctatcaacactgcggcccatgtagcgcagaccctgggtatcctctggcacgggcatgccaatccacaccccgcccgaccaggggcggcaatgctgggccgtcgcgcaagaagcccattcttcgaacacctgcagcccaggggcggcgacctcccgcacgacaccgctgaaaaccccgcgcgacacttgctcgtactgctgctcccaggcggacaggtggcttgcatgcacatgcacgtcacttgtgcgcttgacacaaaactgtgcaaccgaactcggcccggcctcttggctcaccctggcgtgctccatagtggtgcgatctttggcagatgagctcaaagtatcaagaaccatgccagaccctgcgtaagggataacccttagcaacactatcccgtttcggaaaattttcggccacatcgtgtttttgctcaaacgggataccgtcgtcgcgactccctagaccatgatctgtctcggacgtcgtcggggacactagcagatgcccccgcccccttattatcaatgtgaggtttgtcatggcatcaccacatacaccgtctgtccatgtctcgcgcgagctcaaacccgtactcggcgtgttttcactttggggtatcgccgttggcttggttatatcgggtgagtacttcgggtggagttacggttgggctaccgcgggcacgctgggattcttggtcgccaccgccttcgtagccctgatgtacaccaccttcattttcagttttaccgagctatcgacggccatcccgcacgcgggtggtccgtttgcctacgcccgacgggcatttggccccgctggtggctacatcgctgggtttgccactctggtggagttcgtattcgcgccgcccgcgatctcactggctatcggcgcctatctcaacgtgcagtttcccgcgcttgaccccaaaatcgctgcggtagccgcttacgtcgtctttattacgctcaatgccattggcgtggggatcgccgccacctttgagctatttgttaccctacttgcggtcatcgagctgctggtttttgcgggcgtcgtggcccctggatggtcgctcaccaattttgtcgccaacggctgggctggcagcgatagattcacctgggcgacagtcggcggcatatttgcagcgattccttttgcgatttggtttttccttgcaatcgaaggcgcggccatggcagccgaagaggcccgcgacccccaacggaccatcccgattgcttatatcgcgggcatcctgacgttggtggcactcgcctttctggtcatgatcatggccggcggcattggtgattggcgaactctatcaaacatcaacgatccgttgccgcaagccatgaaaatcgtggttggcgacaacagcgcatggctgcacatgctggtttggatcggcttgttcggattgatcgcttcctttcacggcatcatactgggatactcgcggcaaatatatgccctcgcgcgcgctggttttcttccaccgtttttcgccaaggtgcaccctcgttttcgcacacccgttcgagccttgatcggtgggggtgtcgtgggcatcttagcggtattcagcgatgaatggatcacgtttggtgggcagccacttactgcgaacatcgtaacgatggcggttttgggcgccttggttatgtatatcgtttctatggcgagcctgttcaagttgcgttcgaccgaacccggattgcatcgaacctttcgggcaccattttatccgattttcccagcgctcgccctcggcagcggaatcatttgcctaatcgcagtgatttattacaacccggccctttcactgctttttactgtactggcggcggctggatatgtttatttccgttttactcagaaccaacgcctcaacgccgcttatgatgaaatgctggtcggcaccaacgaacgtctcgacaccgacagcgctgccaccgacattggcgacatcgctttacccaacgcccaaaaggttcggtgatcgtcatgcactaccaggtcgatcttgcgggtgttcgctatcgcttcgcgtccttgcgcgaggtcatggcgaaggcgagcccaccgagatctggagatcaactggccggcgtggcagcgacgagcgaacaggagcgtatggcggcgcgctgggtgctgtctgaggtgcccctgcggcaatttctcgaagaaccactgatcccctatgagtcggatgaggtcacccggctgatcatcgatacacacgatgaatcagcgttcgagcccgtctcgacacaaacggttggtgaatttcgggattggctgctcagcgaggcggcgacaccagtggcgctaaaaaggcttgcacctggtcttacgcccgagatggttgccgcagttagtaagctgatgcgcaatcaggatttaatgatcgtcgcgaagcgctgctccgtcgtcacccgcttccgaaacacattagggttacccggacacctggcagtgcgactgcagccgaatcatccgaccgatgatcccgcgggcattttggccagcatcatcgacgggttgctgcttggcgccggcgacgccgtcattggcgtcaatcccgtatcggacagcatcgccgatttggtacggttgcaacacatgttggcagaagtcatcgaacgtggcaacatccccacccagagctgcgtattgacccacgtcaccaacaccatgcaagcaatacagatgggcgctcccgtggacttggtgtttcagtcgattggcggcacagagcagacgaaccgctcctttggaatcgatctggctctgctcgacgaggcgcattccatggcgctggcgctgcggcgcggaacggtgggagataacgtcatgtattttgagaccgggcaaggcagcgcactctctgccaacgcccatcatggcgtcgatcagcaaacgtgcgaagcacgtgcgtatgcagtagcgcggcgctatcacccactgctcgtcaacacggttgttggattcatcgggcccgaatacctcttcgacggcaagcaaatcattcgtgccggactcgaggatcatttttgtgggaaattactcggcctccccatgggctgcgatatctgttataccaaccacgcagaggcggatcaaaacgacatggacaacctgctcgtgttgttggcttgcgctggggtccatttcattattggcgtacccggggctgatgacgtgatgctgaactaccaaagcacatcgttccacgatgctctggccgtgagagatttactgcaactgcggcgtgccccggaattcgacgaatggctacgcaacatgggcgtcgtcgacgagaccgggcgccttttgcccgcgcgcgtcgcgcctgcgcttgcacaaacgttgtggaccttgcctcaacccgaccgatgacagcccccccatcacgtcccgagctctcttcgagcatcgtcgctacggacacgccgtgggaggtgctcaagcgtttcacccctgcgcgtatcgcattggggaggtgcgggtccagcctaccca

SEQ ID NO: 2869 - DNA, 23363 bp, synthetic construct
  source 1..23363: mol_type = other DNA
  misc_feature 1..23363: note = Synthetic
ctcggtctggctgtactggatgccggtgttctcggtgctggtgtcggtgctgttcctcggcgaatcactcacgctgtggcacctggtcggcctgggcctggtattggccggcacgcggctgggcacccgctccggtggtgcgcggcccgcctgacggcggatgccgccacgccatgaagaatgggggccgcagccccctttcttcatttggcgccgtaccggtcacatccaggtcagcacctgtccgccgtcgaccgggatcgccgcgccggtgatgtagcggccggcatcggctgccagcagcagcgagacgccgtccaggtcgtcgggctgcccgaagcggcgcatcggcgtgcgcttgacgagcgtctcctcgaagggcttgagcgcctcctgcatgtcggtggcgatgttgccggggcagatcgcgttgacgcggatgcccttgctggccagctccagcgccatcacgtgggtcaggtgcaccagcgccgccttggaggcgcagtagctcgacagcgtgccgccggcgcgcagcccggccgaggaggcgatgttgatgatcaccccgctgcggcgccgcaccatgcggcgtgccgcctcctgggccaccagcatggcgcccttgaggttggtgtcgaacacgcgcgcgatctcggcctcgtcctgctcgatgaacggcttgctgtagatgatgccggcgttgttgtagaggatgtcgaccggcgcgccggccacctgctcggccgcatcgaacgcggcggcgatggtctcgccgcgggtcacgtccagcgccacgccgtgggccgcatggccctgaccgcgcagctgcgccacggcctcggcgatgcggtccatgcggcgcgccgccagcacgacctgcgcgccggcggcggcgtagacccctgcgatgtgtcgtccgatgccgctggaggcgccggcgatcagcgccgtgcgcccctgcagcccgaacagcgctgcccagggcagccgcggtgccgggtcatggctcatggtcactctttcgtgtccagccagtcgctgacgacgcgccacttgccgtccacgatctgcaccaggcggatcttgcgcaccgccaggcggtggttgtcgctcacgtcgaagcccgggttgcccagctcgtcgggctggagcttgaccgtcttgagcgcctggttgaaggcctcggtggtgaggttgggaccgaccttctccgccaccttggcgaacacgtcgagcgtgtagttcgagtacatcgagtacaggcccgggtcctcgttgaagcgcttcttgtacgcctcgtagtacgcgcgcaccgccgggttcgggtcatccgcgtacgggatcggcgtgaaggtcgcggcgtacaggccgtccatcgccttgccgcccagcgccggcacctggttggagtagctggccgccgaggcgaggaactccggattgaagcccagcttgcgcgcttccagcaccgcgccgaccgcctcgcgcagcgtggtgcccagcaggaccaggtcacagttggccgcacgcagcttggccatctgcgacgagaagtcggtggcgccgcgcttgtacgaggtcttctcgaccagcgagcggttgatggacttcaggtagtcctccatgccgcgcagcacgtcctggcccatctcgtcgtcctggtacaggatgccgatgcgctcgtacttcttcttgctcagcaggtgggccagcgaggcacgcgccatcgagtggtacgagggtgccagcccgatcttgtaggggctgggcgggtcgtacagttccttcgaggccgcctgcggcaggaagttgtagaccttgttctccagcaggatcggctgcgcggccagcgcggtggccgtgcccaggtgccccagcaccgcgaacacctggtcgcgcaccaccagcttctgcgccgccatcaatgcccgcttcgggtcgtaggcgttgtcctcgatgatgagcttgatcttgcggccgttgatgccgcccttggcattgatctcgtcggccttcatcaggaaggcgttgcgcgcttccttgccgtacagcgcgatcgggcccgagaggtcggtgatcacgccgaggacgatctccttgtcggtcacgccctgcgtggccgaggcggccaggctggcgatggacaaggccgccgctgctgcatatgccttgatgctcatccggttgtctcctgtggtcgtggtgaaggggggtcaggccgccttggcggcatacatggactcgatcagctcggcgtacttctggctgaccagcttgcgcttgagcttcatcgtcggcgtcatctcctcgtcctcggcggtcaggcgctgctcgatcagccggaactgcttgatctgctcgacgcgcgcgaattcctggttgaccttctcgatctcctcgccgatcaggcggatcacctcggggttgcgcgtcagcgagcggaagtcgctgaacgggatgttgcgttcctgcgcccagcgctcgacgttctcctggtcgatcatcaccaggcaggtcaggtagggccgcttgtcgccgatgaccacggcgtcggtgacgtaggggctgaacttgagctggttctcccactccgacggcgtgatgttcttgcccccggccgtgatgatgatgtccttcatccggtcggtgatgtagaagtagccgtccgggtcgcagcggcccacgtcgccggtcctgagccagccgtcgtcgaaggtctcggcggtcttgtccggcaggttgaggtagcccatgaacacctgcggcccgcgcacctgcagctcgccctcgggggagatgcgcagctccatgtccggcatcgggacgccgacgctgccgatgcgcgcacgccccggcgggttgcaggccgccgcacccgccagttcggacatgccccacagctcgtccagctcgatgcccagcgccaggtaccagcgcagcaggtcgggcgagattggcgcggccccggtgatcgccacgcgggtgcggtgcaaccccatcatgcggcgcacgttgtcgagcaccagcacgtgcgccagccaggcgcgcgcgcgcaccggccagggcaccggctcgccgcgctcgcggtggcgcgccgccgccatgccccaggcaatcgccttgcggtaggcccactgctggaacggcgccgcctcgctgactgcggtggtgacgcgcgagtagagcttctcccagatgcgcggcacgccgccgaacaggtgcggctggatctcctggatgttctcgaacaccgtctccggccgctcgacgaagttcatgcgcgcgccgcccagcatcgcatagtaggtgccgatgatgcgctccgagacgtggcacatcggcaggaagctgacccgctccgcgtcgtgcaggcgcggcaggaagcggtccagcgcgccgatcgccgccagcaggttggcattcgagagcatcgcacccttcgggcggccggtggtgccggaggtgtagaccaggatcgccaggtcctcgcggccgcgcgactgcaggcgctgcgccacctcgtccgggtggcgctggcggcgcgcgcggcccagctcgcacagccggtccaggctcatcacctgcgggtcctcgaagtcctccaggcccttcatgtcgaacacgatgacgcggcgcatgccgggcaggcgctcgcgcaccgtgaggtacttgtccagctgctcctcgtcttcgacgaacaggtagacgctgcgcgagtcgtcgcacaggtactccagctgcgaggccgagtcggtcgggtagacgccgctgaccacggcgcccgcggccagcccgcccaggtcggcccacagccactcgcgccgcgtgttcgagaggatggagatcacctcgcccggctgcaggccgagctcgatcaggccggcggcgatgtcgctcaccgtctcgcgcaccgcgttccagctgtacgactgccagatgccgagttccttctgccgcatcatcacggcgtcgccgcgtgccccggccagctgccagaacagctgggcgatggtctgcgcccgctcgacgtgtccctgcgatccgttcatgcgcactcctgcatcgcgctagcgccagttcttctttttcttccagcgtcgctcgccgcgcacgccggcatccttcatgccgaggtagaactccttgatgtcgtccttctcgcgcagcgccgcacaggtatcctccatgacgatgcggccgttctccagcacgtagccgtaatcggcagcattgagcgccatgttggcgttctgctccacgaccaggatggtcgtgccgcgctcgcggttgatgcgcacgacgatctcgaagatctccttggtcagcttggggctcaggcccaggctgggctcgtcgagcagcacgatctgcgggtcggccatcagcgcgcgcgagatcgccagcatctgctgctggccgcccgacagcagcccggcgttctgctgcgcgcgttccttgaggatggggaagtagccgtagaccatctccaggtcgcgcgccacggcgtcgcggtcgctgcgcgtgtaggcgcccatcagcaggttgtcgcgcaccgacagcagcgggaacacctcgcgcccttccggcacgtggctgatgccgcgccgcacgatcaccgacgggtcctcgcccacgatggagcggccgtcgtacaggatctcgcccttgtccgggtccaggatgcccgagatggtcttcaggatggtggtcttgcccgcgccgttggagcccagcaccgtgaccacctcgccgcgcgcgacgccgaggctgatgccgcggatcgccttgacctgcccgtaggagctctcgacgttggccagccgcaggacggcccgttcctcgcgcgtgctcatgccgccctccgcaggttggagacgtcgtcgaagctgcccaggtaggcctcgaccacgcccgggtggcgctgcacctcggcggcgctgcccagcgccagcacctcgccctggttcatcgccagcacccggtccgagacgcgcgacaccagggtcatgtcgtgctcgaccatcagcaccgtgatgccgagctggcggcggatgtcgcggatccaccaggccatgtcctcggtctcttcggtgttcaggcccgacgagggttcgtcgagcagcagcagctccggctgcgagcacagcgcgcgggccagctcgaccaccttgcgcacgccgtagggcaggcctgcgacgatggcgtcgcggtacacctgcaggtcgagcaggtcgatcacctcctcggccttgcggcgcgcggccagctcggcgcggcgcgagcgcggggtggccagcaggttgctccagaagcccgactcgcagtgcgcgtggtagccgatcagcaggttctgcagcacggtggcgtgttcgaacagctcgatgttctggaaggtgcgcgcaatgcccagcttcgcgatcgcgtgcggcggcacggcgtggatctcgcgcccgcggaacacgatgcgcccggtggtcggcgtgtagatgcggctgatcaggttgaacaccgtggtcttgccggcgccgttgggtccgatcagcgtgaacacctcgccgcggcgcacgtcgaagctcaccccgttgacggcgcgcacgccgccgaagtgcatggacaggtccttgacggacagcaggatctccggcatcgcgatctcgctcatttgagccgctccgaccgttggaaggatttctgccggcggaacatgccgcggcggtagaaggggaacaggtccagccaggtgcggatcttcagccagcgcccgtacagccccgtgggctcgaacatcacgaaggccatcagcaccaggccgtagatcaccgcctgcaggcccgaggcgctgcccaggctgccgggcagcaggtccttgaggaacacgatcacctgcggcatcgcgatgatgaagatcgcgccgaggaaggccccgtgcaccgagccgaggccgcccaccaccaccagcagcagcaggtcgaccgactgcaggatgccgaactgctccggcgagatgaagcgcagcttgtgcgcgtacagcgccccggcgatgcccaccaccgccgccgagaaggcgaacgacagcgtcttgtagtacgcgaggtggatgcccatgctctgcgccgagacctccgagtcgcggatcgccacgaaagcgcgcccggtcttgctgcgcagcaggtgcagcacgcccagcgtgaccagcacgcagatcaccagcgcgaggtagtagaagctctgctcggaactgaagtccatgccgaggatgcgtgcgggcttgaccagcaggccgttgttgccgccggtgacgtcctcccagcgcaccatcgcttcctcggcgatgaagccgaaggccagcgtcgcgatcgcgaggtagatgcccttgacgcgcagcgccggcaggcccaccaccacgcccgcggcggcggacagcccggcggcggcggccagcgcgagcacgaagggcacgcctgcctgcgtcagcaccgcctgcgtgtacgcgcccacgccgaggaaggccgcgtgcccgatggacagcagcccggtgaagccggccagcgtcatcaggcccaggcccgcgatcgcatagatcaggatgaacgacagctgcgagagccagtagcggtcggccaccagcggcgcggccagcagggccaccatcagcaggccgtaccagaaggcctggccggagtgccggaccagtcgcaggtcctggcggtagtcggtcttgaagaggaaacgcacgctgctacaccttcttgcgcaggttctctccgaacaggccgttgggcatgatcacgagcatgacgaggaccacgatgtacgcggcgatgtccttgaagccttcgggcaggtagaagccggagaacgattccgccagcccgatgatcaggccgccgaccaccgcgcccggcaggctgccgaagccgcccaccaccgccgccgggaaggccttgaggccgatgaagcccatgttcgcgtgcacgaacatgatgggtgcgagcagcaggccggccaccgtggccaccaccgccgacagcccccacaccagcgcgttgaggcgctgcaccgggatgcccacgtagtacgccgccagctggttctgcgaggcggcctgcatcgcgatgccgaccttgccgtgcttgaagaacaggtacagcgcggcgcacagcagcgcggtcacggcgatcaccaccacctgctcggcgcccagcaccgccgggccgatccggatcacctcgccgcgatacggcgcaggcagcacgtgcgtgtcggtgccgatctccgggatcatcgtgatcagcccgcgcatcacgtagccggcgccgatggtcatcatcaccaccgtgaactgcggctgccccaggatgggacggatcacgcagcgctccatcagcgcgccgaagcacgccatgccgaccacggccaccagcgccgcgagcaggaacggcaggccgacgaacttcatcagcaccagcgcgcagaacgcaccgagcatcatcagctcgccctgggcgaagttgaccgtctcggtcgccttgtagatcaggacgaagcccagcgcgatcagtgcatagatgcagccaagcgcggtgccggacagcaccagttgcagtgccaccaccgttgtctcctcgccgggtctgtgggcccggtcttgccgcactataggaagttggtcccgcgcgcacttgcgtcaacctgctagcgtggggccatgccctgcaacgcgacgccggcatgcgcctttcacgcgacgcgggatgggcatgccggcgcgtactgcgtccatggcgcgcgggtgatcaggacgtgacgggaaggaaatgcgccgcgaaaccgcgaggccgggggtgaccgggcacgccgttcaggccacgatcaggcgcagcaggatgtcgccgaactcctcggcgctgtagtggccgtgcgggcggaaccaggtcatcgccccgcccagcgcgccgtgcaggatcagccccgccgcgcgcgcctcgcagcgcagcaggcctgcggcctcgcagtcgcgcagggcacgccgccagcagtcggtgtagcgcgcacgcaggcgggtcagttccgccttggcggtctccgaggcatggcgccactcgaagaacagcaccgcgtggtagtcgccgcgctgctcgtgcacgatcaaccccagctccagccgcaccagcgcgcgcagctggcgcagcgggtcgctttcctcctgcatgatcttctcggcctgcaggcaggccgagtaggccgcctcccgcatgatctccagcaggatctcttccttggactggaagtgatggaacaggctgcccgagaggatgccgacctcctcggcgatgtcgcgcaccggcgtgccgttgaagccacgcacgcggaacaggcgcgccgccgcgttgaggatgcgctcgcgcggcacggccgggtccgccgcgcggcgctccgcgcgtgcggtgcgccgggccaggcgggcttcgtcgggggcggtgcggggcggcatcagtgcgcggtcgacaccaggctggcgtcgtggatgacggccagcgtgcgcgaaccggccatgatgtccttgggcgtgagcccccagtagcggcgcaccgtgtggctgaagtgcgaggaatccgggtagccggtttccagcgcgatgtcggtcaggttgcggttcgcgttcacgtagcacatgaagttgcgcgcgcgcttccaggcgcggaagcggcggaaggtggtgccgacctcttccttgaacaggtgcaggaagcgcgagaatgatagatcgacctgctgcgcgtagtcctcggcattgacgctgtccgacgggttgcgcttgatgcggttgaccaccgccgcgacgcggcactcgagctgccgcaccggcatgcgcgcgcccaggatgaactcgtccagccgcgtgcgcaccgcgttgatgtgcatgtcgccgccggccagcgccaggaaggcctcgcggatcgccggatggtgcagctgcgcccccccttcggtggccaggaagcccagctcgggcggcagctgcgccaggtccaccgactccggctcgatcatgtagacgccgatgcggcggtccaccgtcgcgacctggtgcggcgtgtccgcctgcacgacgaacatctcgccgctctgccaggcgccgtcgcggatcttcaggctcagcggcgagcccagcgacacgtacagcgtcagtgcgccgaactcccgcgtcagcgggcgccccagcaggcccgcatagcagatgcggtcgggggtgatgagcatgaacttgcccgaggccggcccctgcaccatgccgtcggcgccgaaggaccgggcttgctgcgatgcgatcttcatctccacactgtctcctcttgccacccggcggctcgcgaggtgcgcaccccgatggccgccttctccttgccgtcgtcgcgcggcgcgcgatgaccaagcaaatgtttggtttgctggctagtgttggcgcaagtggcggcgcgggacagggggatttccctcatgaaagggctcgaggagggtccttttcagggttgtcccgcaccgggcaacgtgacaagcaaacgcttggttcagaaaagatcgacttgcgtgcggtcgcgaaggccgcgtttgaggcgtcgaagcgatgctctggaggaagcgccaccgttgcaggcccctctttctcccaacggcctagcgcatgcactgctgcaacgaaacgccatgttcccccatcaacggggatgagtgagcagaaacttcgacccagtctcaaccgcagcgcatagcgaagctgtttcacgacttggggagaagttctcactcccggttcacggaagcagtacacacccccgaaagggggtaccccgcgttactgtttcaaaccagcattccagaaaaggaagagccctgaccagtctcctgatcagggctctgggttcggactgggcccgaaggcccatccttattgcagcaacggctctcaccccggatagctacaacggtgacgattatgcagaaggacttcccaaccgacaagcctcaacaatcgatgaacacattgacattcgggtttgacatcggcatcgcctccgtagggtgggccgtgctcgcggagaaccgcatcgtcgacttgggcgtacgcgccttcgacaaggcagaaacccccgatcggggcgagcccctgaacgctgccagacgtgcagctcgactgacacgtcgccgtttgttccggcgcgcctggaggctgaccaagctcgcacgcctcctgaagcgggaagggctgatccccgatgtccacttcttcaagtcacagcccggattcagggactcgccttggatgctgcggaaggaaggcctggaccgtcaactgagccccgtcgagtgggcacgcgtgctttatcacctctgcaaacaccgagggttccattggctcagcaaagccgaagaggccagagccgaccaggacgctgaaggagggcgagtgaagaaagccctcatgcacacccaagccctgatgaacgacaagggctatcgaacagcggcagagatggtgctttcggagttcgatacatgccgcaacaagcaaggcagctacgacaaggccctttccagggccctgctggacgaagagctaggccgactgtttgaagcacagcgacagctcggcaatcctcatgcctcggccgagctcgaacgtgcgattcggggtactggggacaggcgaagcggcctattctgggagcaacgtccacctcaatcggtcctctccatgctcgggcgctgcaggtatgaacgaacggggggccccgacggaaagggagagtaccgtgcgcccaaagccagcttcacggcggaacgacatgtctggttgacgcgcctcaacaacttgagaatcgtggtcgacggcgagattcggcctctcaccgacagggagcggcagcgcgtactcgatgacccgtaccgtgccgccgaacggtatacctacaaatccctgaggaaagcactcctgcgcgatggagagttgactcacgactttcgctttgcgggactatcctatccgagcgaacagcaaaaagtcgatcaaaaggtcaaggatccggaagatcagatactcgtccgcctcactggttggcacaccctgcgcctacatctcaagaactcctgccttgcaacagaatggcagatacttgccgatgacgccctatcgggcaagccggaccagttggaccagatcgcctgggcactcagcgtatttaagagtgacgacgaagtacgggctgaactctcccgcttggcgctgcccggtggagagcgaatggtcgaagccctgctctccctgaactttgacaagttccatgctttgtcattgaaggcccttcggaagatcgtccccctgatggagcagggtctgcgctacgacgaagctgtcgaaagaatcccggagtacggacaccacagcaacagaccccgggaaaacacaggcaaacagaagtatctgccgccgttctatgaagggacgcgcacggagtctggaagcatgagaatccgggagggactcgacatccctcgaaatccggttgtactgagggccttgaaccaagctcgaaaggtctgcaatgccctcattcgagagtacggtcagcccagtgaagtacacatcgagatggctcgcgaccttgctcgccccgcagatgagcgacgagccatccagaagctccaggaagagtatcgagagagaaacgaggccgagcgtctgcagttcgcagaaaccttcggacgcaaaccaagtggtgcagagctggaaaagtggcttctgtatagggagcagcacggcaagtgcgcctactccctcgagccgcttgatctggcgcgcgtgatcaaggatcctggctacgtccaggtggaccatgccctcccctactcgcgcagcttcgacgacagccgaaacaacaaggtgctggtgctgacgcgcgagaaccagaacaagggaaaccgcactccctacgaatacctcaccagctttcctggtggcgaggagggagatcgatggcgccactacaaggcgtgggttgaagccaacaagtcataccgccaggccaagcgcaaccgcctgctacgcaagcacttcggtgcagaagaggaacaggcgttcaaggatcggaacttgaacgacacgcgctacatctgccgcttcttcaagaactacgtggaagaacacttgcagctggccagcgacagcactgcgcgccgctgcgtggtactgaacggccaactgaccgccttccttcgagccaagtggggcctgctaaagatccgcgaacaaagtgaccgccaccatgccctggatgcagccgtcatcgccgcttgcagtcacgcgatggtgaaacgcttggcggactatgcgcgaaagaaggagttggcctacctgtcgaaaggcttgccagatcccgagaccggggtcgtcgcctctgccagtgcccatgacgctctttcgcacgctttcccagaaccatggccccatttccggcacgagctggaaaagcggctcacgattgagtcggttgacgagcttcgatccgaaatgaagaggctgggaacataccccccggaagcgctggaatccttgcggcctctgttcgtctctcgcgcgcctcagagacgaggtgtgggcgccttgcataaagacaccctctattctccgcgaccgctgctggaaaagaacagcgaaccagggaagcagaagaattgcaccatcgtcagaaagaatgttctcgagctcaagttatccgatttgcagaacatcgtaggaaaggaggatccaagaaacgccagcctcatcaaggcaatcgaggatcgattggtcgcccacggcaatgacggaaagaaagcgtttgccacgccgctattcaggccatccgccgacgggaagaaagcaccgatcgtccggacggtcaggttgtacaagacaaaagagactggcgcgtttgtcggaaccggagtggccgaccttggagagatgctacgcgtggacgtgttccgacatgaaaggcgttacgtgttgatccccgcatacgccatgcctcttgacaaacggatcaacaagaaccagccacccgatggcgccgaattccttttttccctgaccaagaatgatctggtggaagtcaccataggctcgaccaccacacgtggttacttcgtcatgtttgaaagcgatggccgcctgacccttcggcgccatgatcaaccgatccctgacaggagctactttagaaagaatatcgccaacgcgactcgactgcagaagttccatgtcgacatcctcggccgggtctttctggcgcctccggagaaaaggtatggtgtggcgtagcattgtcatcaaccatcctgcccgtttgcaccgcgaccacttctctctggtggtcgagcaggatgagcctgcccgcatcccgcttgaggatatcgctgtcattgtcctgaacaacaggcagatcacgctgacacatcccgtactttcggcgtgtgcggaatacgggattgggttgtatgcaaccggagagaaccacctcccgagtggagtgtttctccccttcttgagtcatcggcgcgccacgcgcatgttccgccttcagttggctctaggcaagccagctgcaaagcagacttggtcagcggtggttcaaaggaagatcctcaatcaagccgcttgcctcaagctgatgcaggtgggtgatcacgagcgcctgagctcgtacgccaggcgcgtgcgatcgggagacgcgggcaacatggaagcacaagcgagcgcttactactttccacagttgttcggacggaactttcatcgctcccgagaatgttgggtcaacgccgccttgaattacggctatgcagttattcgaggagcgatcgcgcgatcacttgttgcgcacggcttacttccttccgtcggagtattccacagcagcgaacagaacgcattcaacctggccgatgacatgatagaagcatatcggcccctcatcgacctccatgtcgccaagcaccggcccagtgaagacagggaactcaccgcaagagataaagccgacttggtggggctacttcatgtggacgtagggatgcctcggggagtcaccagcgtcattgcgtccattgagcaagcgacggagtcgctggttcgagtctatgaaagcggcgtggccgctgccttggaactgcctgtggtcataggacttcgacgtcaccgcgcagagatgtagcaggaacaaccatggggctggacacgaggcgtcacatgcggctgttggtgttttttgatctgcccgtgaccacccgggcccaccgaagagcatatgctcagtttcgtcgattcctcctcaacgacgggtacgacatggtccaactgtcagtctatggccgggtcctgaacggccatgatgcggaggagaagcacctgcgacgcttggtggcacaccttccatcggaaggatccattcgcgctttgacggtgacagagaagcaatacgccagcatgaagcttctgatcggaacccctctttttcaagaaaagaaggtcgcggcagaccaactcatcctcttctgaccgatttttgggaaaaggacacccgcaccaagcgaagcctggtgcgggttcccgtcgagccagagtgtagctatccggggtgagagaggaagctacaaccgtcgcctgtgggaggagatccacggcggagagtgtagctatccggggtgagagaggaagctacaacgatgccgtccagctcgtccgcccacgtggcgagtgtagctatccggggtgagagaggaagctacaaccacatggccgtaggcgccgcgcgtgaccttgagtgtagctatccggggtgagagaggaagctacaacagtcccaccagcgcgactgcgcggcgtcatgagtgtagctatccggggtgagagaggaagctacaacgagccagccgacgcccggttcgtgacgatggagtgtagctatccggggtgagagaggaagctacaacccgcccgcatcagcgtgattccgcccgtgggagtgtagctatccggggtgagagaggaagctacaacatcctctcaggccgaagcgtgcgccgcaacgtgcgagtgtagctatccggggtgagagaggaagctacaacatccctgctgaagtgcacgtagccgggcccgagtgtagctatccggggtgagagaggaagctacaaccccaatggcctggcttggaacgcggtggccgagtgtagctatccggggtgagagaggaagctacaacgggttcgacatgcagaatgcgctcgccagtgagtgtagctatccggggtgagagaggaagctacaacagcgggttcaagggtcatggattcctccgggagtgtagctatccggggtgagagaggaagctacaaccatcatcggcttgctaggcagtctggtgcagagtgtagctatccggggtgagagaggaagctacaaccggtcgatctggtcctcgtcgacggcaagcgagtgtagctatccggggtgagagaggaagctacaactgctccagctcctggtctggcatgtcggcggagtgtagctatccggggtgagagaggaagctacaactctcctgcagcacctcgttgacaaccttctgagtgtagctatccggggtgagagaggaagctacaacccaagacgcggcggttgatctgctcggcgagagtgtagctatccggggtgagagaggaagctacaacccgcaggtgtaggtcgccaggcgcttgccggagtgtagctatccggggtgagagaggaagctacaaccgaggagcccgtcgtgcaccaggggcgcctgagtgtagctatccggggtgagagaggaagctacaacgacgcgctcgcggcggtgaacgccaagttggagtgtagctatccggggtgagagaggaagctacaaccgagggtggtgtggctgccttcctgacgttgagtgtagctatccggggtgagagaggaagctacaacttatgtggtcatcgctgttttgggggcgctgagtgtagctatccggggtgagagaggaagctacaacggtggtggcccaggtaccagcgagacgacggagtgtagctatccggggtgagagaggaagctacaaccgaactcctcggcggaattgatgccgccatgagtgtagctatccggggtgagagaggaagctacgacatgacgaggggctggtgcactcggtccatcgcaggcaacactgcagcagccctcgtcgagagctgctcggccaccgcccgacgcctcactggaacttgcgctccgcaggcggcggcgggtcccactggtacagccaggtctcggtgagcggctggccgtcgcattgcaggtacagccgcaggtcgatcggccgggtgctgtcgtccagcgggcgcaggtcgaacatcgcgcgccatccgttgatggcgtgcagcggccgcgcggacgtgatctcgatctgcccgcgcgaggcccagatcacgggctcgaccttggcgtccttgccgatcagcgacaggtcgccgccggcgaagtccaccgcgaagcgccacgagaagtacttgcgcggctggccgacgatgccgccgatgccggtgcgcgtggccacgcattcggccagcggcggccgcgcgggcgggtgcgccccccagtagaggcgatagccgaacagcagctcctgcccgggctggggcttgtcggccgggttccagaacgcgacgatgttgtcgaaggtctcgtcgacggtggggatctcgaccagctgcaccgagcccggcccccagccgtgcttgggctcgacccacaggctcgggcgcttgtcgtaaaacacgccgtcatcctggtagtggtcgaagttgcggtcgcgctgcagcaggccgaagccgcgcgggttgttgtcctggaaggcgttgaagcgcaggtgcgccgggttggtcagcgggcgccagatccactcgccgttgccggtccacatctgcaggccgtcggtgtcgtggatctccgggcgccagtcgttggccatgcgcttgtcgttctcgccgaactggaacatgctggtgcacggcgcgatgccgatgcgctcgatcaccttgcgcgggtacagcgcggcgtcgatgtccatcacctgcgtgtcgcccggcgtgatcacgaagcggtacgcccccgcgatgctgggcgagtcgagcagcgcatagaccgtcagcgtgctggactggcgcgcgggtttttcgagccagaaggcgacgaagttcgggaactcctccggccggttcatgccggtgtcgatggccagcccgcgcgccgactggccgtactgccactcgccgcccaccgcgcggaagtagctcgcgcccaggaaggcggcgatgtcgcgctgcaggtcggtgtggaagttgatgcggaagcccgcgaagcccaggtccggcggcaggcgctcggccggcacgccgctttcggaatggtcgaacagcgcggggtcgtaggcgatctcctgcgcctggccgtcgaccacctcgaacatgcgcaccggcgacttgaagaacagccccaggtggaagaactgcgcctggaagcgcagctggtcgtcgcgccacagcgcgcgctccttgcggaagcggatggactggtactggtcccaggtcaggttgtccagccccttgggcagcgtcgagcgcggcgcctggtagggccggctcgccaggtggcgggcatggcccttgagccaggcgtaatcgaacggctggggcttgccgatgggcttgaggtccgcggccagcgcctggccgtggagcagcgagccgcccgaagccagggcagcgagacaggacaggaaatgtcggcgttgcacggtgcgtacgtcggttcgaaaaaccagcaggaacactgcgccggcgcccggaaggcgccggcacggcgggctggcacgcatggtagcgggcgaaacgggctcgttgcgcaagcccggagggccgcttggtgacacaacgttgtgccgggccggtgccggaaaggggcgcgcccgctctcgcgggccgtgccggccgccgctacacccggttgcaggccgccccggcggcggggcctacgggcggccgaaggtgacgcccaggggcacccgggccgcgtcgtcccactgcggcccgtcgaaccagggctccccgcccaggcaggcggccagcatgtcgagcgagtccagcccccagaacaggcggccgtcgacctcgatggtgggcacgccgaacacgccgcgccgggcggcctcctcggtcgcgtggcgcagcgcctgcttgaccgcgtcgccagccgggtcctgccgcggcgccagctcggcggcgagcgcggccagccgcgcgggatcgtcggcggccaggccgccctcccagacatggcggaacaccttctcgcagacatggcggttgggcgtgtcgcccgcctccgggcaggccagcgccagccgcagcagcgacagcgggttgaacgggtgcgccgccggcatgcgcagcgggacgccgagccggtgcgcctgccaggcgacctggcggtagatccacacgcgcttgggctccagctcggccggcgcgcgctggccgtgatgctgcagcagcccggccagcagcaccggctggtagcgcacggtatacgagaggccctgcagcgcctgcggcagccgctcgaaggcgaggtaggcgtagggcgagacgaagtcgaagtagaaggtgagctgcttcacggtcggtgtcggggatcggtggtcggggcggcggcctggcagcgttcgcgccggcgcggcagctgcttccagacctgccatttttcggcatcgctcatcgtcgaccaggccgcgatctcgtccagcgtgcgcatgcagccttcgcaccagccggtggcctcgttcatgcgccacacgctgacgcaggggctgggaacggacgatgcggcgcgggccatcgggggcacctggcttcagccggccaggccggcgcgcgcgcgcttgtccgccaccttggcgttgaagcgtgcgtagtcgaccacggcgcgctcgtgggtgccttcggagatcttgtcgatgccgtcgtgcgcctcggcgcggaaggtgatgcggcgcccgtcgaccgcgatcacctcggcctgcacgtggatggtcatgcccggcgccgtcggcgccaggtgcgagaagttcacgtgcgtgcccagcgacccttcgcgcggccagtcaaggtaaggcaggatggcccgctggcagcaggcctcgagcatgctcaccatcaggccggtggcgaacacctccggcatctggcggaattcctcgaactcggggtagatgtgcgggaccgtcgtctcgcgcgtgacggtgtaggtgagctcggcgcgggcgccgatcgggatgtccttcatgcggtggggtccgggtacaaccttgccagcgtaaggtcccggccccgccaccgcaacccgggtttgcgtcaatcctcgaacggcaggcccacgtagttctcggccagcgaggtcgaggccgcggtggacgagaccaggtagtccagctccgcctcctggatgcgccggccgaagtcgccctggtccgggaagcggtgcagcaggttggtcatcatccacgagaagcgctcggccttccagatgcgccgcaaggccttctcggaatagtggtcgatgccggcctcgctcctgtcgcggtagtactcgatcagcgcccgcgacaggtagcgcacgtccgccgccgcgaggttcaggcccttggcgccggtgggcggcacgatgtgcgccgcgtcgccggccaggaacagccggccgaagcgcatcggctcggcgacgaagctgcgcagcggggcgatgctcttctcgatcgaggggccggtgaccagccgctcggccgtctccgggtccatgcggcggcgcagctcgtcccagaaggcatcgtcggaccactgctcgaccttgtcctccagcgagcactgcacgtagtagcggctgcgcgtgcgcgatcgcatgctgcacagcgcgaagccgcgctcgtggttgatgtagatgagctcgtcggaaaccggcggggtgtccgacagcaggcccagccagccgacgggtagacgcgctcgtaggtggtcagcgcgccctgcggcacgctggcgcggcacacgccgtggtagccgtcgcagccggcgatgaagtcgcactcgatctcgtgcgccttgccgtccttgacgtagcgcacccgcgggcgcgcggtgtcgaagtcgtggatgctgacgtcggccgcctcgtagacggtgggcaggccggccgcctcgcgggcgtccatcaggtcgcgggtgatctcggtctggccgtagaccatcaccgacttgccgccggtcagcgccttgaagtcgatgcggtggcgccggcccttgaacgcgatctcgatgccgtggtgcaccaggccctgccggtgcatgcgctcgcccacgcccgcctcgtcgagcaggtccacgcagatctgctcgatgatgccggcgcggatgcgcgacagcacgtagtccttggtgtgcttttccaggatcacggcgtcgatgccggccttgtgcagcaactggccgagcagcaggcccgaggggccggagccgatgatcgccacctgcgttctcatggcgtgtctcctctttgctttttgataagccaagcgtaggcagcatcgggcttgcccggaatggacggatccgacaatcacttggacaatccgaacatctccggccacctgccgcaccgtgtcgcaccgcgtcccgacctacgccctgtacggcgagcaccagcagccgctgatgcccgaggcgctgcacgtcgaatcgatcgccgaccgcagccgcctctacaactgggagatctcgccgcaccggcacgacctgttcgcgcagctgctgtgcctgcgcagcggccacggcgaggtgctgttcgccgatgcgtgcgtgccgttcgaggcgccgtgcgtgatcaccgtgccgccgctggaggaacacggcttccgcttcagccgcgacatggacggcctggtcatcaccgtggtcgcccaccgcctgcagggcctgctgcaggccgcgcccgagctggtcgagcgcctgtccgtcccgcactgcctgcgcttctcgcccggctcggccgagttcgccgagatcgaccgtgcctgcacgctgctggcgcgcgagatgcgcggcgccgcgccgtggcgcatgaacctggtcgaggcctcgctggtgaccgcgctggtgctggccgcgcgcgccgccgcggccccggcgcgcaccacgcagggcccgtcgccgcgcagcctgcagcatgcgcagcgctttcgtgcgctgctggaccagcgctttcgcgagcagcgcagcatcgacgactacgcccgcgagctgggcatcacgccgacgcagctcaaccgcgtctgccgcgaggtgctgggcacctcggcgctgggggcgctgcatgcgcgcctgatgctggaggccaagcgcgacctcgcctacacgcggctgagcgtcaaggaagtggcgctgacgctgggcttttcggacgcggcctacttcacccgcttcttcacccgccacgccggcatgtcgcccagcgagttccgcgacgcggtgcgccgcgagctgggccaggaaggctgagccgggctcaggccagcgcgcggccgatcaggatcttctgcacgtccgaggtgccctcgtagatctggcacacccgcacgtcgcgccagatgcgctcgaccgggaagtcgctcacgtagccgtagccgccgtggatctggatcgcgtccgagcagacgcgctcggccatctcgctggcgaacagcttggccatcgccgcttccttcaggcacggctggccggcgtcgcgcagcgccgcggcatgccagaccatctggcgcgccacctcgatctgcgtggccatctcggcgaggcggaactgcaccgcctggtgctcgaagatcggcttgccgaaggcctcgcgctgcttggcatagtccagcgccgcctcgaaggccgcacgcgccatcccgacgctctgcgcggcgatgccgatgcgcccgccttccagcgccgacagcgcgatgcggtagccctcgccttcctcgccgatgaggttctccgccggcacgcggcattgctcgaagacgacctgcgcggtgtcgctggagtgctggcccaccttgtcctccagccgcgcgacgcggtagcccggcgtgtcggtcggcacgatgaaggcgctgatgccgcgcttgccggcggccttgtcggtcaccgcgatgacgatcgccacctgcccgttcttcccgctggtgatgaactgcttgacaccgtcgatcacgtagtggtcgccgtcgcgccgcgccgtggtgcgcagcgccgaggcgtcggagcccacgtgcggctcggtcaggcagaaggcgcccagcagctcgccctgcgccagcggcaccagccagcgccgcttctgcgcctcgttgccgtagcgcagcaggatcgcgcacaccgggcagttgttgacgctcaccgcggtgctggtgccgccgtcgccggcggcgatctcctccagcaccagcgcgagcgacaggtagtccagcccggcgccgccgtagtcggtgggcacgcacacgccgtaggtgccgagcgccgccagcccgcggtgcacgtccttcgggaagtggtgttccttgtcccagcgcgccgcgtgcggcctgatctgttcgtggacgaacgcgcgcacggcgtcgcggatcatggtctggtccgggctcaggagcatggcgtggcctctcggtcgggtgggcggggatcggtcaccaggggatgggcgtgccgccgtgggcgtagaagcggccgttgtcctcggggcccaggcgcgcgatcaggcggcgcaggtcgccgacgctgtgctccaccggcagcgccgcgccagggccgcccatgtcggtgcgcacccagcccgggtgcaccgcgacgcaggtcgcgccgcgcgcaccgagcaccgtcgaggcgtccttgagcaccgagttgagcgcggccttcgaggcgcggtacagccagccggccgcgccggagcgctggccgatcgagcccatcaccgacgacagcaccaccacccgcgcgcccggcgcgagcagttcctgcagcgcctgcagcagccgcatcggccccagcacgttggtgcgcatcacgaggtcgaagtcctcctgcgagggcgcctgcaggccgtcggtgtgcggcccgtagacgccggcgttgaggatcgcgatgtcgacccgctcgccgtc

SEQ ID NO: 2870 - DNA, 23360 bp, synthetic construct
  misc_feature 1..23360: note = Synthetic
  source 1..23360: mol_type = other DNA
aacaaaaagaaccaatcgttcagttggtactgaacgagcaaaaccatggttttgccaaaggtaataatatcggcttgcgaacagcaacaggtgatttcctggtagtgctcaacaatgacactatcgtcacgccgggctggcttttaaccatgctgagacatttgcaagccgaccccacgattgggctgatcggcgcggtgaccaacaacattggtaatgaagccaagatcgagatcgcataccaagggctagatgaaatgctgcctgccgcgttcacttatacgacagctcacataggccagcataggctactacgaacggctgcattcttctgcgtaatgattcccaggaaagtctttgaacaagttgggctactagacgaaaattttggccgtggtttttttgaggatgacgattattgccggcgaatcgagcgacttggtttgcgtatcgcctgtgccgaagatgtctttattcaccaccatctttctgcatcgtttaacaaaatccacgatgccgagaaacgtgcgttgtttgaaaaaaacaaagcctactatgaatcaaaatggggcaaatgggaacctcatgaatatcgccacaaataagatcatctgtgtggtgggcacccgtcccgaggcaattaaaatggcgccggtcattcaaggattacagactcagtcatgggcagatgtgcggatactcgccacagcccagcaccgccatttgctcgatcaagtgttaaatcttttcaacatcgcgcccgatatcgatttgaacatcatgcgctccaaccaaacgttgacagcgttgactgcgcgattacttctcgaattggaaaatgtgctatacattgaaaaaccagctgctgtcttagtgcaaggagacacgaccaccgtgatggctgttgcgctggcctgtttttatcaagacattccaatcggtcatgtcgaagctggcttacgtacccgagatatgcgcaatcccttcccggaagaagcaaatcgtgtcattaccggaaaattagcacactggcatttcgtcccgactgaatgttcccgccagaatttgctgcatgaaggtatagcggatgaaaaaatttttattaccggtaataccgtcatcgatgcactcctgactgtggcagcgcaagatatcgcactacccattccggtcgctcccgataaacgcctcgtgttgatcaccgctcaccgccgggagaattttggtgagccattacgcaatatttgtcaggccatacgtacgttggcacaaaacaatccggaagtggtatttctttatccagttcatcccaatcccaacgtgcaagataccgtcaacggcctgctggcagatcgaccgaacatcatcctttcgtctcctttgaactatgtccattttgtctcagccatcaagcgatcttatctaatcttgaccgattcagggggaatacaggaagaggcaccggctttgggaaagcctgtcttggtgctccgcaacgaaacggaacgctctgaagcgatcgagcacggtgtcgcaaaactggttggcacccaatatgaacaaatcatagcagcaacacagcttcttctagatgatcatactgcataccagtccatggtaaagggtatctccccttatggggacggccatgccgctcaacgtattatcgctgtgatgagggagtatttttcctgatgcaactggtctatctatctcctttgccttggaatagctttgcgcagcgcccccacaaatttgtggaatggtttcatagcaagcggggaggaagggtgctatggatagatccttatccaacgcggctgcccatgtgggcagatttcagaagaatcaaaaatgcaaggctctttccggatccgctagcgacaaatgcagatatgccggactggttaacggtggttcgcccccatcgattgccgatagagccgttaccgggcgctaattgggtttcgcgctggttatggcgggatattctgcgcactatcgatcgatttatacagcaggatgaaacactactgggtattggtaaaccttctgagctggcgctgcaggttctcgctcgacatccttccatcccttctttttatgacgccatggatgatttcccggctttttaccagggactatcacgaagcgccatggcccaccgggaacaggtgatcgccaataatgtctcgcgtatatcggtctcttcaaccgcattggcagagcgattctctacctaccactcaaaactcactatcgtccataatgcttgtacggtcgattcactcccacctgtcaatgcaatcaggaaacactccggcgagctcgtactcggctatcttggcacgataggccattggtttgactggccatttgtccttgctctggctcaggctaattcagcgctgagcattcatttgattgggccgctttataccccgcttcctgagcccctgcctttcaatatcagactgttacccgcatgcgatcacgcaacggcaatcagcttgatgcaatccttctcggttggattgattccattcaatcgtagcgacttgactgcttcgatcgaccccatcaaatactatgaatatcgcgcactcggcttgcccatcctctcgacctactttggtgaaatgacccggcgacagggacaggcaggcgtatttatcaccgatgctgattccgacttgacataccaagtcacgatcgccatggtccacaaataccatcgatacgagattctcgcattcagaaaaaacaactcttgggaagcacgttttaacgcaagcggtattctttcttaagcgcaacgccatgaattgaatgcgggatcgattcatcgtgcagtggcttgagaatagcacgccatgcttcgagttttttcataaaaggaatggtagcatttgccgggctggttgaaggcaagcgttggtagtgaaacgtatcgcactcgatattgggcatgacgagttgcttgaagcaggcctcggctttgctgccattaaagtaaatatgggtgatcgcacgatgacggtggaaaaaggatacgaaatcgttggctaactgtgtttcggcctcgatcatcgtatccaagctaccgattcttttacaggagtggagcacgtcccataacgcaatatgcgctgatcttaacatggcgagcttgtctgcatacgctatgccgtaatcgaatgcgagcaattcggccatgatgcgccagaaagcattctgcttatgcgcgtaatactgccctgcggcaagtgaagcggaccccggcatactgccgaggatgaggattctcgctcgctcatccgcgaccggggtaaagctatggattctagtcacgcaatattgaattattttttgaaatagatgagggctagcgttgtactcgctcctgaagcatcgagccgggcacccgcctgatctgaaatacgtagcacctccccttcaccaaaacgcgcctgccaatcgagcaatggctgacatgcacgctcacttttgaccttatccggaactctcgagcagaccaactcgtacagcgttttaacccaggctacctcattagccggaataggccggtttttttcgaccgggcttttgtttcttcccccaatttcaccacgaacataagtgatgctgcgcaattcaacagtctcctccacttcgagccggtaagttgattttcgtccgcccgggatgggcgcttccttgataaaaataccatcggcgatctggtgatagcctgcatcttccaactgagcttgcattttttctggcggcgcactgagagaaattccttctatctcgagatcaagaaactgttgaagcgggaaagtatggcttgattccgcagccgacgcagttggcataatgaatggcttaggaagcaaccctatcactgacatcgccagtaaaattgtcatcaaccaagaaatgcgggggcgggggcaagagtaaaaacctagcatctgtttaatcctccattcgatttcggaaatggttcaacgactctcagcttatcacatgaattttcgagctgaaaaccggctgccgaattttcgtgtattttgtgcgccctaatcattacgcagattttgttttcagtagctgtctatgacgggcaagataaagcggtgtccaagcatgcggaattttgtgcacgaaatgataccgtgccacatgatagcttggatcaaaaccataaaaattgagctgcatctgacgtaattccgcggatcggtattgtgcgagcggtttttcccgttcatcttgctcacgttgcaagcgtttgcttatgcgtaaccggtcataattttcatacctcgccatgtcttctgcgatctgttcgatttgtttataaaaatcgacatgatccagtgcaaaacaaccatcgatgagtcccatatcctgcgcggccaatgcgtcgatcggcaagcggttatgcgtcaactcccgcgctttacgctcacccactcgtttaggtagtaagtaggtccagtattccgagccatacagattgcccatgctcttgtagtgcggattcaatatcacgctctttcgtgcataaatcctatcggctgctagcgcgagaaagacacctccggcacccgcattaccttgcaaagctgccaaaattagctgatcggtattggtaatgatggcatgcaccagatcattcatggcctggatattgcgccaagattcatctgccggactctccgcctgttcgatcagattgagatggatcccattcgaccagaaatcagccccccccatcaatacgatcacgcgcacaccactcaggcaagccatttgataggcctcacgcagtcgctcacactgttgggtgctcattgcaccgttataaaagacaaaatgcagataaccaacgcgatccttctgctcgaaccagatatcgcggttggtaaggtggcagactggcgagcgggtacgcagcagtggggaagggatttcaggcacattcttaacgtattcgcccaagacgaccgtggcgggtaatttaaaagccggttctgcatcgtttttttgcttcatatggccaatccatactgcgccatcggttgttgcgcggcatagggcaccatcgcagcgcgcgatgattgcccccggcgggccctgcaattctgtttctgtacaggcatcgaacaaataaaaagatgcaccatagagcctatcaagtacgccgggatagctatccgctgcatatatttttttcaatacggtgcgcatatcatcatgctgccagtcaatggcacggtcggactggcgtatcggcacatgcaatcgcccccttacatcgtggcatgtgtagtctagcgggaccgcttgatatgaaccggacaggtagcggctaattgcagtcaacacagccctgaccgctgcttcggtcacttcctgacgatacagactacttttactggcaaagcgcatcggaaacatttccgtcgcccagatatcccctgcgtccatttcgccgttggcttgcagcaccgtcaccccccactcgcgctcttcacgcaggatagcccaatccaacgcagaagggccacgatcgccgacgatgccaggatgcaccacgaaacacgtcacgtgacgccataccgtttcaggaatggcccgtttgagaaaaggcgcaacgatgatatccggacagcaaagctcgaccgcttgttccgtcaccgcatcactaatgtcgaattcaactgagacatcatgaccacagcgtgtcaattcaatgaataaccgctgcgccaggctgttgaagctatgggtgagaaataaaatattcacgctaagttaccactgataaaattaacgaaggggatgctgtgggtaaatttaagtcgcgctcgaaaggtattacccggaaatatcatataactaaatgtaataaagctactccctccactcaacatcgtttcattaccgaaataaatacttgaactttccattaaaacgtgtatcttagataggtcttttggattcaagttgttaaatgcgataccgttggttgtccttttttccttgatattcgatggcaacatacggataaccgtaatcattaatttatcattaaggaaatagaacatggcaacaggtattgtaaaatggttcaatgacgctaagggttttggctttattaccccggacaatggcggagaagatctatttgcacatttttctgcaatcaacgcgaatggtttcaagacattacgcgaagcacaacgcgtaacctttgaagtcacgactggaccgaaaggtaaacaggcttcgaatatcgtgccacagtaagtgtatcaaatcgtttaagtacgtgcaaaaccccggataaccggggttttttattttcagcatcatccatgcaatcaacaaatacgtggtaactgctcgccactgagccaatccacgacccgctgccctccaaaaatcgtttccatttgcacaaaacaatgaggatctgcgataacctctccaatgatcgctgcatcccttcctagtggtgaagctcgcattgtttgcaataatttatcagctagttcaggctcacaaatggcaatcaacttaccttcattggccacataaagcggatcgaatcccagaaattcgcaggctgctctgacctgctcgtgtatcggcagcttatcttcacgcagcttgataccaacgccagattggcgtgcgatttcgttcagcgccgtagcaagtccaccacgagtcggatcgcgtagcacatgtatcgttggaacggcttgtatcatgctggcaaccaattcatgtaaggccgcagtatctgactggacagtggtatgaaacgttagattttcgcgcagagataaaatggcaatcccatgatcgcccagcgtgcctgatagcaggattttgtcacccggccgagcaagttcagaagaaatatggataccgtcaggaacgctaccgacccccgtggtcgtgatgaatacaccatcaccttttcccttttccacaactttggtatcaccagtaatgataggcacccctgcactgtgtgctgcacttgccatcgattcgacgatgcgcttgagatcggacaagggaaacccttcttccaggataaagctggcagacaaatagtgcggcctggcacccgacatggccacatcattaatcgtgccattgacggacaggctcccgatatcccctcccgggaagaacaaaggcgataccacgtggctatcggtagacatcaccatccttcctgctggtacggaaaaacaagcttgatcgttcatttgacgcaaaatatcattatcgaatgcagtcaggaagagcgtatcgatcagttgcatcgtcatgcgtccccctccaccatgccccatctctaccctgccttttttgaaatcaatagggcggacataagcggcattaccggcgataacggattttcccgtcgatttcatgcggtccggcgaaaacgtccatagctgtagtgagccgcacaagcaccctcagatgaaaccatgcaagagcccaccggattgtcgggcgtacagaccgtaccaaaaattttgcaatcctgcggttgcttgattccccgtagaatcgcgccacattcgcatgccttatggtcagcaatggatagcgccggaatctgaaagcgtttttctgcatcgaaatcagcaaacgcagccttgatccgcaacgcactgtagggtacccagcccagcccacgccattcaaagacacgccgcaactcgaaaacttcagcgaccagatattgtgctttgagattaccttcgcgcgtaacagcacgggtgaattcgttttccacgtctgcacgcccttgattgatctgctggataagcattaatatcgcctgcatcacgtccagtggttcgaagccggcaataacaaccggtttctgaaattcttcagcgaaatattcatagggatgactgcctatgatagtggatacatgggcggggccgataaagccatccaagggtacccagccaagttgacgcacttcaggagactgcaaaatgtgggaaatggccggaggcgttaaaacgtggttgcagaatacggtgaagttgttcagacccatcgcttgtgcctgcttgatggcaattgcagtaggaggagtggtcgtttcaaatccgatagcaaaaaagaccacttgatgctgcggattttcctgagcgatccggactgcatcgatacttgaatacaccatgcgcacatcggcaccatgtgctttgattttcaggagactcatgccatgatcagtcggtacccgcagcatatctccgtaactgcacaagatcaccccgggttgttgcgctaaacggatagcattttctattcgcccgacgggaagcacacaaaccggacaaccaggcccatgtatcatgcgcacattacctgggagcaaatcaggaataccatagcgagaaatggcatgcgtatggccgccgcaaaattccatcaattgatagcgccggttaggatttacttcattcttaatagcggaggctattttttttgctaaggtgccgtcacggaactcatctatatacttcatatcattcaattatccgcaaaaggatcatcctcattttgcattttggcgaacatcgctaaggtttgttgtgcctcaagcggatctattttttgtagggcgaaacccacatgcacgatgacgtaatcaccaatttcaacgttctccatcaatgcaagcgaaacttcccgacgtatgccacttagattgacgatcgcacaatcttccgagacaatttcttcgacacaagcagggatagctagacacataagaaaattaaatcatccggcaaaagtaccgttatgagaagaagcggccgttcagccgaaatatcgatagaacagcttcaataaagcatggtaacgtgattcaattgcgtttgctagattttaatacaaacattaacccatcattcttttctatgtacagaaaattactaatactgatagtttttctatttttttctctcccatcgagcgcacatcaagatatctggattaatgtggatacagaaaatctgacacttgccgtcatgaatggagaagcgatcgaagtcgtattcgacaatatcgcaatcggtcgctttggcgcaagcaaagcccggatgaaaaacgatgacagaaccccgctgggcagtttccgtattgggtggataaaagaaaaaagtcagtattaccgattttatggtttcaactatcctacgcgagaagttgcggatcttgcactcgcggaaaaccggatcgataaagacacatggcaaacgatcatcaacgccatcgaagcaggaagaatccctccacaaaacacgcctctgggcggttatctaggcatccatggcataggcaagggcgaccggaaggtacacgaacagttcaactggactaacgggtgcatcgcactgaccaacgaacaacttgataaattgagtaaatggttaaaaccaggcgtacttgtggagattcgttaaggaaatattgctcacttcctaaataaattattgaggaatattggttagttcctgcgccagaattactatgacatgaccgccccggtaccttcacggacaatatcattgccgccatatatctatattacagatgcatcttctaaattttacttagtgcagtctctcttgtattgtccctccctcttaaacaaacttttacatatgtttgtatgttccaatcgagaaacaaaaaagtaacaagcagaataaatagataacttaaataaaaaaataaagcaaaaattctagtggtaatcagaaccgtaacgatgaagatagtcgatattattaatttactgttctaaaaataataatgcccggtagtcccctaccgggcggatacgactcgaatctttcgattcagcttattgtagcaacggctctcaccccggatgagctacaacagcgatattatcagggagaatgaaatgtcagacaagtatcacgacgaaattaattctgttccgctcactctcgggctggatatcggtatggcttcggttgggtgggcagtgctagcgcctgaccgaatcctggatttaggggtacgagcattcgataaagcagaaacagcgaaagaaggcgaatcactcaacaaagttcgtcgggatgcgcgtctcatgcgccgccgtctgcagcgccgtgcctggagattgactaagcttgctagactattgaaacaagaaggattaattcctgacattaaattattcaaaacgcaacagccgtttacccaatctctctggcaacttcgagtacaggggttggatcgcttgcttagcaatgaagaatgggcacgagtcatataccatctctgcaaacatcgtggttttcattggatcagccgtgcagaggaaaaagcattagaaagtgatagcaagggggaaggtgggaaagtcaagcggggtcttgccaaaaccaagcaattgacgcaagaaaagggctatcgcactgcagccgaaatggtgctaacagaattccctggagcgcagcgtaataaagcgggagattacgggaaagccctatcacgaactcttcttgcggatgaactgaagatgctttttagatgccagagaaaacttggcaacccttattcccgcattgaattggagaccaaaattttaggtaatggtgatcaaaagagcggtttgttctggcagcagaatcccgcattagctggagacgccttgttgaaaatgctcggatgctgcactctcgaaaaaatggaataccgtgcccccagagcaagctttaccgcggagcgccatgtctggctgacacgtttgaacaatttacgcattatattggatggggttattcgaccgttgaatttacaggaacgcacggccgtattactgctgccttatcagcaaacgagtgattttacctacaaacaattgcgcaatgcgttgcagaaaattggtttgtcagattcatttcgatatgcgggtctcgcttatccaagtgaaaagcagaatggtgatggaaaagctaaaaacccagaagatgaaaagttgattagactgccagcttggcaaacattaaaaaaagtacttaaagatgaaggattggaagcagaatggcagcaaatttcgacagcggcgctggaaggacaccccgagctgcttgatcaaattgcccgtgttctcagcgtgtacaaggaagaacaagaaatcagcggcgaattagaaaagctcgatctacccaacaaaaccagaatgatcgaagcattgagcgagatcagctttaaagaatttcatgccttatcactaaaagcgctctacaagatcgtacctctcatggaaacggggctacgctatgatcaagcctgtgaacaagcaggttaccaccacagccaattacccgcggtaattaaagataaatatttacctcccttttatgctggcagaaccaaagatggccgcatgattttcaacaaagatagggatgtcccgcgcaatccggtggtactacgtgccctgaatcaggcacgcaaggtcgtcaacgcaattatccgcaaatatggcttactgcattcagtccatatcgaaatggcacgcgatctatccaaacctttcaatgagcgcaaaaaaattgaaaaggcccaaggtgaatttcgcgaacgcaatgataaagataaagctcaattcaccgaggaattcaattttgttagcacacctaaaggcaaagaattcgagaaatatcagctttatcgggaacagcaaggcaagtgcgcttattcgcaggaacccctagatattcatcgtgctctcttcgagcaaggctatgccgagatcgaccatgctctaccttattcacgcagcttcgatgatagcaaaaacaatcgggtactggtactgtcccgcgaaaaccgcaacaagggcaatatgaccccctacgaatacctggacggtaagaacaacagtgaacgctggcggcagtttgtagctttcgtcgaatcgaacaaggcttaccgccaggctaagcgtaatcggctgctcaagaaggatttcggtgaggaggatgcaaaagatttcagggagcggaatttgaatgacacacgctacatcagccgcttcttcaagaactatatcgagcgttatttgcaactgcacgaggacagcgaagccaaacgctgtgttgtcgtaaacggacaattgactgcgtttttacgtgcacgctggggacttaataaatcacgtcaagagagcgatcgccaccatgcgctggacgcagcagtcgtcgctgcatgcagccacggcatggtcaagcgattggctgactattcgcgcaatcgggagctcgatcaagtgcatgcaggttttattgatatgacaacgggagaagtggttgattcggctatgctgcgaaaactggaagtgcatttccccagtccctggccacatttccgtgaagagttgaaattacgattacaggtagatgatccatcactgctaagaaaagaaatagaaaaatttgcgacttatccaccggagacgcttacaacattgcgccctctatttgtatcacgcgcgccgcaacgaaggaacggtggagcagcgcataaagataccatctatagccaacccaaacagctacaggaaattgggcgcgcagcccaaaaagtgccattgagcagcctaacactgagcgacatggataaattgatcgatccgcatcgcaacgaaaaactctacacggccattcgcacccggcttgaacaacatggtggcaagggcgacaaagcgtttccccctgacaagccattgcgcaagcctgggcgaaagggtgatttgaacggcccggttgtgcgcagcgtcaaactcgtcgacaaattgacgggtattccggtgcgaggtggtatcgctaagaacgacaccatgctgcgcgtggacatcttcaccaaagcaggtaaatttcatcttgtaccagtttatgttcatcataaggtcgccaaggaacttccaagccgagcaattgtggcatttaaagatgagaatgaatggacattgatcgacgatagctttacattctgcttctcactttacccgaatgatttgcttaaaataaagctaaaaaaggaaacacaattcggatattttgcaggatgtgatcgctcgacaggcgctatccaattatgggcgcatgatcgtagtcagaacgttggtaaggatggattgattcgtgggattggtgccaaaactgcactatcgattgaaaaattccatgtcgatgtgttaggtcatatttttcctgctcccaaggaaaaacgctgtggtctggcgtagtattatgatttcgcgtcctgcgagattacgacgtgagcattattcgctggcgatcgagcaggaacaaactgcatttgttccttttgaggatattgcggtcatcgtactcaaccacccagagattacgcttacccatccggtgctctcagcttgcggtgaatatggtatcagcctgtttgccacaggaacgacacatcatccgagtggagtatttctgtcctttcttcctcactctcgtgcgacccgctggatgtggttgcagttaaatttgccacgtcctgttgccaaacaagcttgggccacaattgtacgcaaaaaaatagctaatcaagcagcatgcctacaactcgccaacagagaaggtattgaccgtctgaaatcttacgaacaaagagtacgttctggcgatagcgataatctagaaggacaagccgcggccttctatttcgcacgactttttggcaaggattttcgccgtaatcagattcactttgtcaatgcagtgttggattatggctatgcggtgatacgtggtgctattgcccgtgcgctggttgcacatggattattaccctcattaggcttgtttcatgccagtgaacaaaatgcctttaacttggctgacgacatcattgagccctttcgcccactcgttgatctattcgccgtcaatctcgctatacccgatgatgaaatattgcaacctgacatcaaagctgcattgattaatttgcttaatgtggatgtatccatgccacggggaaaaatgtctgtactttctgccattgagcaatcagtcgtgagcattgcgcgtctctatgagagaaacgataagtcctgtctagagttgcctagtttgatcggattagcatcccatcagctggagtattaaattgtgagtaaggagactcggagatatatgcgcttacttgttttctttgatctcccggttgtaactaaagcagatcgtcgcgcttataccatttttcgacgttttttgatcaatgatggctatgatatgatccagttctcggtatatggacggattctcaatggaaacgatgcattagagaagcatatgaagcgcttaatcgacaacttgccaccggatggatcggtacgctgtttaagcgttactgaaaaacaatttgctagtatgaaactgcttgtcggtctccctctttttcaagaaaaaaaagtcaatcctcaacaattactgctgttctaagcaattttttttactcaaaacacccttcacatgtaagtgggaagggtgtttctgtaaggtctattgtagttcatccggggtgagagagggagctacaaccccagatcgccaagataaagggtatccgatattgtagttcatccggggtgagagagggagctacaacatcttgggatgaagcctgagcatcgtttcgattgtagttcatccggggtgagagagggagctacaacctccggtagcatctcctgttttatcgcgttattgtagttcatccggggtgagagagggagctacaacagcaagcacagctctgtgtaggtactaattattgtaattcatccagtgtgagaaagagagcgacatcagattctctcacaagcttcagcaactgctgcaagtttacgataccgtgcgatccatgataatggaatggaagaagccatgttttgctgcttggcatgatgtgctgccactaacgcaccaagaataatggcacggccgcagctatccccaccggctcgaatgttggctttgatcgcagtcgtataatccggcgcatgtttagcgatatgaaaaacgatgggtagcccttcagttacatgacatgcagagccaaagtggctagcggcagatacgctatccagcttgtcggttgcgagcgctgccattaacgatggtttcaatatatcgcccgaaacttccatggcattggtcaaagcttgtgccatcgatttaccttctaataggctttgcagcgctgtagcagcgcaacatgctgcggaaacggcgatatcattgtgattggttatgcgcacgacttcctcgacacgtttcatgagcactgcatgtgaatcctcgtgagtggcgaccagtacagggatcgtagcaagtgcaggcatttgatcgtcatcggcccctgatatttccggaaaattttcagtatcaaggggtagaagtacgcgcacagtttgacgagtaggcgagtcgatatagccggtatattctccaccgggtccatagtgcatacggaattcgagttggtaggcagctcttgtaaatttcccgtgttttgccatgtgtttaagcattaacaaacaggcttcaccgtatccacttgattctcctgccagtttgctgccgtgtgcaaaaaaaccgcttgttccagcataatcggccggatcgggatggcgaaatacgatatcagcatttgtttcgatttcggcaattcgcgcagggtcataaagccagtgcaggcctagagaagctgcatctgcgaccagtgcaccgagaatggccgcaacgttaggatgggtcagaatatgtgtattcattgatagcgttcaaatgagtattttattttgataaatcattcatgaagaccattttcaaactatttatgctcaactttaaaggtgcttctaaaaacccctatgtcgtcacaatacattgttgcacaaaaaatgtttccttacttatcaagcataggcctgtgtcaacattttttgtgttcccctcggcttgtttaaaactatgaattgttagagtcacccttaagcaacaactgcgagagtaaagttgttcagcacaagtgtcaggacaaacaatccaaccaaataagaaaatttacccagtatagtaactgggtatttcagcgtagcgctgctgctaatcttaaaatttggaaagaatatcatccagctgttctaagctcgtatagtgaatgaccaaattgccagtaccgcgttttccaggcttaatcgtgacattcgcacccagtttggatgaaatatcttcttgtaaacgcagtaagtcgcgatcttgcatgattgttcttcttgttggtgcttgttcgatccgcttgatcagcttttcagtttctcttactgaaagttgcttatgcgcaattaagttagcaatttcaacttgttttgcggcagagagcgggaggagggcacgcccatgccccatatcgatttttccttgcatcatcaattcctgcacaggtgttgccagattaagcaatcgcaataaattcgatatggcactgcgagagctgcccagcgcttcacctgctgtctggtgcgtcatcccgaattctttgatgagccgttgaatgcccatcgctgtttccaaaggatttagattttctcgttggatattttcaatgagcgacatcgctaacgcggattcatcgggcacttcgcgaatgatagtgggaacctgggttaatccagccaattgtgcagcgcgccagcggcgctctccagcgatgatttcataaagatcggcgccgatcgggcgtaccagaatgggttgcatgaccccttgcgccttgatcgattcagccaactccattaaggatgcttgatccatgctggtacgcggttgatatttacccggttgcagcagcttgatttccaaatgttgcagggattcagaaaatgcatggtcgctatcgttcgacagcaatgcatcaagccctcttcctaaaccttttaatttcgtcattcgctgttatagtcagtttgtaaatccatattatgctgcagcttccataatctctttggccagtgcaagataggcttgtgcaccttttgaaaatttatcatggaacagggcaggaacaccaaaccccggcgcttcagccagccggatattgcgtggaatcacggttcgatagactttatccccaaaatgttgttgcagttggtctgaaacttgtttggccaatacattgcgcggatcgaacatagtgcgcagcagaccttcaattttaagggtagggttgaaattggcacgtacccttttgatcgtattgacgagatcactcaagccttccagggcgaagtattcacactgcatcggtatcatgacggcttgcgcagcacataaaccattgagggtaagtaaattaagcgcgggcgggcagtccattaagataaaatcataatcgtcctttaccgtttgcagtgcaactttaagacgggtctctctctgtgctagactgaccatctccacctcggcacctgctaaatcctgattagccggaattaaatcatatttacccgccgtggctgtaatccggacatcggtaatagattgttcgccaagcaaggcatgataaacggtgtagcgcaaaacacgtttatcgaccccacttcccatcgtcgtgttgccttgtggatccaaatcgactaaaagggtacgttttccagcaatggccaggcttgccgccaaattgataccggtagttgttttaccgacgcctcctttctgattggcaatcgcaagtatttttaccactactcccactccttaatcggggtgaatcaaggtaaccacaatcaattcgaacgttcagatccaggtttaataacgatcaaatgtcgtgctgctctaaggcctggcgccataactcgtaacactttttccacctcatattgcgggggtaactgcatcaattccgcatcaggaaatttgcctttcatggcaaccaaccgactttcttcagagtcggcacataaatgcacagcggaagctacaaacgcactcaaatcggcaaatgcgcgtgaaattaccgtatcgaatttttcagagggaaaaaaattttctacacgctcacaaacaattttgacattcttcaacgctaactcaacacatgcttgtgttaagaatgcacattttttttgattgctctctatcagcgtcatgtgccagtcaggccggacaagcgccagcggaattccaggcaatccagcaccgctgccgacatcggcatgccttttaccattaagagtgggtaacagtgtcaaactatcgagtatatgtttggtcaccatttcttctggtttccgtacggcagtcagattatgcacccgattccatttatcgaggaaaagaatatattgctgcagtcgagctgcgagcctttttctttcctcaggcagcccacatgccagtttttcaaggccatccagcaattgattttctagactcatttttaatattatttgatttctgacaattcgaaaccgcgtttcaaatgcactaacagcaaggaaattgcagctggcgtaatacccgaaatgcgggctgcatgtccaattgtctcaggtttaaattgattcaacttttgttgaacttcgctagaaagcccacgtacattccgataatcgatatccttaggtaagctcgtcatttcataagctgtgtgccgagccacttcctgcttttgccgttcgatataaccttcgtacttaacattaatttccacttgctcggcaattctctcatcgaccaacccctgttcgataccgggcaatgacataagtctggcataggtcacatccggtctacgcagtaattcatacagcgaatattctttttctatcgttttacctaacacattgactagatcagcctccggcagcatacctgggcgtaaccatagcttacgcaacctttgttgttcggtttcgattgcctcgcgcttagcaacaaatgcctgccagcgtgattcattcactacacccaatcggtaacccatctctgtcagtcgcatatcagcattatcttcgcgtaactgcaatcggtactctgcccggctagtaaacatgcggtaaggttccgtcacaccacgtgtgatcagatcatcgatgagcacacccagataagcttcatcgcggcgtggacaccatgcatcacgcccttgcacttttagactggcattcaggccagccaataatccttgtgctgcagcttcttcataccctgtggtgccattgatctgccccgcaaaatataagccctcgatcgcgcgcgtttccaaagaacgcttcagtgcacgagggtcaaaataatcatattcaatcgcgtagccaggccgggtgatatgtgcattttccaacccacggatagaacgcaccagatcgatttgcacatcgtagggtaagctggttgaaataccatttgggtagacctcatgcgtatccagcccttcaggttcgagaaagatggtatgagaatctctatcagaaaaacgcatgatcttgtcttcgatcgaggggcaataacggggcccaatcccttcaatttttcccgtgaacaaaggtgatctatccaaaccatcccgaatgacatcgtgcgtgtggcgattcgtccgcgtaatccagcatgctatctgacggggatgctgcgcaacgctacctagaaatgaaaataccggcacgggatcgtcacccggttgctcttgtagcaaggaataattgatgctgcgcccgtcaattcgtggaggtgttcccgttttcaagcgtccgacaggcagattcatttcacgtaatctttgtgccaaactgatcgaggggggatcgcctgctctgccagcttgaaaattattgtttccaacatgcgccaaacccgccaaaaatgtccctgtcgtcaaaataacggtgtgtgcagaaaatttaacgcctagctgggtaactacaccggcaattcggtccccttgcaaaaccagatcatctactgcctgttgaatcagccagagatggggttggttttccagtcgtctgcgaatagcttgtcgatagagtacgcgatccgcctgagcacgcgtcgcgcgtacggcaggacccttactggaattaagcactctaaattgaatccccgcctcatcgatcgcctcagccattacaccaccaagcgcatcgatctccttgaccagatgacctttgccaattccaccgatagaggggttacaggacatttgccctaatgtttcaagattatgcgtcaacaaaagcgttttttgccccatgcgcgcagcagccatggcagcttcagttcctgcatggccacctcccaccacgataacatcaaatgtttccgagaatctcataaaggcatatcaataataagttaatctatcctctttattctaagctattcagcacttattattcacaaaaatttggttttttatggaatgtttcacgtgaaacatcgtcaattaaccacccatcaaaatttaccggatcatcacagcacgaatcgaaagaaattatttttatgattttaagttacccgaaaattcttgaattgccacggatcagatcgatccaaatcttcctcgaacaatactccacggccttgaagaggtgtccaatcactatattgtccgaccatttcccccaagtatagcgccgccactttctgcacttcatcaaaaggcacttcgtcaggctcgactatcccagcccgcggattgtttaaagcccatacaaccccacccaaaacgcccgctgcgacttgtagactggttgcattattacagggagcaagttttcgtgctgcttgaatagataaaacagaaccataccaatagacaccttttgcgtgccccatcagtaacacacccaactcatcgacaccatcataaatatcatccatcgctaggcgtgttttcgattgcaatgctaaacattttccattcagctcatgaattgaaaggactgccgcatcacagggatgatatgcataataaaccgtcgggcgatagctaatattgcccccttccttaaccgttaaatagttggccaacgatatcgattcactatgcgtaattaaaaatccacgataggatccttcccgcggtgtccagccataaacttgtgtttgtacgcccggttgtgttagataaatagaagcatcacacccatattcatggcgtcttccatcgaccggcatttgtttttcatgacttccccagcctaactccgctggctgaattccttcagaaacgaagccatctatagaccaggtattgacaaattcatcgatctttttgggtggatcaataacctgtgtatcgcgctctgcacactgaatgacagccacttttaacagcgatgctagcttcgcccactgctcacgcgtcctgggtatttgtgggcaaataccgacatcattagcaatgttgagtagcgcttgttttacccaatgcgaaaccaatccgggattgacgccatgacaaagcatagccgtgggaccgttgcctaatttttcccgcagtcttaatgcttcttctcgtagcccgtagttagatctttcagaaagcgaacgattagcatccgcatacccacccacccaaggttcgatacaagtatcgagataaagcactccgcgtgcatgacagaattcaatcaaagcgcagctcgagacatttactgagacattgagcaaaaaatcgccaggggctaataatggatcgagtacctgacgataattctctggattgagtggtttaacttcgaatgggatatcgaagttctcagcttgagcctttcctctctcatctgctgcgattactctaatctggtgcggagagatctcaacgtgtctgaacaataatgggagaaacccctgccccacgcttccgaaaccaataaatataaattttccgttaaatttaaataatttttcatcgttgaccattagctttatcttttatctataacttttcttcatttataatctacacgtatgaagtaatcttgagcaatcactctatatcttgaaacggccgccgttgacgatacatttcgtaccgagaggccgaatgttcgcatcaagagtgtgtatacagactaaaacctttaagtttacaaattattaatgggatgggcaaacctactatggaagacatgtacgaatccgaacatactaaatttatgcgcgagcttttcgagaaaagaccccatttatacgagcaacaaaaagaagcacgtgctatttggtgggataagaaggtaaatcaagaagaacttaaacgttttaaggaatcaaaagagccgcaaaaaggttatgtttatttcgattggctggataaagattaatagtaatagccattgctatcgaaccctataagttcgatagcaaccaaatcctatattttattacgttatgattcaggtttgtcattttgtgcgctgatcgaagaaacttacgaaggtaacaccatttggaagatattccattacatatattacttattgcattagttttattgttgattttgtcggggtttttctcgctttccgaaaccagcatgatggcgatcaatcgctatcggttaaagcatctcgctaaacaaggacatcgtggcgcacgattgacgacacaattgctcgctaacactgacaggttgttgggcgttatcttgctaggcaataatttgctcaacacggcagctgcaacattagttgcggtgattatttcttcatttttcgcacacaacgaatttgcattacttatcggaacgatttgtgtaaccctcgcgatattgattttcagcgagattacacccaaagtcatcgctgccgcctacccagaaaaaatcgcactgacagcgagttacgtgctgactcccctactaaagattttttaccctgttgtttggttcgtcaatctgttcgtgcagggactgcttatcctttttcgtttaaaaccgcaagatcatacaacgcataaaatcagcccagaagagcttaaaacactggtattggaagccggccactttattcaaaaaaaacaccagagtgttctagttaaccttgttgatcttgaatcagtgaccgttgacgatgtaatcgttccaagaggccagatcgaggcaatcgatttagaagcggacgatgacatcatttacgaccaattgctaacttgtcaccatacgcgattacctgtttttagaggacatctcgataacgtcgt

SEQ ID NO: 2871 - DNA, 23357 bp, synthetic construct
  source 1..23357: mol_type = other DNA
  misc_feature 1..23357: note = Synthetic
ctcgaatccggtcctatcgtgctggtgtccacgcgcggcgcggatggtcgggccaatctgatgacaatgggctttcacatggtgatgcagcacgagccgcccctggtcggggcgatcatcgggccgtgggactacagccatcaggcgctgtcggaaactggcgaatgcgtgctggcagtgccgacggtggacctggctgaaacagtggtggacatcggcaactgctcgggcgatgccgttgacaagttcggtcactttggcctgacacccgtgcctgcgcagacggtgggtgcgccgctggtgcgccaatgctgggccaacctggaatgccgggttgtggatgacggctgggcgcgccgctacaacctgtgggtactggaggtccagcgcatctggatagacactgaacgcaaggaaacgcggttgatccatcaccagggcgatggccgcttcagcgtcgatggcgatacgctcgacctgggcgagcgcatgaccaagtggcgccacttgatgcgctgacgtcccaggccgctcgggcggcgacatgccagcatcgcaagacaagctcaacatcctcgcagccggcgatgcggtggcattgctacacctccaggcgctgctggacgtgctcggcaggtacgcttgcctgctcggggatcacccggcgggtgcgcatgcggccaagatcgcctgctacatgatgatggtggactactcccttgcgagtaacacgtccgccaaggtgaggctgaggccaacgtcgcaccgctggccttgaagtcgggctgatgatggtttgcgctgggtggcgatctccccgaccggacagaactttgtgctcttcacactgcatagcagctgctactcggactatgatgctgtcatacggcagcggtttgttggcaatcgcgcccagactttctacaacaatgctcttatgtagctcctagcccacgacgcgacaaccttgccaagcaggctctgaagtagagctttacccgcgtcccatatggaccacaggccggcaggctgttttcacaaaacgcttgacgccggccatttttttcgactgcttgcctgtctgtaaagcgacaatacctgctcccggcgcatggcgtggtcgacgacgggagcagggtagtccttgccgatcactagtcctagcgcctgctgccgcaatggcgggatcagccacggcgcgtggatctccttgtcgtcgcatggctggagctcgggcacgtatttgcggatgaatttaccctcgggatcgaatttttccgattgcgttaccggattgaagatgcggaaccatggctgcgcgtcgcagccggtcgaggccgcccattgccagccgccgttgttcgcggcgaggtcaaagtcaatgagcttttccgcgaagtagcgttcgccccagcgccagtcgatcagcaggtccttgaccaggaagctggctgcaaccatgcgcaatcggttgtgcatgtagccggtctggttgatctggcgcatggcggcgtcgaccagcggatagccggtacgaccttcgcaccaggccttgaacaggctttcaccattggggaacgggatatgctcgaactccggcttgaagctgtgcccctcggccacttgcggatggtggtacagcacctggaaatagaaatcgcgccacagtagttcgttgagccaggtttccgcacccgcaccgccttgctgccacgccgtccgtgccaaatgacggatggagacggtaccgaagcgcagatgcaccgaaaggtaggaggggccttttagtgcagggaagtcgcgcgcatcgcggtagcgcggcatacgctcgctgaagtcctcgaacagggccatgccgcccgacatgccagtaggtagcctgagctgcttgaggttgctgcgcgcaaagcctaatgactccaaggagggcatcggctggggtgcaaactgcgccaagtggtgtatatagcggtccaccgggtaggccttgaggtggaaatcgtccaattttctcaggcaggcgttcttgtaaggcgtgaagacgctgaatggggggcctgacttggtcatgatttcgtcacgctcgaaaatcacctggtccttgaagctcttgaacgcgatgccttgcgtgcccagttgctgactgacggtgtcgtccctttttacggctgccggttcataatcgcgattgcagtagacgcattccacgcccaacacgcttgcgagtgccgggatttcctcagtagccttgccgtggcgcaccagcaggtcgccgccgcgttcctgtagggcaagcttgagttcatgcacgctttcccagatgaattccacccggcggtcatccctgggcaggccatcgaggatatcggtgtcgaagacgaaggcgcacacgacctgttcagaatccttcagggcatggtagagcgcggcatggtcgtagtcacgcaggtcgcggcggaaccacaccagggacttggtcatgggttattcgcggtggtaaggatggttgttgatgacgctcaagccgcgatagagctgctcgctgagcatcacgcgcaccatgccgtgcggcatggtgagtttggacaggctccacagccagtctgccttatgcttgaggctatcatgcagtccatcggcgccgccgatcaccagactgacatcgcggccactttccatccatccacgcatcttgtcggccagttgcaatgtggtgacttcctggccgtgttcgtccagtgcgaccaggtaatcgcggcctgcagcttcgaggatgcgcttggcttcggcttcctgcacggcttcagcattcttgcctgaagcgcgcttgtcgggcttgatttcgacgatttccacattcatttcgcgcggcatgcgcttggtgtattcggtgcatgcggattgcacccagtccggcattttatggccgacagaaatgatccgcagcttcaagagggcagttactctgtggctttgatatggccgcggcggctttcggcctcgccccagagttgctccaggttgtagtaggcgcgggttgcgggcaccatgacgtgcacgacgatctcgcccaggtcgaccaacacccattcaccttccttctcgccttcggtcccctggatgttggcgcctttttccttgagcttctcgcggacattatccgcaatcgccttggcctggcgcgtggaattcgcgctggcgacgatcatgtagctcgtcagggaggtgagcttgctcacgtccatcacggtgatgtcaaaggctttgatgtcctccagcgcgtcgacgacggccagcttcatttgttctagatctagcattaggcagcttgtacggggatgtgctggcgttggtttttgatgcggttatcggcatcgacatacaccagctggggtttgaattgggccagttctgcttcagtatagctggcgtaagtggcaataatcagcaggtcaccagggctggccttgcgcgcagcagcaccgtttaccgagataatgccggaattgcgctcggcgcggatcgcataggtggtgaagcgctcgccgttgttgacattgtagatgtcgatctgctgatattccttgatgtcggctgcttcgagcaacgcttcatcgatggcgcaggagccctcgtagtccagctccgagtgcgttacatgcacgcggtgcagcttggatttgagcatagttctttgcatggccaaccaatgtgaaaaaacatgaccgactattatagtggaaacaacacgctgaataaatgaagatttattgccaagggggatatcaaggtcatgagcaggcaagaacgtagctggattatcgcctgggcgaccctgcaagggataggcctgtggctgctgcacgagtggttgatcaggctggtcggtaaaggccagtatttgagcgtgatctggccttggtatgcattcatcgtgacattgccgctgagccagatgatgctttccccataccgcaacaaaccggcgttgtggtggatgtccgcgggcttctccctggcgttggcggcttctgcggcctacatgggtgatcaggcctgggtggctgatctgccggtgcgcagcgtcgagctgcgcgtcttctcgcttggtgccatggggctgggtagttggttcgtcttgctgccgtttgccgagcacaagttgctcacgcgtcgctggttcggcgattattcgctgttgttttccgccgcctggcgcaatctggtgaagttggtactggcagcattgttcaccgggctgctgtggatattgctgttcttgctggccggtctgttcaaggttctcaacatcggtttcctcatggacctcttcaccagccgcatattcgcctatcctgtcacggcgatcgcctttggcatcggcatttccctctatgctgcgaaagaggaggcgctggtgggcatctatcgcgctagcctgaacatcctgggctggctgctgcctgtagtgagcctgatcctgattctgttcctggtggctttgccgttccagggcctggccctgctctggaagacgggttacgctaccagcctgatgctgtgcctgctggcatggaccgtgttcctgttcaacgccgcctggcaagacgcctcgggcgagcagcgctttccccgttggctgctgcgcttcatcagtctcggcctgctggtcatgccggtttatattgccctctgcgcctattcgctcggcctgcgcgtcgcgcaatatggctggagtgtggacagggtatgggcggtactggccatcgtcaccatggcggtctacgccttgggatatgcgttcgcggtgctcaggcgcaacgctgtctggatgctggaagccaggcaagtgaatatcgctgcggcgctgttcacggtagcactaatggtactgaccatgacgccggtactcgacccggccagggtggcggtgagtagccaggtggctaggctgctggatgggcgtatacccgtcagcgattttgatttcgagtatttgcggctgcaaggcgggcgttacggcaaccagcgtctccaggagcttgcccacaatgccacgcatgaacatgcgtcattgatccggcagaaggcggcaggtgcattgaaagtgacgtatcggacgttcaagcccaaaggccctgaaccgctgacgcgcgagcaattgcacgggcgcttgacgccttatccacacgatgccggacttgatccgtcatttctggatttcctgctcgggcaacacaatgctggcgatatttactttaactgtagcgacaacaaaccgtgcccggtattgatgctggacctgaacggcgatggcgagcgggagctggtgctgctggccggctacggcagccgcatcttttcccaggagcaaggggtatggaaggtggttggccggttggcaggcaaggatatggatgcattgggcgccgccaggatgcagggcgcgctggaagcactggatttctccgccaagcctaacgcctggcgtgaactgtggataggcgacatgaaataccaggtggatgcgcagtaagcgcgcaatatgtcatgttcgtgcttcagtgccttgatcgcggggctggggcgctcagacggaaaactcgatattgtcgatcagccgggtgttgccttgccgcgcagcagcaagcactaccaggttgtgatcgtccaggctggcaggcaggagtgtcgtgctggagcggatggagatgtaatccacgatccagcccagctgggtgaggtattggctgctttgcgcctcgattgcggggtagtcgcggttaccttgctgcacgttgtccacgatcagcttcaatgtgcggtagagcctttgcgcttccagcttctgcccttcattcagatagccattgcgcgagctcagggccaagccgttgtgttcccgctgggtctcgcccgcgatgatgtcgatgggcaggttgaactggcgcaccagctcgcggatgatgaacagttgctgaaaatcctttttgccgaacacggcaatatggggctgcacgatattgaacaatttcattaccacggtggcgacaccatcgaaatgaccgggccgtgctgcgccgcataattcatttgcgattggtggtggcgtgatacgcatggtttgcgcagtgggatacatctcctgcaccgatggcgtgaacacgatatccgcgccggctgcctgcagctttgcgcaatcttccgccagcgtacgtggatagttgtccaggtcttcgttggcaccgaattgcagcggattgacgaaaatgcttgttaccacgcatccagcacgctgccgtgcaagctccaccaaatgaatgtgcccggcatgcaggttgcccatggtcgggaccagggcaatgctgttttcgcccgctaggcgggcacgcagactcgagatctcgggaatgatttgtaacgtcatggtcttactcgaaagtgtgttcaatgccggggaaggtttgtgctttcactgcggcaacataatcgcaaatggcctgctctatgctgccagcgccttgcatgaagttgcgaacgaagcgcggcgacttgcctgcgtaaatgcccagcatgtcctgcagcaccaatacttggccgtcgcagtatttgcccgcgccgatgccgatcacggggatatgcacggcctggcttactgcggccgcgagtgctgcgggcaccatttccagtaccaacatgcctgccccggcggcggtcagcgccttggcatcgtctagcagttgacgtgcggcggcttcatcccgtgcctggactctgtagccgccaaactggtgcactgattgcggggtcaacccgaggtgcccacagacagggatgccgcgctccaccaagaagcgcacggtttccagcatgatggcgccaccttcaaccttgaccatctgcgcacctgctgccatgagcaggacggcattctcgaatgcctgctcaggggttttctgaaagctgccgaacggcatgtcggtaacgatgaaggcatgctgtgtgccattggcaacgcaccgggtatggtattccatgtcgcgcagcgataccgccagggtgttggcatggccttgcatggtcatgcccagcgaatcgccgaccagtagtacgtcgacgcctgccttgtcgctgagcgctgcaaagctcgcatcgtagctggtgagtacagcgattttttcgccgcgctccttcatttgctgcagtgtcaggaggttcatgcggaacaggctccttattccaggttggggttgaaaaactcgcgtcggctgcgcatttgcatgatgcgatccagaagcatctgaatggcgccttgcttttccgtgatgtcgagtttctcattgttgacgatgagcacgggcgcgccatcgtatcggtggaaaaaatcgctgtatgcatccgacaggcgggcgaggtattcgcgtggtatttcctgctcgtaggcattgccgcgctgattcacacgctcatgcaaggtttccaccggcgattgcaggtagatcacgaggtcgggcgtgggtacttgtacatgcaggtgcttgtacatctggcggtaaagcgcatattcctcgtcgttgaggttcatctgcgcaaacaacgggtccttctccagaaagaagtctgcaatcgttgcctggttgaacatgtcgcgctggatgaggtcacgaatctgctctacgcgctggaacaggaagaacatttgtgtggggagggcatagcgcggcgcgtcctgataaaacttgggcaggaatgggttggcgcctgcattctccagcaatagattgactgggaacatatccgccagcttgtttgccagcgtggtcttgccgctgccgatcgggccttcgacgacgatatagtggaaacggtcgaaaatgctcatgtactctgttcctgcagcaacaccacgccctgatccgcgcactgcttcgccaagtcggccacgctgccgtagccggcaatatgcagctctggcgcaatttccgccagcggcagcaggacaaagccgcgctggtgcatcctggggtgcggtagcgtcaatgccggagtgttcatgaccacctgttcatagagcaacagatcaaggtcaagcacacgaggggcattggggaagggcctctccctgccatgtcggttttccaggtcgaggatggcttgcagtaacgccatcggctccaggccggtgtctattgccgctacggcattgatgaagtcgggctggttgtcatagccgacaggcgcagtgcggtaaagcgaggatgcttttaccaggcgggtttctggcaaggtatccagctccgtcatggcttggctgacctcgtggacggggtcgcgaagattgctgccgagagcgatataggcaagcgccattctactcctccgctgcagacgaggacggcttcctggagcggcggcgcctgcgtttgcgtggcgcggtgtcgggcagcagcatggcctggcgttgctcgccgtcggcattggcgaaatccgtccaccattggccgatttcgctaggcagctcaccggattcgcagcgcaataacaggaagtcgtaaccggcacggtagcgcgggttttccagcaggctgtaggggcgtctgcctgcccgctgctcaaagcggggctgcaggctccagatttcgcgcatcgtcacactgtagcgcttgtgaatggccattttctcggcctggatgtcgcagacctcatccattgccatatgcaatgcagggatgggcttgttcccttgctgttcgaatttcttccatgccagcaacacctcgtgccataacaatgcggcgaacaggaatccgggcgaaacaggtttgtcagccagcacgcgctcatccgtgttctttaatgccagccggacgaaacgctcgcccatcggctgttcaagcacaacatccagcaacggcagcaagccatgatgcaacccatgctgccgcaaggcgttggcgctttcgatggcatggccggagaggaacaacttgagcatttcatcgaataaacgcgaaggaggcacatcatgcagcaactcggccagttccgggattggccgttcggtttcgggggccagcttcaagcccagcttcgccgagaggcggactgcacgcaacatgcgcaccggatcttcgcggtagcgcgtgaccgggtcgccaatcatgcgcaatacaccggcctggaggtcggccacgccacgatggaagtccagtacctcttcggtcgacggatcgtagtagagcgcattggcagtgaagtcgcgccgcgcggcgtcttcctcctgactgccgaacacattgtcacgaaggatgcgaccgctgtccgtcaccttggcatcccctgtttccgcaagatgactgccacggaaagtggaaacctcaatggtttcgtcgccgaacatgacatgaactaggcggaagcgtcgcccgatgatgcgcgaacggcgaaaaatgcggtgaacctgctcaggcgtggcatcggttgcgacatcaaaatccttgggccgttttttaagcaaaaggtcgcgtacagcccctcccacgatgaaggcctcgaaccctgctttttgcaaagcgtcagtggtcttgatcgcagcattgctgatgagcctgcgatctatgcggtgcactgcgacaggaatacgctcgatattggcctgggaatgggccggggtggtggaggcaggttttttaggggatttaaaaacgcgttgcagcagttttttgatcattataggagttgtgcctgagtatctggtgaagcttctttgcgggattataacgtatcgcggaacagcatgatatgcatgtggttttctagcgtgtgcccaatgccaagggttgtggaatagtaaattggcaatgggtgatatatattgctgaggtagaggtggtaaagcccggccagaaggccgggctgggtacgaacaattaagttcttattgtagcaacggctctcaccccggatgactacaactggacaaatgataggggacttcggcatgcaaaacaagaagaatcttgggcctttggcattcggattggatatcgggattgcgtcggttggctgggctgttctgggcgaaaaccgcattattgacctcggggtgcgctgctttgataaggcggaaactgcggataaaggggagtcattaaatcttgcccggcggatggccagattgttgcggcgccgtttgcgaaggcgggcatggcggttgactaaactcgcgcggttattgaaacgtgaggcattgattcatgacgtgagcgtgctcaagcaagccccatctgccggattcaaaacacctgacctttggcggctacgcgtagcggcattggagaggaagttggagccagaggagtgggcgcgcgtcatctaccatatctgcaaacatcgtggtttccattggctgagcaaggcggaagaaaaagcggccgagagtgataaggaaggcggtgcggtcaagaaaggcttggcgggcaccaagcggttgatgcaggaaaagcagtatcgaactgctgctgaaatggtgatcagcgaattcccggatgcccagcgcaataagcgcggcgactatagcaaggcattatcccggctattgttagatgatgaattgcgcatcttgttcgacaggcagcgcagcttgggcaatccgcatacttcggaaacctttgaacaggcattgcgggataggcaaaccggcttgctctgggctcagcatcctgccttgtccggtgaaaatctcttggaaatgcttggagagtgcacgtttgaaaagcctgagtaccgtgcgcctaaagcaagttttaccgttgagcgacatgtctggctgacgcgtttgaacaacctgcggctgatcgtggatggcgagaggcgtgcattgaatgaagctgagcggcatcgggtgctgaatttgccgtatgaacagagcagcgatttcagttacaagcaattgcgcaaggcattggaaaaagccggattgacagcagatttccgctttgctggcttggtgtatcccaatgccaatcaagagcagcataaaaccaaagatccggaagaggaaaagctggtgaagatgcccgcctggcagaccttgcgcaaaagcatgaaagaagcagggttggaagaggattggcggcaagtgaccgtggctgcgcttgatggcaaaccgcagttgtatgacgaaattgcgcgtgtattgagtgtttacaaggaagatgaggaggtcgagcgcgagcttaacaagctggatttgccaaacaaggacgatctaattcaggccttgctcacggtgcggtttgataagttcagtaatttatccttcaaggcgctgtatcgaatcctgccctatatggagaaagggcaacgttatgatgaggcgtgtattgaagcaggctatcaccacagtcagccccaacaaagtattgatcataactataaagatatttatcttcctccgctttatgagcagcataggggaaaagaaaaacataacaaaaataagatgattttcagcaagaaaatcgagcgggagattcagggaggaattccacgtaatccagtggtactacgtgccctcaaccaggcacgaaaggtggtcaatgcactcatcaagatttacggttcgccgcatgaagtgcatattgaaatggcgagggatttatcacgtcctctggatgagcggcgcaagatagaaggcgagcagaaggctttccgtgatgtaaatgagcaggaaagggaaagatttgtaaaggattttggtcggcaaccgtctggacgagaaatggaaaagtggctgctttaccgggagcaggatggtcagtcaccctattcacaaaaacctttggcaccttttggcgacgtcgcagaaattttctccgacaataccactcagattgaccacgtgcttccctatgcacgaagctatgacaatagcagaaataacaaggtgttagtgctgacaaaagaaaaccaagaaaaaggtaaccgtacaccatttgagtatcttaatggctccaacgaaaacattatgtggcataactttgttggctgggttacatcgaacaagaagtatcgttcagctaagcgaaatcgcctactcaagaaagatttcggcgaagatgaggagcaatcctttagagagcgcaaccttaacgatacacgctacatctgccgatttttcaaaaattatgtggagaaatatcttaagctggcagactgcgacaaggtaaagcgttgtgttgttgttaatggtagtttgacctctttgttacgagcacgatggggattaggtgcaaaaaaacgtgatactaatgatcggcatcatgcgttagatgctgcaattgttgcagctagcggacatttaactgtgcagcgccttgctacgtttgtcaacgaacaaaattggacacagcgcaagaatgaaacgactggccatatggaatatgtcaatactaagaccggagaagtccttcctgtatccgattttgtaaagctggatgaggtactgagactttttccgcatccatggtcacattttcggcaagagttactgacacgactcaatgaagacaatcttgctgtcttgcgcaaagagcttaagcaactcggcaactattctttggaagagttggaaaagttgcgtatcttattcatttcacgctcacccaaacggcgtaatggaggggcgttacatgaggctacaatacggtcaccgaaacgattgaatcaaggtattagttatgtgaaagttccattgcagcaactgactttggcaaagctaaagggaattgttggagcaacatattcgcgtaatgctcctcttattgcattattgcgagagcgccttgagcaatatggtaatgacggaaaaaaggcttttgccgatcctgttcataaaccatccaagacaggtaaaggatcattagttaaatcggtgaaagtggcatcaacacaaaataatggggtaatgctagacaatggcattgccgagttgggagatatgcaccatgttaacgtatttaaaaatggtgatcgttatctcattgagcctatctatcaaatatttactaacaggcttatgaagcctttacaaatccccagtgaggcagaattcttatttacactcaataaaaatgattatataaaactgtgtcttggtggagtgagttatgaaggctattttgtcatgtatgaaagtgatggtcgtttaacactacgtgcacacgaccagcctaagcccgacaaagattattttagaaagagtgttacaagtgcccaatacatacaaaaattccatgtagacattctcggcaacctctatcccgctctgccggagaaacgccgtgacctggcgtagcattgtcatctcccagcctgccaaattgcgacgggagcatttttctctcgcgattgagcagatgcaaacggcattcgtgccattcgaggacattgctatcattgtcctcaataaccgtgagatcacagtcactcatcctgtgttggccgcttgtggtgagtacggcattagcctgtttgccacaggcgacaatcatcaacccaatggcgtattcctgccttatctggcgcattcccgcgctacgcgctggatgcggctgcaactggatttgcccaaacctattgcaaagcagacttgggcaattatcgtacgtcggaaaattgccaatcaggccgcttgtttgcggttatcagcttgcaatggatgcgataggctggattcctacgttgggcgtgtacgttctggtgacgtggaaaatatggagggtcaggcggcagcattctatttcccgcaattgtttggtaagggcttcaagcgcatacaggagagttttaccaatgcagccctggattatggctatgctgtattacgcggcaccattgcccgagggttggttgcccatggcatgatgcctgccctgggtatctttcatgccagtgaacagaatgccttcaatctagcggatgacctgattgagccataccgtcctttggtggatttgtgtgtcaagcatatgcaggtcccacataatgaccagcttgctcccgttcataaagccacgctggttaatctgctgaacatggatattgccatgccgcgtggcactatgtcggtgttatccgcgattgaacatacagtggaaagtctggcgcgcgtgctggatggtggaactgccgaattgcttgagttacctgttttgatcggactggaacaacatcgattggaattctagccatgagcggggagaacagacgatatatgcgattgctggtattttttgatctccctgttgttaccaaggctgaacggcgtgcttacacagtgtttcgtcgctttttgatcaatgatggctatgacatgatccagttttctgtgtatgggcggctagtgaatggcaatgatgctttggaaaagcatatgaaaaggctggtggataacctgccagcagaaggctcaatccgttgcctaagtgtgactgaaaaacaatatgccagcatgaaactgctggtgggattgccgctttttcaggaaaaaaaggtcaaatctgaccaacttcttctcttttaaatattgattccaaaaaataaacccgcgccagagcttgtctggtgcgggtttggtgagagcctattgtaagtcatccggggtgagagagggagctacaacacaatgagcgctggtatctgcaaaccccttattgtaagtcatccggggtgagagagggagctacaacccagctaaacgagataaattccatccgcatattgtaagtcatccggggtgagagagggagctacaacgcgtcgggaggtggggccattatttgccccattgtaagtcatccggggtgagagagggagctacaacaagtcagcccggtgacagatggcagcgcggattgtaagtcatccggggtgagagagggagctacaaccgtatgcttggaacaatgagcctagttccaattgtaagtcatccggggtgagagagggagctacaacacaacctgatccatgtagccttgattttttattgtaagtcatccggggtgagagagggagctacaacagggcaactggcaggcgctgtgccatgcgtattgtaagtcatccggggtgagagagggagctacaacccgaacgcgacaagcaatgcgacgccaagcattgtaagtcatccggggtgagagagggagctacaacacctccgtaggccatgacgtacgcgaaaacattgtaagtcatccggggtgagagagggagctacaacagctgccactgcggttggcctggtcggcgtattgtaagtcatccggggtgagagagggagctacaacccgtcctccaggaagccggagccgttgctcattgtaagtcatccggggtgagagagggagctacaacgcctgttcgagcgtaagatctaggtcattcattgtaagtcatccggggtgagagagggagctacaactgctttaagtccccatgtagactgacgacaattgtaagtcatccggggtgagagagggagctacaacattgacccagtcttcccccttgtccagcttattgtaagtcatccggggtgagagagggagctacaacactgatgtcatgaataatattgcaaattttattgtaagtcatccggggtgagagagggagctacaacgggaagccagctggcactttgctttcaaagattgtaagtcatccggggtgagagagggagctacaacacgcgacagcgattgctgccaatggcatcaattgtaagtcatccggggtgagagagggagctacaaccaggtggacggtgaatggcacgccaaagcaattgtaagtcatccggggtgagagagggagctacaaccaataggggatatgccgacagtcgcaaaagattgtaagtcatccggggtgagagagggagctacaaccattcaatcaggggcggtgtaacgtcgatcattgtaagtcatccggggtgagagagggagctacaacaacagcggcgtgctggcgaccatcggccgcattgtaagtcatccggggtgagagagggagctacaacgcgaaaatcaagcaagaagaaggcttgatgattgtaagtcatccggggtgagagagggagctacaactttacaaatgactccagtgtttccaacagaattgtaagtcatccggggtgagagagggagctacaacagcctgtccatctggccaggtgataagtggattgtaagtcatccggggtgagagagggagctacaacaatagccgcagcattggcatttgcatgctaattgtaagtcatccggggtgagagtacttccccataaaatatactcgcccactggcgaaacatccctacgcttcaaatgacaagaaaatattgtctattgattgccaaataaaattgcctattacacaatcaccttgttggcttgaaatgctacagtaaagcgcttacagggagagtgcttttattattgccctgggaatgagcgtttaataagcaatcaagtttctaattcaacatgactggcatggagaggaatggaagaactcatgctgttcgcgttgatatctaaagatgataggcagggattgggtgggtacattcaagcagtggctggagttttctctcgttgcatttgctgtgctgtttttcgcaatggcattcctttttttgggcaatgtcgtgatgcttcagggtgatcgccaggatttggaaagctattccaacgatttattcgcccgcgctgtggccgtcgctgcagagactgaaaaaatactggactccgattggagcactgaggcgccttgcagtgaggatgatctggatcgcatgcggtatgtcattttctattcgcgcatgcttcgtgatgtcgggcggctggaggtgaaccggttattatgctctgccgggtggggagcgttgccggatgagctccaggcattaccgccttctcagtatcacataggagccgtcaggttctggtcgaagatcatcaatcctgcccacccacaagtgatcagcgatatcgctgccaaaggtgatatttttgtggcgacatcgccagcggcattcgaccgttttatctctcctccttctggcattggtgccaaggtggtcacgtcggatgggcaatatgtatttgagaagtttggtgaggcagacgcaatcaattatgttccggcagaacagtggcgcgaccaaggaggtacgctgcgttttgtgcgttgtgacgagaagtacgcgttatgtgttgtctcccagaagactgatggcgggctgttttcaagagaaatcgtcctgccggtggtcttggccttggctgggacgttgtttggactcttcgccgggctggtgggcgtgatccagctccgtcaccagcaatcgctgccggtaaagctgcgtaaaatgctgaggaaaaagagcctgatgctgcactaccagccactgcgggtgttgagttccgggaagctagtcggggcggaggcgttggcgcgttggccgctgcataatggatcgtgggtttcacctgatacattcattcccctggctgaagagttgggcttgatgagtgagttgacccggctggtcgttgaaaaagcattggcggagatgggcgcacgcctgagggaggatccaggtttttatatcagcatcaatattactgcggcggatcttctggatcatgatttcggcaaagtgctggatgcctcggttaagcatcacggggtgttgcctgcgcaggtagtgctcgaaattaccgagcgaaccacttctgattatagccagcttgacggagcgatgcgatcactgagccagaaagggtttagattctatatggatgacttcgggacggggtattcgaatctcggcagccttgcgcagctaccattggatgccatcaaagtggacaaggtatttgtgaaggccattggcacggactcgccagtggcggagatattcgggccgatcagcaaaattgcgcaggatctccgcgtgaatatcgttgccgaagggatcgagactgctgagcagtccagtggggtcttgcaatgggtgcctgatgccattggccaggggtggctattggggaggccggttcctgccgccatgttccccgccaattagcatcgtgttgaatatggatgctggcggtgccaggttgccattcttctaggccgcgttgctggtattaccttccagaaatacttgtacgctgcgcggcctgaggtatacgtggctgccttggtcgatgccaagttcgcggaagcgctcgcgtgtgatctcagcctcgatgatgtcggcctcgttcacgggttgcagttccagtcttaccagcgggccagcggcatgaatataactgacaactgcctgcagcgcaggatgaccattttgctcggtataaatgtcaatgtcgtgtgggcgtacataagcgagtgcatcgctgttttgaacggtgtggtgctcattcaggttcagtgcgatgttgccgatatgcgcttggccgtggtcaacccggctatggaactgattgacgttgccgaggaatttgtagacaaatggtgaagctgggttatcgtatacctcttgaggggagccgacttgttcgatcttgccttgattcatgacaacgatccgatccgcgacttcgagggcttcttcctggtcgtgcgtgacgaatacactggtgatatgtaattcgtcatgcaggcgtcgtagccagcgacgcaagtccttgcgtaccttggcatccaatgcgccaaacggctcgtccagcagcaataccttaggttctacagcgagcgcgcgggcgagtgcgatgcgctggcgctggcccccggaaagctgtggcgggtatcggtcagcgagccaatcgagttgcaccaggctcaatagctggtgtacccgtcgatggatttcggcgtcgctggggcgcgttttcttgggcctgacccgcaggccgaacgcgacgttctcgaacacggtcatatgacggaacagcgcgtaatgctggaaaacgaagccgacctggcgttcacgcacatcgcggttggttgcttcctcgccgtggaagtggatgctgccggaatcaggcgtctccaggccggcgataatgcggagcagcgtggttttgccgcatcctgaagggccgagcagggcaaccagttcgccgcttggcacatccagactgacattccccagtgctgtaaagctgccgaattcttttttgatgttgcggatttcaatactcatgaagtcatccttatggcaggtgtgctgccaatgcgttattggtcagaggctttttcacgcgcaatcgcgctgcggctgctttgccattcgatatacgacttgagcgccagtgtgatgagcgcaagaaaagccagcagcgacgccacggcaaaagccgccgcatagttgtattcgttgtagaggatttccacatgcagcggcatggtgttggtgagtcctcgaatatgccccgacaccaccgacacagcgccaaactcgcccattgcgcgggcattggtgagaatcactccatacagtaggccccatttgatgttgggcagggtgatgtgccagagtatctgccagcctgacgcgcccagcaccaagcctgcctcctcctcttccttgccctgtgcctgcatgagggggatcagttcgcgcgcgatgaatgggaaggtaacgaagatggtggccagcactatgcccgggagggcaaaaatcaccttgaggtcatggtcgatcagccattcgccgaaccagccttgcaggccgaagatcagtacatagatcaagccggcaatgaccggggaaacggcaaacggcaagtcgatcagcgtgatgaggatgctttttcccttgaactcgaacttggcaatcgcccaggctgctgcaatgccgaacaccaggttgagcggtagcgaaatggcggccgcgatcagggtaagcttgatcgcggagacggcatcgggctccaccagagcggcaacataggtttcaaagcccttgcgcagtgcctcggtgaatacggcagccaggggaataaagaggaacaggctgaggaacagcagggacgagatgatgagcgcccaacggacccaggtgggttccgaggtcgcgcggctacgtgctaccttggcattgtagtgagcgagttgggaaacggtggtcgacattattatggtgttcctatctcgaggtgctgttgcggcggctgctccaccattgcaggccgttgatggtgagcaatagcaggaatgagatgaccagcatgaccacggcgactgcggtagcgccggtgtagtcatactgctccagtttggtgatgatgatcagcggggtgatctcggagatcatcggcatattgcctgcaatgaagatgacggagccatattcgccaatcgcgcgggcaaaggcgagtgcgaagccggtgagcagggcaggccagagcgcaggaaggatgatgcggtggaaggtctgccagcggttggcgcccaggctggcagcagcttcttcggcttcagcctccatatcttcgagcacgggctgcacggtgcgtacaacgaatggcagtccgatgaatgtcagggccaccacgacgccgagcggggtaaatgccactttcaggccatagggttcgagcaggctgccgatccagccattggtcgagtaaaccgccgtgagtgcgatgcctgccactgcagttggcaaggcgaacggcaggtcaaccagcgcgtcgaccaatttttttccgggaaaagtgtaacgggtcagcacccaggcagtcagcaggccaaaaatggcattgatgatggcagcgagcagggatgccccgaaagtcagcttgtaggaagcgacgaccctgggtgtcgtgacggtatgccagaattcactgaaactcagttcggcggtcttgatgaaggcggcagacaaggggatcaagacgatcaggctaaggtatagcagggtatagccaagagaaagattgaaaccgggcagcacgcggtgcggtttatgtttttttgccatgttgtaaagttagtgtgtttggcgggagtagggccggtgcaatgtagcagaagccactgctaggcaaaaataatatgttttcataacgatataccccgatgttatttccccgaggctgtgcgattatgctacagcttgtttgttcaggcgcaggggcttcaatacgtcggcaggctgtaactccttggccgtcacaggcttgccgaggaagtggccttgcagcaatgtgctgcccgactcgatggcgatttccaggccggcctgcgattcgatgccggtgatgaccggttgcgcgccgatgtcatgtacaagctgaatcaggcggggcagtatcttgcgtacgcgcgggttgcgctcggcctccttgatcaagctggtatccagcttcacgaattcgggcgagagcttccacagccgctccagatgggagtgcttgctgccgaagttgtcgatggcaatacgatagccacgctccgcgtagttctcaatggcatctaccagctggttttcgtgctcgacgacactttcctgtatctcgatgaccacgcgattggttggcactgagtttgcgtgcaggatacgctcgaataccttgccgtgggcattgacgctgatcagcaggctagggtgcacattgaggaacagcaagccgttttctgcatagatctgacggaaattgagcacgtgaagcgtacgcacgacacgatcgaacttcaccagcttgcccacttgcccggcaaagctgaaggcgaattccgggctgatgccctgttggccgccaagcgatggccggatgaaggcctcatgcccgaacaggtcaccagcctcgctatcgtagataggctggaaggcactgttgagttgcaagcccaggaaggtgctgttgaactctcccgaggactgttcttccagtccatactcgtcgaggtccagatagagggattcccgcaattgggacttgagctgctcgatagcagcggaggtgggggctgtgttctttgtcgtcatggctggctgcttatttgttcacataaatctggtcgaatattccaccgtcggaaaaatgcgttttttgcgctttctgccatcccccgaatagttcatcaacggtgaacagctgcagtggcttgaagtctgcctggtgggctgccaatacttctgcggaacgagggcgcaggtaatggcgggcagcgatttcctgcccttcctgtgaatagtggaactcaaggtacgcttgcgccacctggcgcgtcttgcgcttgtccaccactttgtcgaccagggaaatcgggttttccgccaggatgctggaggatgggtagaccacgtcgaagttatcgttgcccagttccttgttgatgaggaagacctcgttttcgaatgtcagcaatacgtcgccaatgccgcgttgcacaaacgtcgtggtggcgccgcggccaccggcgtccagtaccggcacattcttgaacagcttcgtgacgaaatcgcgcgccttggcttcgtcgccgcctttcttgatcacggcgccccacgcggcaagatagctgtagcgaccattgccggaagtcttgggattggggatgaccaccccgatcccgggctggaccaggtcgtcccagtccttgatgttcttggggttgcccttgcgcaccaggaagacggtggtcgacgtggtaggcgagctggcatgaggcaggcgcttttgccaatcggcagggatgagtttgccgcgctcgaagaggatgtcgatatcgttgctctggttcatggaaatgacgtctgcctgcaagccgtctgccactgacctggcctgcttgctcgagccgccatgagactggttgatcgtgacggattccccggtcttctgcttccagtactggctgaaggcaggattgaagtctttgtagaactcgcgcgtcacgtcgtaggaaacgttcagcagcgtggtatcggcatgcgctaggctcgctgcgaccaacaggctgaccgccaatattttgttcagcattaagacctcgagagggattgagagatgatgaggcgcactataaaagacttataaaataatgtaaaagaatataggggaatataattaggcttgtccattatttatgagtggatgtatttatatatttttttgttctatttatagaagtattttgaatatgtgatactcttccattattgctgtgtttgttgcaccatgatcaacatggacagcaagcctgctatgttgggatctgcgtaggcacatccttacaacacatgttagcgtaagctgacc

SEQ ID NO: 2872 - DNA, 23354 bp, synthetic construct
  misc_feature 1..23354: note = Synthetic
  source 1..23354: mol_type = other DNA
atctacgatttcggcctccgggaatgggccctcggggcggcgaccgtgatcatcgcgttcgtcattctggtgttctcggaaatcactccgaaaatcatcggggcgacctatccggagccgatcgcgctcgcgacgagcgtcgtattgcgcccgatcctgcagatcgcgacaccggccgtctggttcgtcaacctcttcgtgcaggccatcctgcgcctgctccgcattgccgggtcggcggcgggaaacggcggagtccggctgtccccggaagaattgcgcacggtggtcctggaaggctcgagcttcattccccaccagcaccgcagcatgctgctcaacgtcttcgacctcgaatcgctgacggtggacgacatcatgacgccccgggccaacatcgacgggctggatctcgaccgcccggttggagaattgctggaacagatcaagacgagctaccacggcgaactcccggcgtacgacggcgacatcagccggacgcagggaatcctgagcctgcgcaagctcctgccggttctggcggccggggcagcctcgctgacccgggaccagctccggggcctgctcgccgagccgtactggattccgaccggaacctcgctgctccagcaactccagatgttccaggaaaaccggcagcacctcggcctggtcgtcgatgaatacggtgacctgctcgggctcgtcacggtcgacgacatcgtcgaggaaatcatcggggaaattgcgccaccgcggccggggctggcctccggggcagtccgttggagcccggcgggggatgcggtggtcgacggcagcatctcgctgcgcctgctcaaccggcggctggggatcgccctgcccctcggcggccccaaaacgctcaacggactgctgctggaacgcctggagcagattcccgacgccccctgctgcgtccggtttccgggttgcgcggcggagatccttcagacccacgaccaggcggtgcgcagcgttcggctgatccgcgttccggcgatgcccggtgcggcggaaacacggtaagttggcgactgctcggcaatccgcatcgaatccgctaaattccggggtttgcgcggccatctcctcggttcgccgttggcggaacggggctataacagccgctagactccgtcactgaacccatgtccgcggccactcagctcagccccgcagccggcgcccttacgggcctggcgcgtgcgctcgtgcaacaaggaaagctgcgccccgaccgggcggaggcgctggcgcgcaaggcgacccagagcaacacccagttcatcgacgaactcgtcgccgcccgggaagtgaccggactcgcgccgacgaccatcgcccggttcgcggccgacaccttcggacacccgctcctcgacctctcggcgctcgacgccgatcaactgccgaaggacacgatcgaccggaaactcgttgcgggcctgcgcatcctcgccttgcgaaagcgcggcaaccgccttgcagtcgccgtttccgacccgacgaacacccaggcgctcgaccaggtcaagtttcagacccaactcgcgctcgacatcgtcgtcgtcgagcacgacaagctgctcccgctgatcgaaaaaagcgcgcaatccgcctcgcaggtgatcgagaagctgatcgatgacgacgtcagcttcgatgacctgctcgcggaaaacaccgccgaaccgcaagccgatgattcctcgtcggtcgaggtcgacgacgcgcccgtcgtccgcttcctgcagaagctgctgctcgatgccatcgccgagggtgcatccgacctgcacttcgagccctacgaaaagtactaccgggtccgcttccgggtcgacggcatcctgcgcgaagtgtcgcagccgcccctggcgatccgcgaacgcctggtgacccgcatcaaagtcgtttcgcggctggacatctcggaaaagcgtgtgccgcaggacggccgcatgaagctcgccctctcggggcagcgcgcggtcgacttccgggtcagtacgctgcccacgctctacggcgaaaagatcgtcatgcggatcctcgacgcctcccaggccaagctggggatcgacgcgctgggctatgaaccggaccagaaggaattgatgctccaggccatccggcgtccgtacggcatggtgctggtcaccggtccgaccggcagcgggaagaccgtctcgctctatacctgcctgaacatcctcaaccagccgggggtcaacatctccactgcggaggacccggcggaaatccagctcgcgggcatcaatcaggtcaacgtcaacgaaaaggcgggcctcaccttcgccaatgcgatgcgcgcattcctgcgccaggacccggacgtcatcatggtcggcgagattcgcgacctggagacggcggacatcgccatcaaggccgcccagaccggccacatggtgatgtcgaccctgcataccaatgacgctcccgcgaccctggtgcggcttgccaacatgggcgttccggcgttcaacatcgcttcctcggtcatcctcatcacggcgcagcgcctggcaaggcgcctgtgcaactgcaagcagcccgcaccggtcgacaaggatgcgctgctcgccgccggcttttcggaagcggatctcgacggatcctggacgctgtatcacgcggtcggctgcgaccgctgcaagggaagcgggtacaagggccggaccggcatttaccaggtcatgccgatctcggaagccacccagcacctcatcctgcacggggccaactcgatggacatcgcccgccaggcgcagcaggaaggcgtacgcgacctgcggcagtcgggactgctcaaggtgaagcaggggatcaccaccattgacgaagtgctgggatgcacgaacgaatgaacgagggagtgtcatggcaaccggtgtgatggcccggcgggacgcggtccgcgaggcgatattcctgtgggaagggcgggacaagagcgggcgcatcgtcaagggagagatgcgcgccggcggcgagtccgtcgtggccgcatcgctgcggcgccgcgggatcctggccaccaagatcaagaagcaatctctgccgcgggggcgccggatttccgacaaggacatcacgctcttcacgcgccagctcgccacgatgatgcgggcgggagttccgctgatgcagtgcttcgacatcgtcgcccgagggcatgccaacccggcggtggggcgcctgctatcggacatccgcgccgacgtcgaaaccggaaccagcctgaaccaggcgttccggaaatacccgatgtatttcgatgccctgtacagcaacctcgtcgcggcgggagagcaggcggggattctggacaccctgctcgaccgcctcgccacgtaccaggagaagacgctggcgatcaagggcaaggtcaagaaggccatgttctatccggtgacgatcgtcctggtcgccatcctggtggtctcgatcatcatgatctgggtcgtgccctccttcaagcaggtgttcacgagcttcggcgccgacctgccggcgccgacgctcatggtcatcgcgatgtccaacttcttcgtgaagtactggtacctcctgctgttcggcagtctcggtttcggatacttcctgctccaggcctggaagcgatcgcccgcggtccaggccaccgtcgaccgcatgctgctgcggccgccggtcatcggcccgctgctgaaaaaatcgtcgatcgcgcgctggacccgcacgctggcaacgaccttcgcggcgggcgtccccctggtcgaagcgctggactcggtcggaccggccgccggcaacgccgtctacaaggaggcgacgcggcagatccagacggaggtgagtacgggaaccagccttgcgcaggcgatgcagaactccggggtcttcccgccgatggcggtgcagatgaccgccatcggcgaagaagccggggcgctggattcgatgctgagcaaagtggcggagtatttcgagcgggaggtggacgagacagtggacgcactggcgagcctgctggaaccgatgatcatggtcatcctgggcgtcatcatcggcagcatcgtcgtcgcgatctacctgccgatcttcaagctcggccaggtcgtctaacccgcactccacgcacggcgtgcggtgccggggccggcaccgcacgtccgcccggccccctgcgcatgccgttcccagtcgactccctcttcgccttcgccgccgcggtcaccggactcatcgtcggctcgttcctgaacgtggtgatccaccgcctgccacggatgctcgaagcgcagtgggccgcccaggccgccgaattcgccggcactccgatcgaggcaaagccgccgttcaacctctgggttccggcatcctgctgtccggcctgcggcacgccgatccggatccggcacaacattccgctgatttcctacctgttcctgcgcgggcgctgtgcaacctgcgcccagccgatctccgcccgctacccgctcgtcgaagcgcttaccggtctgctgtcctggtgggtcgcggcccatttcggctggggctggcagggtgcgtccgccctgctgctcgtctggaccctgatcgccgcggcggtcatcgacgccgaaacgacgctgctgccggatacgctcaccctgccgctgctctgggccggcctgctgctcaacctgcatggcgtcttcgcaccgctacccgaggcggtgatcggcgcctgcatcggctatctgagcctctggtcgatctattgggcattcaagctgatcaccgggcgcgaaggcatggggtacggagacttcaagctgcttgcggcgctgggcgcctggatgggatggaaaatgctgctgcccatcatgctcatgtcctcgctgaccggggccgtcgcgggaatcgggttgatcctccttgcacggcgcgggcgacacgttcccatcccgttcggcccctatctcgccgtcgccggattcttcgccctcctctatggcccggcgatcgccggccggttcggactgccgctgtgagcgccgtggcccgagcgcaatccgccgcggcattgcgtgtcgcgatcaccggcggcatcggcagcggcaagaccacggcggcggcggaattcgcgcgcctgggtgcgggcgtggtcgacgccgatgcgatttcgcgcgcgctcaccgcggccggcggagcggccctgccggacatcgtccgggcgttcggcccggacgcgatcggcccggacggtgcgatggaccgtgcccgcatgcgcgcgcgggtcttcgcggatgccgatgaacgccggcggctcgaagccatcctgcatccgtggattgcgcggatcgccgccgcacgcgcgcaggagttcgcatcccgggggacctccgtgctcctcttcgacattccgctgctcgtggaatcgggcctgctgcacaccgccctgccgccgcaccggatcctggtcatcgattgccccgtccaccggcagatcgagcggacccttgcgcgcggcgccttgcgccgcggcgaggtcgaagccatcgtcggtgcgcaggcaccgagggcgcggcggctcgcagtcgccgacgacattctcgtcaacgacggcaccgccgccgatctgtgcgcgcgggtcgggcgcctgtgggatgcctatgtcgcgtccgcgcccggcgtccgggacgacaccgcctgacgctgtgttatcttgcgtgtcgaatggacgcgccgccctccccgcaagacctcgttctctacgagtaccccttcaacgaacgggtgcggaccttgttgcggctggaggatctgttcgagaagctccagtacttccagacccagacccatccctactgccaccactcggcgctgctcaccctgttcgagatcgccgaggtcacctcccgttccgacatcaagagcgaattgctgcaggagctggaacgggatcggcaatcgctggccgccctgagagacaaccccaaggtcgcacaggacgccctgcggtcggtgctggtggcgctcgaaaccacccagacgaacctcaacggcttcagcggcaaggccggccagcacctgcgcgacaacgagtggctgatgagcgtgcgcagccgatcgatcatccccggcggcacctgcgagttcgacctgccctcgtatcacgcctggctttcccacgacgcgtcgaagcgcacggaagacctgcgcggctggatccagcccctggcgccattccgcgccggggtcacgatcatcctccgcctgctgcgcgaaagcgcgcgccatacccacctgaccgcccaggccggctgctaccagcagatgctgcaggggcggagttacgcgctgatgcaggtgcgcgtggcacgcgaccgcgacgcgatcccggaagtcagcgcgaacaaatatgcgctctgggtccggttcacccgcgccgacggcgacttcaagccgcgcgcgctggaacaggacgtcgagttcgacatggcgctctgcgcctcgtagcgcccgatcgagcgaaattcggcgcggccgcccgagcttatccggcgattcccgccgcggcggcgggggaaaaatgggggtatttccgaaccatgccctgatcgccgagatgcgctccccccgccaagccaccgcactgcacgacgaagttcccagcgaaaagccgatcggccagatcctcgtcgagcaaaaggccgccaccaccgagcagatcgaacaggcggtcgcgctgcaggaaaccctgcgggtccagaagctgggcgagatcctggtccaccggcagatcgtgacggcggaagacctgttcgaggcgctgtcggcgcagtcacgcatgccgatggcgcggctcggcgaggtgctggtatccctcgacctgatcgaccagtcccagctcgatgccgcgctggccatccagcaggccgaccggagcatccctctgggtgaattgctggtgcgcgaagagatgatttcgcgcgacgacctccgctcggcgctggcgcggaagatgggctatccggtcgtcgacgtgcatcggtttccggtcgaagtcgacgcgctcaaacgcattccgtacgccattgcgcggcggctgcatgtgctgccgctcgccatgctcgacggacgcctggccatcggcatcgaggacgtcacgcgacgggcggccctggacgaaatcgaattcgtgtcccagtgcaaggccgttccggcgctggcaacccaacaggacatcgacgacgcgctgcccgtcgcatacgcccgcatcggcgccaaccccgaaccggcagccggcgcactggacttctgcgagattccgctggcgtcggccaagcccgaaccggtcggcagcagccgggggttgcgcgacaaggcgcgcccaggcagccgcggcatggagtcgccggcaccgcccgtcgacatcggcaggctggccgaggaactcgagcaggtcgagaccgaggcgccggtcgattccgcggccatcgagcagagcgacaactcgctcgtgcgcctcatcaaccagatgatcgtcgaagcgcatgccgactcggtctccgacatccacatcgaatgtaccggggatcggggaaaggtgcggatccgcttccgcaaggacggccggttgcggccgtatctggagctgccgaacggctacgccaacccgctgttgtcgcgcatcaagatcatgtgcgacctggacatctccgagcggcgcaagccccaggacggcaagatcaacttcgcacgcttttcgccgcagcacaagctcgagttgcgcgtcgcgacgattccgaccagcaacggcctggaggacgccgtcctgcggttgctgtcggcggcgaagccgattccgctggaccagatggacctcagccccgacaacctgctgcggctccggtcattgatcgagcgcccctacggcctggtgctgtgcgtcggccccaccggctccggcaagaccaccacgctgcactccgcgctcggacacatcaacacccccgaccgcaagatctggaccgccgaggatccggtcgaaatcacccaggccgggctccgccaggtgcaggtcaacccgaagatcgactggactttcgccaaggcgctgcgcgccttcctgcgcgccgacccggacgtgatcatggtgggagaagcgcgcgacgccgaaacggcgcacatggtggtcgaagcatcgctcaccgggcacctcgtgttctcgacgctgcacaccaacaccgcgccggaaacgatcacccgcctcatcgatctcggggtcgacccgttcaatttcgccgacgcgctgctcggcgtgctggcgcagcgcctcgtgcgccggatctgcccccactgccggaccgaacgcccggcaagcacggaggaaatcgaagagctgctgtccgattacctgggaaccgcgccgaatgccggcgcgcgggtcgtgcgcaagacgactgcggccgaatggcagcaccgctacggccgggaaggcgtactgatgcgatacggcagcgccggttgcccgcgctgcggcggcaccggcttgctgggacggatcgccatccacgaactcatggtcagcaaccaggaactgcgccacctgatccagacgcgcgccgcgcccgccgaactgttggcgtgcgcgacccggaacggcatgcaaaccctgcggcaggatggcatcgagaaagtgctgcagggattgacgacaatcgaggaagtgcgggcgacgagcaacgaatagtggcaccagcggccgtcgcggtgaccgcgccggccccccgcgctcaggcgggccagatcaatccctgcgcgccgagactgcgcgcccgcgccaaggtcggcgccgacggcgccaaggggacatagaccggcaacggactctcgcggcacaactcggcgatcgcctcccaatccggcacgcgcccgacctccgcctccatcaccgcgaaatcgcaacccgaagccgccgcgcgcacgaggtccgaccggtcgcgcacgccgccgccgaaccacgcctccgggtccgtgcggcatgcggtgttgcgtcggtccggggcatcatcgcgcaaggcctgggcggcacgaaccacgccgccctgccaatccgcaccggcatcgcccccgcagccggaccaatcgaccagcaggtgcgcgccgtacgcgcgcgcctgctgcgcaccggcgcgcagcgccggcagcgcgtccgcgacgcgcaggcgcggttcccgcaccagcagctgccgcgcgccgcgcccgagccgatcgtcgatccattgacgcacggcggcgccatcgggcagatcgcccggcgaaagaatggtcatggagggaagctgcgcccagcgcaaggccgggatcgccgccggcaacagcggctgcggtggcggcgcatccggcgcatggaaccgcaggcgctgcccctccttcggctccggcaccccgtcccaggcgaacacccggcggaagtacagccgcacataggcgtgcggatagtcgtgctcgatcaccgtccacggctccgaagcccggacatgcaggcccagttcctcgtgcagctcacgcgcgagtgccgcctccaccgattcgcccggttcgatcttgccgcccggaaactcccaatagccggcgtagggtttgccttccggccggtccgcgagcagcacagcgccgtcgccgcgtacgaggacgccgacggcgacgtgggtggtggggcgggatggggggatcacggaatcgtccggcattggctctgacgcctcttgtcgagtccggaaacttatcgcaacatgcacgccttggatatctgccggtatgcaatccgcggcacgttatcgagaatccacaaaaaggaaggcccgacttgcgtcgggccggattcggcgcgtagtcattgcctagcgccttattgtagcaacggctctcaccccggaagactacaacgggtccgattctagcccgtaggaaatacaacgtgcaaacaaaaaacctactgtacaccttgggtctcgacatcggcatcgcctccgtcgggtggtgtgtcctcggagagaatcgaatcatcgatctcggcgttcgttgctttgacaaggcggaaacccccgacagaggggagtcgctgaacaaggtgcgccgcgatgcgcggctcatgcgcagaagattgcggcgccgcgcttggcgtctgaccaagctggcacggctgttgaagcacgcggggctcattgacagtacacgaatcgttcgagaccgacatgacggcgcggtttctccctggcaactgcgcgtcgagggtctggaccggaaactcgcaccggaagagtgggcgcgagtgatttaccacatcgtcaagcaccggggcttccattggatcagccgggcggaggaaagaaaggcggaatccgacaaaggggagggcggcaaggtaaaacagggactctctgcgaccaagcagctgatggtggagaaaaattaccgcagcgccgcggaaatggttttgacggaatttcccggcgcgcaacgcaacaagcggggcgaatacaccaaggccctttcccgcatattgctagccgccgaactgacgactctgttcgagcggcaacaagaactggggaatcctcacgcgggaccggacctgcaaacgaaaatcctcggcaacggcgaccggaaaagcggtttgctgtggatgcaaaaaccgccgctgtctggtagtgccctgctgaagatgctcggaaagtgtacgttcgagcgggaagaataccgagcgcccaaagcgagtttcacggcggaacgccatgtctggctgacgaaactcaacaatctgcgcgtgctcgtcgacggggttacgcgccctctgagcgatccagaacgtcgactcgcattgtcccttccataccaacaagcaagcgatttcacctacaagcaactacgcgcggcactgtgcaagaacggcctgttgccggactcgttccaattttccggtcttgcctatccaaccggtgcgcaacagcccgatggaaaagcgaaaaatccggagaacgatcggctcgtcaaacttccggcatggcaagaattccggaaaacgctccgggacgcaggcctcgaaaccgaatgggaaagcatcgccggaatggcggcgggggggcaacccgacctgctcgatcaaatcgggtgggttctatccgtattcaaggacggcgacgaagtccttcgggaactacgcaagataccgctcccgggcggcgagaaaatggttcaggcgctgagcggagtcagcttcgacacgtttcacaatctgtcgctaaaggcgctgcgcaagatcgtgccacacatggaggctggccttcgatatgacgaggcatgcctggcagccggataccaccatagcgatctgcgtaaagacacggatgagcggagcctgtatttgccgccgttgtactccggtcgcacgacggacgggcgcatggtattccgagacgacatcgacgttccgcgaaaccccgtcgtgctacgcgccatcaatcaggcccgtacggtcgtgaattcggttgtacgccggtacggttctccttcctcgatgcatatcgagatggcgcgcgacctatcccgcccatgggatgagcgcaacaaggtaaagagggcgcaggaggaataccgagaccggaacgaaaaactcaaaatcgactttgccgccgaatatggaatcgagcccaaaagccgggagttcgaaaaattcctgctctacagagagcagggcggaaagtgcgcctactccttgaagccactcgaccttgatcgcgtgctgcgggacttaggctacgcggaggtcgatcatgccctgccctactcgcgcagcttcgacgacagcaagaacaacaaagtgctcgtgctggcggaagaaaaccgtaacaaaggaaaccggactccctatgaatatctcgacggtacaagcgaaagtccgcggtggcgggagttcaaagcatttgtcgaaaccaacaaggcgtaccgccttgcgaagcgcgcccggctcctgcggaaggatttctccgggaagggatccgaggaattccgggatcgcaacctcaacgacacccgctacatcagcaggtttttcaaaaattacgtggagcgctttctgaagctcgcggaggagagcgaggaacggacctgtgtggtgctgagcgggcaactgaccgcgttcctgcgcgcccgatggggtttggccaaggtgcgcggcgacagtgatcgtcaccatgccctggacgccgccgtcatcgccgcttgcagccggagcatggtcaagcggttatcggattatgcgcgacgacacgagttggaaaaagttcggactggcttcgttgatttcgaaaccggcgaaatcgtggacgcggggaaatatcggcaaatcgaacgggatttcccaagcccatggccttatttccgggacgaactcctcacgcggctgaacacggacgaccctgcggaactgcgcgaacgaatgcaaagcttgggaagctacccgccggaagcgctggagaccttgcggccgatgttcgtttcccgcgcgccgcaacggcgcaacggcggcgccgcgcacaaggacacgatctatcgccagacggagcgcttgaaaaaagttggaagcgtgacgcaaaaagtcccactcgccgcgctaaaccttcgcgacctcgagaatctagtcgacccccatcgcaacgaaaaactgtacgcagcaatccgcgcccgcctggaagcgcatggcgggaaaggcgaaaaggcattcccgcccaacaacccgttacggaaaccggaccgcgacggcaatcccaccgggccgattgttcgaacggtaaccctggtcatcgacaagatgtccggcattccggttcgcggtggggtcgccaagaacgacaccatgcttcgtgtcgatattttccgaagcaaaaaggacggaaaatttcatcttgttccgctgtatgtccatcatgcagttgccaagcaactaccgaccagggcggttatcgcttacaaggatgaaggcgagtggacgccaatcaacaatcacgacttcgattttttgtttgcgctatatccaaatgatctcgtcagaatcaccttgaaaaaggaaaggcacttcggatactacgcgggctgtaatcgcgctaccggcgccgtcagcatttgggcacatgaccgcaaccagagaattggaaaggatggctttatagatgggatcggcgtaaaaaccgcgctgtcagtcgagaaattccacgtcgatacgctggggaacgtgtacccagccccaccggaaacccgtcgtggtctggcgtagcgtcatgatctctcgccccgcaaagctgcggcgggagcattactcgcttgccatcgaacaggatgacactgccttcgtaccgttcgaggacatcgcggttatcgtcctaaaccatcgtgagatcacgatcacccatccggttctctccgcctgcgcggagtacggaatcggcctgtatgcgaccgggcagaaccatcaacccgcaggcgtattcctaccgtttctttcccactcgcgtaccacacgcatgatgcggcgccaactcgatgtggcacggccgacagcaaagcaagtctgggcgagcatcattcggcggaagatcgaaaatcaagcgtcttgcctagaattttgcggcagggatggagtcgaccgccttcaatcctacgcccgccgcgttcgctccggcgatccggaaaacctcgaggcgcaagcggcagcattttatttcgctcaattattcgggcaagatttccatcgggccaaggagtgctggaacaacgcggcgctcgattacgggtatgcggtcctgcgtggtgcgatcgcgcgggggttggtggcgcacggactccatccgacgatcggactcttccacgacagcgaacaaaactccttcaatctcgccgatgatctgatcgaaccgttccggccactggtcgatttgtacgtcatgaagaatcccgcatcgaccgaaggcgatttgatccccggagacaaacaagccctcgtggcgttgctcaacaccgatgtcggcatgccgcaaggcagaatgtccgttctctccgcgattgaatacgccgtggaaagtctcgtgcgcgtctatgagaaggatgcgaaagacctggacctgcccgccctgatcggcttgcagccgcatcgcctggagtattgagtgggaatcgagacgaggcgatacatgcgattgctcgtcttcttcgatctgccgatggtgaccaaggccgaaaagcgggcctatgtgcaattccgcaagtttctgctcaacgatggctacgacatgatccagtggtcggtatacggccggatcatcaatggcagggatgcggaaaccaagcacatgacgcgcctttccgacaatctgccgccggaggggtcgcggcgcgcgtcaaggtagttgtcgcctcggtcatacaacgtgaacctgtttatgaaccctgattccggcctgggcaacgatggagtcgcgctctgggttcagggcgacggccccggccggcgtccagtcgcgcgtgtggcgcgaccaacgtgccgggttgcggctgcgagcttgcaggtaaagatcgtgtctcgccgcgaggatctcgacgtcctgaccggcatgtcgctgcgccggggtgacgtaccgaatcccgctgtgccggtgttcgttgttgtaccagtgcacgaatcgcgccgcccactggcgtgcggcatcgaggtcctggaagccgccagtcgggaattccggtcggtactttgccgtgcggaacaaggactcgacgaatgcgttgtcgtcgctcacccgcgggcgcgagtacgagggcttgacgcccagccagtgcagcatcgccagcaccgtcgtggccttgagcgtggagccgttgtcgccgtgcaggaccggtcgttgctcgtttgcggcgatcccctcggccaaggccgcgcgctggaccaccttggcggcatgatcggcgtcgtcggtgtcgtgcacctcccaggcgatgatcttgcggctgtaaagatccatgatcaggtacaggtagaaccacatgccggccaccttcgcgggcaagtaggtcatgtcccagcaccatacctcgcgcggtgccgtggcgatgtgcgtgctcggcgcacggctcgcctgcggaggcttggatcgcccgcgatgggcgttctgcccttgcgcccgaagcagccggcagaaggtcgattcgctggcgaggtacgttccttcgtcggccagggccggcacgatccgcgctggcggcatgtcggcaaagcgcggttcgttggcggtcgccaggaccgcctcgcgttcctgtgcgctgagcgcatgcgccggttcggggcggactgcctgcgggcgccgatcacccgtttgcagcccgtcctggaccttccagcgttgcagggtgcgcaaatcgattccggcggtctcgcaggccagacgcagccgtgcgccggcgccgtgcgcctcttccacgtttcgggcaatcattcggcgatcttccagtccgatcattcgtcctcgcccttgtggaagatcgcctcgagtttttttgagagcaccagcaacgccgtcgtctccgccagcgccttgtccttgcgccggacttcccgttccaactccttgatccggcgccggtccgctcgcgtctgttgcggcgtcgcgcgcatatcctccggatcggccaacgcctgcgtggccgcctcccgccaggcggcaagttcctgcgggtacacgccgttttgccgacaccaggcgttacgcgacgcctcgtccagcgcggccgtcgtcagcaccgcctccagccgcgccgccgctgtccagacccgctcgcgagcgggtctggacagcgattcactgcgccaacgctccagcgtcccgacgctcacccgtgcctcctgcgcgagaacctcaattggtgtgttctccggcggcagcatccgcgccaccatcttgtccttgaatgcctgtccgtatttcgccacttctcgtcctcatagcgcccccggattccaaaaacctatccgggcgacaactattctgacgcaggggggtcggtacgttgcatgacggtcacggaaaaacaatacgccggcatgcgcctgctggtggggcttccgctttttcaggaaaaaacggtcccggccacccagatgcttctattttgaccaaaaaatccgagaccgaaacagcgccccggcaaggcggggcgctgttttcccgacagtcagattgtaggcttccggggtgagagagggagctacaacgcttccgggcggccaagttgaaatggggttgattgtaggcttccggggtgagagagggagctacaaccgatcacacagtcgtacttgacgccgacgagattgtaggcttccggggtgagagagggagctacaacgagacgagacggagagatgatacctgatgggattgtaggcttccggggtgagagagggagctacaacatgcgcaggtgtacggcaacgcgcgggtatgattgtaggcttccggggtgagagagggagctacaacctttttgaggcaacggtattcgcccgttttgattgtaggcttccggggtgagagagggagctacaaccgtggatcggcgcgaccgaaaaacgatccagattgtaggcttccggggtgagagagggagctacaacccagatcaagccatacatcacgatcaagccgattgtaggcttccggggtgagagagggagctacaacgcggcatttctgcaagtgtttcggctaacggattgtaggcttccggggtgagagagggagctacaactgcagggccgtcgtggtgggtatatggacagattgtaggcttccggggtgagagagggagctacaacgtctctccggttgcaattccgggagttccggattgtaggcttccggggtgagagagggagctacaaccagtctcctattggtccgccgagggtgattgattgtaggcttccggggtgagagagggagctacaacccttcgaatgcggcggtcagatatggcaaagattgtaggcttccggggtgagagagggagctacaacagtgctcgcagatcccgtacagtagccgcagattgtaggcttccggggtgagagagggagctacaacatccggtgtgctcacaaatgcgggatcctggattgtaggcttccggggtgagagagggagctacaaccttccacaagtgacccaagttcagcgagaggattgtaggcttccggggtgagagagggagctacgtaactgtccgggaatcgaccgcataggcaacggcggttgacgcgggcatcgttccgtctttttcgggagacggacggtggagtcggaatcggttgatcttgggtggacccgcaagcgtgcgcggcgcgatgaggaaacctggaatgggttgatcgcggagcagcgtgcgtctgggcagacggtatcggcgttttgcgcgcaacgcggcgtaccccgcagcagtttcggcaaatggcgcaagcgcctgggtgcggcgccgacgaaggggaatcgaaccccggcgggcaaggggttcttgccattacccatccgcgagagcgcaccgcaacctacggaatccgtatcggtcgagttgaacgtcggtgcgatgcggattcgcgtctcgggtgccgcagcgggcagaatcgtcgattcgatccttgcgcgcattgcgacgccggcatgattctgtcgcccgcggtacaagcgttcgtataccgcgacgtggtggatatgcgccgcggggtcgatggtcttctgcgcctggtgacggatgcgttttcgcactccgccttcagcggccatgtgttcgtctttatcggaagccgccgagacaaggtcaagatgctgtggtggcacagcaccggtttcgtgatgctctacaagcgcctggaacgggggcggtttccggcaccgcacatgctggcctcgcgtggtttgtcgatggctgaactcatggcgtttctcgagggaatcgacctctcgcgcgcaaagcgcatcgcacacgtgaacgcatcgcgcgtcgcgtagtttttctcgttgatcgcggttgcgctgtcaacgtggcgcggcatgcatccgttttggatgcatgcactcgatcgccgccctcgacatcgaatctcttcctcgtgatgtcgatgcgctgctcgaagtgatcgccgagcagcgcaaacagttctccgcagtgctcgagtcgctgtgcgcccagctcgcgaagatgaagcagatgaccttcgggtcgcgctcggagcgcttcgcaggccaggcgctgctcttcaccgaggatcttcccattcccccggcgccgccgaagctcccgacgacgacggttgccgcgcacgagcgcaagcgtcgcggacgtccagcgcttccggcacacctgccgcgggtccgcaaggaatatgacctcacggacgatcagaaggccggattcgaccggatcgtgctcatcggcgaagtcgtcagctccacgctcgacgtcattccgcagaaggtattcgtgatcgaccacgcgcgggcgaagtatcgctgcaccaaggacggaattacttcgatcgtcgtggccgatgcgcaaccttcgccgctgcccaagagcaacgccagcgccgggatgctcgcgcacgtactggtgtccaagtactgcgacggaattccgctcgcccgccaggagaagatcttcgcccggtacggagtcgatctggcgcgcacgacgctcgacgactggaccctggcaagcacggagaagctcgccgtcttgatgcccgcgttcaaggcgcacgttctgggcgcccccgggatgtttgccgacgacacgacactgaagctcgtcgaggagggtcgacgaagatcgcgcaccgcaaggctctgggtgtacgtcagcagcggtgcgagacaagatccccagggaaactggatcgcctaccccaaggcggcgtacttcgagttcaccgaaacccgggaggcgatccacccaacccggttcctgaaggggtaccgcggctttgtgcaagccgacgactacaacggttatcacccaacctttgccacggggttggcgaagcattgcctatgctgggcgcatgtgcgaaggcgctacttcgaggttgcgtcgcagccgggagcatcgcctctggccagcgaggccctgtcgttcatccgcggcatctatctcgtcgactccgagtacaaggacgccacgccagaccagcggcttgcggcaagaaagaagcacaccgttgcgctgctggagaagttctatgcgtggttgtgccaccaccagccgagcctgttgccgcgatctccccttggcaaagcgttcgcgtacacgctctcgaactgggcggcgctcatgcgcttcaccacggacggcaccgtttcgccggactccaacttggtcgagcgaacgattcgcccggtcgccgtaggcagaaaggcatggctcttcgcagcatccgagcgcggaggacacgccgcagcggttgccttcagcctcatcgaatcgtgcaaacttgcgggtgtggaaccctacgcataccttcgcgacgtgctgcagcgcatcgacggtcatcgcatcgaccgtctgcacgagttgctgcccttcaactggaagcccaccggtgactgcaaccccgtttgatcccgagctcgccacactcatcgccaacctgccgcaggcaaagacgctggacctctaccgaatcgaggtcgcgatccgcaaactgcgcagcgaacccaggcgcatcctcgatgtgcgcaagcacctgcatctcggaatgacggtgcaattcttcagcgactacgacgccacaacccataccggcaagatcgtcgcgctgcgcgaccgggatctgacgatcgacgacgcaaatcagaacacccgttggtctggcgtcccatacgccgcgatcgatctcggcgcgacggacaccgacacggtcgagatcatcgacgcggatgctcaacccaggccggcgcatcgtcgtcccgcacgagaagacttcaagatcggcgatgccgtcagcttcgtcggccgcgatcaccacacgcggttcggtcgcgtcgtgcgccggaaccagaaaaccgcatccctggaatgcgacgacggcctctggcgcgttgcctacgcgctcctccagcacgtcgtcgacctctgacccaatccccccgcgtcgtcaaggaacgccgattcccggacagttacggagctacaacgcgtttgcgcctgcaattgcgccgcctgcagattgtaggcttccggggtgagagagggagctacaacattcgggtctttgcgatgcccgtatcccctgattgtaggcttccggggtgagagagggagctacaacatcgatgcagcgggacgcgcccgccgcatcgaagttcttgcttcgcaagtctcgcagaaagacaaggggttgccgaaacaatctccacgcattgttgccttttttcgatcgcgcgcatggccgtgacgaacgagcgcgacctgaaaaaggaacgaagcatgggccgaaaattcaccgtgccccacggactgcaccgcacccacggcttcatctccgtccacttggtgttgtctcccgcgttaattcgcaatccgcgattctctggatgccggattgcgtccccggtgagcggtggactgcggtggttgagagcgggtcgctggcgggggtgaggggtttctgaagggtatttctcgagcggcggggggagcggggggcggcaggccccccgcttctcctgattgatgttgatcgctgtgccgcggttgccatttggcaacggacgttttggaccgtgacggcgatcggcggtaggcttgcgcgatcacatggaatggggtggcccggcggggtacacggccccgccgggccggtgctggtgctgcttcgattcgcgtcggggctgaccagcgaggagtacgttacccgacaggggtggcggcaggcaagtctcgagaggtgtccgctgcacccgaagggcggctgcggactgcaccgaaacggcacctatgcacgcgtcacccctgtcgggacacggatcgcccgctggtactgcccgcagggacactgcacgttcgccttgctgcccgattgcctggcggcgaggtttccgggcgcgctggccgacatcgagcgggtcgtggccgccgtcgagcgatccccaagccttgcgcaggccgcggcgctgctgcggcccgacgacatcagcctacccagcgcgctgcgctggctgaggcgacggctgcggccggcgcgcatggcattccaatgctggatcacgctgtggcccgagcggctgcggggctgtctgccgcgagtcgagccgttgcgggcgcatttggggtgcgcctgcgtgctggtgcacggccgcgcccttgccgccgagtacctgcacgagttgccccggttcgtcgggtttgcgccaccggctgctcgtgccggtggacgcaaacggctcgaccaacaacacatgggggctgatccgccggctcaggcgccgtagtgtcgcggctcccatcttgctcaaggagccgatccgatgtccgagcccgatcccggccgggccgtggcgctgtttcgctacggcctgatcgccgacctcatccaccgtccgcccgccatgccgggcctgtacgcgctgctcgcccgcaaggccgaacagtcctacgtcatcccgggaaccacgcgcacccgggtggcgaccgagaccttgcgcgactggttgcagtcgtaccggcgcggcggcttcgacgcgctggtgcccaagccgcgatccgaccgcggccaatcccgtgcgctgccccaggccgtggccgacgcgctgctcagcctcaaggacgagcagcccgggctgtcgatcccgctgctcatcgacaccctgcgcaagcaaggcgcgatcggacccgagcaggacgtgcccaggaccaccgtgcaccgcctgctcagccgtgccggcctgatgcacaagggcgccgagcaacccaccgaccaggatcgccggcgcttcgcatacgcgcagcccggtcagctgtggatgagcgacgtcatgcacggcccgacggtgagcgtcggcgcaagccgccgcaagacctacctgatcgcgttcatcgacgatgccacccgcgtcgtgccgtactgcgccttcgccctgtcggagaacacggccgcgttcctgcccgtgttcaagcaggccctgatgcgccgctcgatcccccagcgcctgttcgtcgataacggcgccaactaccgctcgcagcacctcgcgctcgtctgcgccaagctgggcgttgcgctgatccacgcccgcccttaccagcctgcgggcaagggcaagcaggaacgctggttccgtaccgtacgctcccaactgctctcgcgcctcagcgccgaggacaccgccagtctcgatgcgctcaaccgccgtctgtgggcctgggtcgagggcgagtatcaccgcaccccgcaccgcggactcgatggacagactccgctcgagcgctgggcccagtgcgccgagcacctgcgcgcacccgacccgcgcctcgatctcgatgacctgttcctcttcgaggccaagcggcgcgtgcaccgcgatcgcacggtcagcctcaacggcaccgtcttcgaggtcgatgcctcgctcgtcaacgagaccgtcaccctgcgcttcgacccggccgcccccgccggccgcggcatcgaggtctggcacaacagcgtcttcatccaccgcgccaagccggtcgatgcctacgccaactgcttcgtgcgccgcaatcggccttcccgcactctggaggcccaggcccagcccggatcgcagcccacccccggcctggcgctgcgcaggctgctgaccgataaacccgatgaggagtcgcgctgatgtatctggcccacttcggcttcacccactatcccttcgagcgcgcgctcgcccccgacgagctcttcggcgccgtggcgctgcgcgaggcccaggcacggctgcagcacctcgtcgagctgcgcggcatcggcctgatcaccggcgaagtcggcagcggcaagaccaccgcctgccggcacctcgcctcggccctgcacccagggctctatcgcctgttctacgtcacgctctcgaccggcaacgtgctcgacatgtacaagtcgatcgcctggcagctcggcctgcccatcgagcgcaaccgtgcctgcgcctaccgcgcgatccaggccgaggtcctgcgcatgacctccgaagcgc

SEQ ID NO: 2873 - DNA, 23351 bp, synthetic construct
  misc_feature 1..23351: note = Synthetic
  source 1..23351: mol_type = other DNA
ccctgggcgcaggcggctccaccaagatggtggacgcaaagcggaaccgcatcgagcgcgtgttccaccccaaattcccgctggagtatatccagcggccggaaaagctgacggagaatttagaggcgttccgccgcttccatcaggagatggcgcggtgagataaggaggcaccatgacccaccggcggcaaaacttcatgggcggcgcggccattctggccggggctgtggcggtgacaaagctgctgggtgccctgtacaagatcccgctggggaacctgctggaccgggagggcatggcgcatttctacgccgcgtacaacatttacagtctgctgctggtgctgtctacagcgggactgccggtggccctgagccgcatggtgtcccgtgccgccgcccagcggcgctatggcgccgtgcgccgctgcctgcacctgggcctggccctgctggcggcgccggggctggcgggccccgcccccgcctgttcagcggcgagcgcagcgccgtgcgccggcaagccgtcgcccatgccttgcgcggcctgattcatctgttggaaggccagagcgcttatgcctgaattgcgcctgaattcgcgccgctgccggatcactccggcagcggcgcgaacagcgcggcaagatcgtcgttgccgaatttgacgtcgacggagcggtcttccgagaggatgccagccgccagttcggccttgcgttcctgcaaggcgagaatcttttcctcgatgctgccggaaacgatcagcttgtagacgaacaccggcttttcctgaccgagccgatgcgcgcggtcggtggcctgattttccaccgccggattccaccacggatcgtagtgaatcaccgtgtccgccgccgtcaggttgaggccgacgccgccggctttcaggctgatgaggaaaatcggcacctcgccatcctgaaaacggcggatcggcgtttcccggtccacggtgtcgcccgccagacggctgtagagcagcccccgcttttccagttcgctttcgatcagggccagcatgctggtgaattgcgagaacacgaggatacgccgcccttcttctaccagttcgggcagcatttccatcagcaggtcgagcttggcccgctctttcaccttgcgcgcggcaaggctcttgaccaagcgtggatcgcagcagacctggcgcagcttgagcagcgcatcgagaatcacgatctggctgcgggcgaaaccgcgctgggcgatttcgtcgcgcaccttggcatccatcgcgacgcgcaccgtttcgtacagatcgcgctgagcgccttccagttcgacgctgcgcacgatgaccgtcttgggcggcagttcgcgggcgacgtcctccttcttgcggcgcaggatgaaggggcggatgcgccgggcgagcaggctgcggcggtcgctgtcgccgtgtttttcgatcggcgtgcgccagtgccgggtgaattgcttgctggccccgagaaagcccggcagcaggaaatcgaactggctccacaactcgcccagatggttttccagcggcgtcccggtcaggcacaggcgatgccgcgcgctgatctggcgcaccgccccggcgctgcggctggcgacgttcttcaccgtctgcgcctcgtcgaggatgagcaggtggtattcgtgctgcaccagcgcatcgacgtcgcgccagagcagcggataggtggtgagcaccacgtcgtgctcgccgatttcgccgaatcgttccttgcgctgcggcccgtgcagggacagcacgcgcagatccggcgcaaagcgctccgcctcgcgcttccagttgaagatgagcgaagtcggcaagacgatcagcgccgggcggtccagccgcccgctttccttttccagcagcaggtgggccagcgtctgcgccgtcttgcccaggcccatgtcgtcggccaggataccggacaggttctgctcgcgcaggaactgcaaccaggccagaccttccttctgataggcgcgcagttccagccgcaggccgcgcggcggctcgatgtcgccgatgccctgcgccgcctgtagccgttccgccagggccagcacgtcctgctgcccgcggaaggcccaacggctggtgtcggtgagttcggagaggcgcggcgcgtcgaagcgcgacaggcgcagggtgtcgccgccggaaaaaccgtcgaacaggtcgatcagggtcgccgccagcggcttgatccggccggccggcactttcagttgctgcccctgcggcgtcagcagaatgaccggctcgtcatcgggaatgccgctcaggtcgatgctgtccagccagcgcgcgtcgcgccggaacagggccgccaggagcggtgccagcgccagacgctgcccttcgacgacgacgcccatgtcgagatcgaaccagccgtcgccggtttcggtgagttcggcgtcccaaccctcgatttccatgacgtggtggcggaaatcctcgggaaattcgacgtgccagcccgccgcctgcagatgcttcatgccgtcctgcatgaagcgcggccaggcggcttcgccggccagcccgaaaatcccctgcggcggcgcaccaaaggtgttcaggacatacggcggcacggccatgaaaccgctctcctgcaaggcttgcaaggcgtgcgcttcctcctgcgggcggcgcgccagcgccacggtttcgccttccggcagggtgacgaagctgctcctgtcgcccggcgcgacgtcgacctcgccatagcggaaataaacctcggcgtaatcgaaggcattgccaccgtaactgtgcggataatcccgccaggcgcggttgcccagggtacgcagcgtatccagacgcaggcagggttgcaggggcaggtcgatccggcgcaggcggtcgctggccttttccaccggcaggggcatgctcggcgcgagttcggaaagcgcctcggcgaccagcgcggcctccttctcggagagcggcggcaggtcgaacaggcgcttgagcagcgcgggttccgcttccacgtgcagcggccccatctcgccctcggccacatcgacgtaccagggcggatcggtgggcaacacctgatcgcagggcggatcggaacgcaggtgcggccgctggaagccctgcccgtcgaccatccagccgaaattcgccgcccgctcggggccggcgcgcagcgggatttccagatcgtgctcggtgtacagacgccccgtcgccagcaggcggccgaggatttccgtcggctgcctgtcgcccaggccataggcccggatgccgctgccctgatggcgcgcgttccacaagtggcgcaggatgggcaggtcttcctcccgcacgaactgcggcgcgttgagcagcgcccgctcgatgctccaccattcctccgccttgtcgggccgcttgcctttcaacagggtgatgccgaaatggccgccgtcggccgaccagtgcagcacgtagaacaggccggagcgcacgctcggggcgcgcgccttcttcttggcgacggcgaccgaggcgcggcgcaagtcttccacccaggacagcacgctgttgctcaggcgcacctccggattgcgctcggcaatggcgcgcagcaaggtggcggcgacgtgcttgcagtcgcgccccaccgggcaggaacaggtgttgggcaggccggcctgttcctcgaaatcaacgaaaacgatgctggtctgatacggctgccgggccgaaccgggcacctgcgcgtcgatgcgctcatcgccgacctcgagctgttgcaccagatcgacgtagggccgcgcttttttgacggtatccgcgccgagccagtcgatgacgtcctcttcctgatattcgttcagcaattctgcggcagcagccatgagcgggaaaaaagcagctagagatcagaaatagggatggacgagcgcgccggcgatcacggccagcaggagcgcgatggcggccagccagcggttctgcacggcttgcgagcgcgccagcgcggccagttcgggctggaggtcggcggtcgacggccggctcaactgctgatgcacgaggcgcggcagttgcggcagggtgcgcgccagattgggcgcttcgaggcgcaggttgcgccagatgccgcgccagccgatctgctcgctcatccagcgttcgagaaacggcttagcggtctgccacagatccagatcgggatcgagctgccgccccaggccttcgatgttgagcagggttttttgcagcatcaccagctgcggctggatttccacgttgaagcggcgcgaagtctggaacaggcgcagcaacaccttgccgaaggaaatgtccttgagcggccggtcgaaaatcggctcgcagacggcgcggatggccgcctcgaactcatcgacccgcgtttccttgggcgcccagccggattcgatgtgcgcttccgccacccgcttgtaatcgcggcggaagaaggccaggaaattctgcgccagatagttcttgtcgctgtcggtgagcgtgccgacgatgccaaaatcgagcgcgatgtagcgaccatcggccgccacgaaaatattgcccggatgcatgtcggcatggaaaaacccgtcgcggaaaacctgggtgaagaagatttccacgccggccgcggagagcttcttcaaatccacccccgccgcccgcaggcgctcggtctgcgagatgggaatgccgtgcatgcgctccatcaccatcaccgtggaagtgcagaaatcccaatacacctcgggtacgacgagcaggggcgaggccgtgaaattgcgccgcagttgcgaggcattggccgcttcgcgcatgagatcgagttcgtcgcgcagatatttggcgaattccgccaccacctcgcgcgggcgcaggcgcttgccgtcggcccacagcttttccagcagcagcgcgccgttgtccatcagggcgagatcgtgctcgatcaccgcgcgcatgttgggacgcagaatcttgaccgccacctcgtgtccgccgtcctccgggcgcagccgcgcgaaatgcacctgcgcgatggaagccgacgccaccggctgcgggtcgaactcggcgaaaacctcgtgcgccgggcggccgtaggctttttcgatttccgccagcgccagctcggaagcgaagggcggcacgcgatcctgcagcttggcgagttcgtcggcgatgtccgctggcatcaggtcgcggcgggtggacagaacctggccgaacttcacgaaaatcggccccagggtttccagcgcctgccgcaggcgctcggcgcgcggggcgcgcagacgacgccagaattgcagggcgttggccagccgcatcaggcggccggtcggctcatgttccagcaccatctgatccagcccgaaacggctggcgacggtggcaatcttgagcaagcgaaaaaggcgcatcgcaaaaacccgtggcggggaaaaagggccacccaaggaaggtcgccgggggccgcagaaaaacggggatgctagcacgcggcggcagatgctgtccccgctttgcttaccattgctcacatctctggcggataggggcagcgtataatgccgcctttgttatttttcccacgccaaaccatggcccacgacgtcaagaacgagctgctcgccctgctcacccaggcacgcgacagcgttgcccccgccgccgcttcgaccccgattcagatcgaacgcccgcgcgacccctcgcacggcgatttcgccaccaatctggcgatgctgctggccaaggcgctgaagaaaaacccgcgcgaaatcgcccagcaactgctggccgaactgcctgtatctccccgcatcgccggcgcggaaatcgccggggccggcttcatcaacttccgcctcgccgctggcgccaagaccggcgtggtgcgtaccgtcctcaaccagggcaacgattttggccgctcgaaccagggcggcgcgcagaagatccaagtcgaattcgtttccgccaacccgaccggccccctgcacgtcggccacggtcgcggcgcggcttacggcgcttcgctgtccagcctgctcgcctttgccggctgggacgtgacgcgcgagtactacgtcaacgatgccgggcggcagatggacattctcggcctctccacctggctgcgctatctcgacctgctgggcgagagcgtccccttcccgcccaacggctaccagggcgattacgtgcggcgcatggccgagcagctccggcacgcgcacgacaacaaataccggcgcagcgccgccgacgtcctgcgcggcacgccgggcctgcccgccgccgagcgggcggacgacgaagccaaggcgcagcgcgaagcgcatctcgacgccctgatcgcgcgcgccaaggcgctgctcggcgaggactggcactacgtccatcggcacgcgctcaacgaacagctggaagactgccgcagcgatttgcaggatttcggcgtcgaattcgaagtctggttctcggaaaaagcgctttacgacaccgggctggtggcgcgttgcgtcgatcttctggaagcaaagggccacatttacctgcaaaacggcgccaaatggttccgttccaccgctttcggcgacgaaaaggatcgcgtcgtgcagcgcgaaaacgggctgtacacctatttcgcttccgacattgcctatcacctgaacaaattcgagcgcggtttcgacaagatcatcaacgtctggggggccgaccaccacggctacatcccgcgcgtcgccggcgcggtcaaggcgctcgacctgcccgccgacaggctgcacgtggcgctggtgcaattcgcggtgctctatcgcaacggccagaaagcctcgatgtccacccgctcgggcgaattcgtcaccctgcgcgaactgcgcgaggaagtgggcaacgacgcctgccgcttcttctacgccctgcgcaaatcggatcagcacctggatttcgacctcgatctggcgaaaagccagagcaacgaaaacccggtgtattacatccagtacgcccacgcccgcatctgctcggtgctgaaacagtggccgggcacgccggacgagttgctcgaagccgatttcgcacgcctcgacagcccgcgcgagcagtcgctcgccaatctgctcggtcagtttccggaagtgatcgaaaccgccgcgcgcgacctcgcgccgcactcggtcgccttctatctcaaggatctggccggggaattccacgcctggtacaacgccgagcgcatgctggtcgacgatgccgccctgtgtcaggcgcgcgtcgcgctggccgcggcgatccggcaggtgattcgcaacggcctgtccatcctgggcgtgtcctgcccggaaagcatgtaaaggaaacccatgagccgcgacatgaaaccgcgcaaatcatcgccgcagaaaaaatccgccggcggcacgctgatcggcatgttcatcggtctggtgctcggcgtgtgcatcgccgccggggtcgtctggtacatcaacaaggccccgctgcccttcaatcagaacgtgcagaacagcgaaacccgcgccgccgcggtgccggctgccggccaggaacccaaggcgctgcccggcaaaccgggcgatccggccccggaaaagcgcttccagttctacgacatcctgcccggcaaggccgacgccgtgccggacaaacccggcaccccggccatggccgaaaaaccggaaagcaagccggatgcgaaagaaggcaaggaaagccgctcgccgctctttttgcaggcaggttccttcagtaccgctcaggatgccgacaaccagaaggtcaaactcgccttcatgggcatcgaatccaacgtgcagcaggtcatgatcgaagaccgcacttggtatcgcgtgcgcatcggcccctatttccagctcgaagaattgaacaaaaccagggccaacctggccaaatccggcattgaagcccagttgtcgaaataacccacgtaggagttttgtatgaagcattcgccgctcgatcgccgccatttccttgccgccaccctggccctcggtgccagcagcctggcccgccccctgtgggcgcaaactgccggccaggaattcacgctgctcaatcccgcacagcccaccgaagatgccggcaagatcgaagtgctggaattcttcagctacggctgcccgcattgtgccgacttcaaccccctgctcagcctgtgggcggaaaaactaccggccgacgtggtgctgaaaaaggtaccggtcagctttggccgcgctgcctggggcaatgccgccaaactcttttacgcactgcagacgaccggcgatttgaagcgcctggaagacaaggtgttcaaggccattcaccaggaacgcaccaacctgttcgaggaaaagaacatcaaggcctggatcgccgcgcaaggcgtggatgcagccaaattctccgacgctttttcttccttcggcgtgcagagcaaggtgcgccggggcgaccagctcgcccatgcctacaagatcgaaggcgtaccagcccttgccgtcaatggcaaatacctggttgccagcctgcaattcgagcagcagctggcggtggccgacaaattgatcgcccaggaacggcgcggcaaaggcagcaagtaagccagcccgcactcgccagcgcaccccgcgcccgacatgccgcacaggatcttcatcaccggcgcttcgtccggcatcggcgaagcgctggcggttttctacgctgcacagggggcggttctgggcctgtccggccgccgccggaccgccctggaagcgctgaacgaacgtctgggcgggcagcacgcctgctatccgctcgatgtcaccgacgcggacgccttacaagcggcagccgatgatttcatcgcccgcttcggcaccccggacatcgtcattgccagcgccggcgtttccgtcggcaccctgagcgaatacccggaagatttgcccgcctttcgccgagtgatggacaccaacgtatatggcatggcggccacttttgccgccttcattcccgccatgcgccaagccagcggcccgcaccgcctgtgcggcatggcctcggtcgccggcatccgcggcctgcccggcgcagaagcctattccgcctcgaaagccgccgccatcgcctacctggaaagcctgcgcctggaattgaagccctacggcatcgccgtcgtcaccatcgcccctggctacatcgccacgccgatgaccgccgtcaatccctaccgcatgccctttctcctgcccgccgacgaagccgcccggcgcttcgcccgcgccatcgagctcggcgccggctaccgggtaattccatggcccatggccatcgttgccaaatgcctgcgactcctgcccaacgccctctacgatctgctctttacgcgcgccccacgcaaaccgcgccagccgccaaacggctgacgcgatttccggttcccggcggagcctggattcagtgctgcacagccgcagcccgccaagcatcggcagtcgccgactcaaccccgctcaactcggcaaagcacccttccaacgggcatcggcggttcttcgggcaggcatgttcgcgggcgcactcgcgctgcgtcgaatcggtcaacaccatggcgcgggcggcttcacaacgagcgatgggagcgtcaaagatggacatggctatctccttgtgaagtgaagggtcaatttgactatagctgaaccgggggatttgtccattcttggcagctttcttgccaccccaacaatttcagctactggataaaacgtgccactttcagaatgaggatcgcgtttgatgaccaaaatggaaagacccggcaggtttccctgccgggccggattcggtcgtccccgaagggacaccttattgtagcaacggctctcaccccggaaagctacatggcgttattctacgcactttaaatcgaccaaggcaaatcatgggcgccacatacaccatcggtctggacatcggcatcgcatcggtcggctggtgcgttcttggcgagacacacatcatcgatctgggcgtacgagccttcgacaaagccgaaacggccaaggagggtgaatcgctgaaccttgcgcggcgcaacgcacgactgatgcgccgccgcctattccggcgagcctggcggttgaaaaagctggcccgtctcctgaaaagtgaaggtctgatcgctgacaccaagacattccagcctgagcacgctttcacccgcccgctctggcaattgcgcgtcggtggactcgaccgccgcctgaacgacgaagaatgggcgcgcgtcatctaccatctctgcaaacatcggggcttccactggatcagccgcgccgaagccaaacaagccgaaggcgacagcaagagcgaaggcggcaaggtcaaacagggactggccggcaccgccagactaatggcagaaaaaggctatcgcagtgcggccgaaatggtattgggcgaattcccggatgcgcaacgcaacaaacagggcgaatacacaaaagccctggcacgagaactacttgccaaggaactggccctgctctttgcccggcaacgtgaattcggaaatccgcatgcatcaagtgcgctggaaaccgccatcctcggcaacggcgacaaaaagagcggattgttctggcagcagaagcccgccctggccggtgccgacctgctcaagatgctcggcacctgtaccttcgaaaaaggcgaacaccgcgcgcccaaagccagcttcactgccgaacaccacgtctggctgacgcgcctgaacaacctgcgcatcgtcaccgatggcgttacccgccaactgaccgaacaggaacgcctgcgctgcctgcccttgccttaccaacaagccggcgacctgacctacaagcaactcggtacggtgctgaccaaagccgggctgctggaagctggcagtttcaaattcaccggcctcgcctaccctactgaggcgcaaaaggccgaaggcaaggccaaagacccggaatcggccacgctgatcaaaatcccgacctggcaggaattgcgccaaacattcaccaaagccgacctcgacgacgagtggaaaaagctctcggtcgatgcgctctgcggtcaaccggaaatcctcgaccaaattgcctgggtgctcagtgtctacaaggacgacgacgaagtccgcgccgaactcgccaagctgccgctccccaaccgcgacgcgctcatcgaggccctgctcaacatccgcttcgacaaattccactccctgtcgctgaaagccctgcgcgccatcgtcccgcatatggaaaaagggctgcgctacgacgaggcctgcgttgaggccggctatcatcacagccagttgcacaaggtcggcgaaggcgaacacaaatatctgccgccgctctacgccgggcgcgacaaggacggccggctgcgcttcgccgaagataccgacatcccgcgcaatcctgtcgtcctgcgttcactgaatcaggcgcgcaaggtggtcaatgccatcatccgccgctacgactcgccggctgcggtgcacatcgaaatggcccgcgatctctcgcgccctttcgacgagcgcaacaagatcaagaaggaccaagacgaataccaggcccggaatcagcgtgacagggaacaattcatcgaattgttcggccatccgcccaaaggcccggaatttgaaaaatggcgcctgtaccgggaacagaacgggcaatgcgcttattcgcagaagccgctggcgccgtcaggcaacgttgccgaaattttcctcgaaggctccaccgaaatcgaccatgccctgccctactcgcgcagtttcgacgacagcaagaacaacaaggtgctggtcctgacccgagaaaaccgcgacaaggctaaccgcacaccctacgaatacctgggtggcgccgagaacagcgaacgctggcagcgctatgtcgccttcgtcgaagcaaacaaggcatatcggctggccaaacgcacccgcctgctgcgcaaggatttcggcaccaaggaagccgaagaattccgccaacgtaacctgaacgacacccgctacatctgccgctttttcaagaactacgtcgagcagcacctgaaactggcggaaggcagtgaggtgaaacgctgcgtcgtcgtcagcggtcaactgaccaacttcctgcgcgcccgctgggggctgctcaaggtccgttccgacagcgaccgccaccatgcgctcgatgcggcggttgtcgcggcctgcagtcacagcatggtgcagcgcctctccaattactcgcgcacccgcgaactggaacaggtccgggacggcttcgtcgatatcgaaacaggcgaaatcgtcaatctggccatgcaccagcaactgcgcaaacatttccccgacccgtggccctacttccggcacgaactcgaagcccgcctgaagatcgattcgccggaactgctgcgcgaagaaatgtcgcgcctgggaagctacaacgaggaagaactcgcggccctcaaacccttgttcgtctcccgcgcaccgcaacgccgcaacggtggtgctgcgcacaaggacaccatctacggccagccggagaaaatgaaaagaacaggcggagtcactcaaaaaatccctctctccagcctaacactgagagaccttgattcgctcgccgatccccaccggaacgtaaaactgtacgaagctatcgccaaacgacttgaagcccatgggggcaagggcgacaaggcttttccaccatccaagccgttacgaaagccggacaaggaaggtaacgagaccggccccgtcgttcgcaccgtcaccaaggtcatcgacaagctgtccggcatccccatacgcggcggcatcgccaagaacgacaccatgctgcgggtggatgtcttcaccaaggccggcaaatttcatctggtaccggtttatgtgcatcaccgggtgacggggctgccgaatcgggcgattgtggctttcaaggacgaagaggactggacgctggttgatgaaagtttcgaattcctgttttcgttacacccaaacgatcttgttcgaatccaccagaaagggaagcaaccaatactcggatactacgccagttgccatcgaggcacgggcaacctgaatgtctggacccacgaccgtaacactgttgttgggaaagatggaatgctggagggaatcggcgtaaaaacggccctcaccctagaaaaactccacgtcgacaccctcggcaacatctaccccgccccgccggagaaacgtcgtgggctggcgtagtgtgatgatctcccggccggccaagctgcgccgggaacatttctccctggccattgagcaggaacagactgccttcgtccccttcgaagacatcgccatcatcgtcctcaaccaccgcgaaatccagctcacacatcctgtcctctcggcctgcgccgactacggcatcggcctctacgccaccggcgacaaccaccagcccaatggcgtcttcttgccgtttctcacccattcccgcaccacgcgcctgatgcgcaaacagatggacattccccgccccctcgccaagcaggcttgggccagcatcgtccgacgcaagatcgaaaaccaagcggccgtgctgcgtttttgcgcgaagaatggcttcgatcgcatggattcctacgctcggcgcgtgcgttcgggtgataccgaaaacctcgaaggtcaggccgctgccttctacttcacacaacttttcggccaaggcttttatcgcgccgaagagcgttgggtcaatgctgcacttgattacggctatgccgtactacgtggcgccatcgcccgaggactggtcgcccacggcatgcatccgcccatcgctctcttccacgccagcgaacagaacgccttcaatctggccgacgacctgatcgaacccttccgccctctggtcgacctgcacgtcgccaaaaacccagctttcaccgaaggcgatctcagcccgcaggacaaggcagaactggttgccttgctcaacgtcgatgtcagtatgccgcaaggcaagatgtccgcgctatccgccatcgaatatgcggtcgagagccttgcccggctattcgagcaaggcaacagcgagcttgagcttcccggcctgatcggcttgcaggcccatcggctggaatgctgaggcatgggactggagacacgacgcttcatgcgactcatcgtcttcttcgatctgcccatggtcaccaagaccgaaaaacgcgcctacgtccagtttcgccgcttcctgctcaatgacggctacgacatgatccagtggtccgtctatgcccgcttgctaaacggcaacgatgaccacgaaaaacaccttaaacgcctgatcgacagcctcccgcccgccggttccattcgctgcatgacagtcacggaaaagcagttcgccggcattcgcctgctggtcggcatgccgctttttcaggaaaaaaaggttccagcgagccagatgttgttgttttgatcccggatttgcacaaaaaaatttcccgcccagctaagccgggcgggaaatttggtttcgtcgattgtagctttccggggtgagagagggagctacaacgcatggttattctccgattagctgagattaattgtagctttccggggtgagagagggagctacaactcgggggcggtcgtgaatcgccagaaccggattgtagctttccggggtgagagagggagctacaactccgcaaccggtcgtacgataacttcacttattgtagctttccggggtgagagagggagctacaacccgaactgatgcgcgacccggacatcgcgcattgtagctttccggggtgagagagggagctacaactgtgccagtgtggcgtgctgtcgtggtgcgattgtagctttccggggtgagagagggagctacaaccacttgtaggacgtgactttgcgcggctggattgtagctttccggggtgagagagggagctacaacaacggccgcagaatctcggcttcatagttgattgtagctttccggggtgagagagggagctacaacatgttgacgatgctttcgccgcccgccacgattgtagctttccggggtgagagagggagctacaaccggaactggagcgtaatggcgtgaagatggattgtagctttccggggtgagagagggagctacaacagcgtgcatagggtcatgggaacggccagcattgtagctttccggggtgagagagggagctacaacgcggaaggcgcaagaagcaccttcctgcctattgtagctttccggggtgagagagggagctacaacctacgagatcacgcggtatcatttgctggagattgtagctttccggggtgagagagggagctacaacccgagactgcactgatggtttttctgggggattgtagctttccggggtgagagagggagctacaacgagcagcgcagcctccttttcatgaaccagattgtagctttccggggtgagagagggagctacaacgagatggcgtaactttgggagcgccgcactattgtagctttccggggtgagagagggagctacaacacgctgctcaagcatactgtgccatcaataattgtagctttccggggtgagagagggagctacaactttttccccccgggggccgcctacagacacattgtagctttccggggtgagagagggagctacaacccgtcgcagcgtaatggaaattctcagtgaattgtagctttccggggtgagagagggagctacaacgatttcgccgtagtttgcggattcatcgcgattgtagctttccggggtgagagagggagctacaacctcaagaatcatcttcgggtggagtggattattgtagctttccggggtgagagagggagctacaacctgctgctctcgatacgcttcaggaattggattgtagctttccggggtgagagagggagctacaacctaaaattctgcgcatagatgagagcgtcgattgtagctttccggggtgagagagggagctacaacctggcaatgacgatagtttcagatgaaaggattgtagctttccggggtgagagagggagctacaacactggctgaacacatccttgaagtcaaaacattgtagctttccggggtgagagagggagctacaaccgagtgctcgacccttgttgcggcagccgcattgtagctttccggggtgagagccttgcttttagcacagcatcaaagttgcacagcgcagacagcaaaaacccaccgcgtagggtgggtttttgcttgaacttctggtgggtcggccgagattcgaactcgggaccaacggattaaaagtccgctgctctaccgactgagctaccgacccacgcgttgaagggcgcgattatagagaagacggaccgcgccggtcaagaatcgcgcgcggccggcagaggttgggccaaattccgattcaggccgcccagggcagatcgccgaaagcctgacggtagcgctcgtcgatttcgcggcgagtaggctggtggttctgaccgccgcggcaggcgatcttgatcgcccccatcacggcggcaagacgcccggtgacgggccagtcgtagccgtgggcgatgccgtacagcaggccggcgcggtaggcgtcgccgcagccggtggggtcgacgatggcctcggccggcgcgcagggaatgtcgatgaccttgccgtccacgtaaatctgcgaacctgcgccgccgttggtcacgatcagggctttgacgcgggtggccagttgctcgatgctgcaaccggtgcggtcgcaagccaagtgggcttcgtagctgttgaagcaggcgtagtcggccagatcgaggaaaccgatgagatcggtgccgtcgaacatgggcaggccctggcccggatcgaagatgaagggaatgccggcggcggcgaaatcccgagcgtgctggaacatgccgtcacggccatcgggcgcgacgatccccagttgcgcgtcggcatcagtcaccttgttcagatgcgaatgactcatcgcgccgggatggaaggcggtgatctggttgtcgtccagatcggtggtgatgaagcactgcgcagtgaagctgccctccactttccgcacgtgggtgcgcggcaggcgcagggcgtccaggcgttccagatagggcgcgcagtcgtcgccgacggttgccatgatgagcggatcgccgcccagcagtttcaggttgtaggcgatgttgccggcgcaaccgccgtactcgcggcgcatttccggcactaggaaggagacgttgagcaggtgaatctgctcgggcaggatatggttgcggaaacgatccggaaaaaccatgatattgtcgtaggccagcgagccgcaaatgagtgttttcatgatggtgggtagaaaagataaagacgataaccggccgcaccgatgtcgcgcgcttcgatccacaaccgcacgccgacatcgctacccgccgcgaatgccggcggatgctgcgtccccagataatcaacaacggaaatcatgcgccgggccaccgtgcggtcattgacgtcggtcagcgtcagggcgagctgcggccaggcctggtcgtagctcgcccgattcttcagggtgctgttgagcacgaacagctcgcgtaccggatcggcctgcagatcggaggcttcgatggaaatcaggctggcctcgcgcggcagcggcacgtcgacccccagcatccgataaagcgggaccagtgccggcaggcgcaggctgagcgaggtgcggtagtggtaagccaactgtcccaacaagacgaacgacagcaaaaaggcgagcaacagatacggccagagcgggcgttgcgcgggctcgtcgaaatcgtccaggccaccgctcgaaacgggggcagccgaccagcggctgtagcccgggctgtcgccgacttcccgcgctgcgaccagacctgcggcgcgagcggcttccagggtctgctccagggtttccggctcctgatcggaaatggttgccggtgcttgcgggggcaacggggctacgacaagtgtttctgccgcatccgctgatacggccactggcacctcctgtgccgatgcctgttccggtgtctgtcgtactggcaggaacgcccctgtttctggcgacggctctggcgtgcgctccgaggcgagcggcgctaccgtttccaacacatcctgctcaggtgtttcaagcgcgggttgcgcgggcgcagcaacaggcgccgatgcgggtgggcgcgctggctcggatttccctgcgctcgtggagttgggcggcggtttgggagatttgggcggctccgacatgggggcgatcgaaggcatgggcatgatggtgggcggattgtcctgcccacccgcgcccaccagcagctggtcgaacgcattgaacacggtacggcactggccgcagcgcaccttcccggctttcaggcgcaactgctcggaggtgacacggaacaccgtgccacacgccgggcagcggctgcgcatcagatttttcggccgctcagacatacccagtcctcacacacatcggccaccgccagactgatccacggcgcatacacggcaatgatttcctcggcctgctcacgcaggatgccggaaagcgcgagctgccccccggcaggacgcaccagcgcacaaatggccggtgccagcacgcgcaagggattggacagtatattggcgacaacgatgtcgaacgtgccgccaattgccggcgaactctccgcaaattcggcgatcaccgcattacgctgcgcgttggcgcgggccgcctccaccgcctgcgggtcgatatccaggccgcacaccttgccggcacccagcctggccgccgcaatcgccagaatgccggaaccgcagccgtagtcgaacacgctgcacgccggcgtcaccgttttctccagccactccagacaaagccgggtcgtcgggtgggagcccgtgccaaaagccatgccagggtccagcaccagattgatcgccgccgggtccgggctttcgtgccaggacggcacgatccacagccggtttgaaatccggatggggtcgaactgcgcctgggtcatctgcacccagttctgctctgccacgatgtcgactgaaaactcgctgaccggcggtaaacccagttgctcacacgcggcccgcaaaagcggttcgactgccgtatccgcctcgcacaaggccagcacgcgggagcgctgccagcccggcgtggtcggtgtgcccggctcgccgaactgcggttgctcgtcgggcgtgccggcatcggcgtcctcgatgctggcggacaacgctcccagttcgatcagcgcgtcgcacaaaggctcggcgctggctgcatcggtcaggaaactgacgttttgccagcccatgtcagcgcttgacctcgtccttctgggcgagtttgtgttcgagataatgaatcgccgtgccgccttcgttgaagcgcgcgtcgaacatcaattcctgatgcagcgcgatattggtcttgatgccctggatgctcatttccgacagggcgatgcgcatgcggcggatcgcctgatcgcgggtatcgccataggcaatgatcttggccaccatcgaatcgtagtgcgaaggcacgcgatagccctggtagatgtgcgaatcgacccggatgccggggccgcccggcgggtggtaaaactcgatcgtgccgggagatggcacgaacgtgaagggatcttcggcgttaatgcggcattcgatggcatggcccttgagcgcgacgtcacgctgacggaaaggcagtttctcgccagcagcgatgcgaatctgctcctgcacgatgtcgataccggtaatcatctcggtcaccggatgctcgacctgcacccgcgtattcatttcaatgaaataaaactcgccgttttcgtagagaaattcaaacgtacccgccccgcgatagccgatcttgcggcaggcttcggcgcaacgctcgccgatgcgcgcaatcaggcgcggcgcgatgtgcggcgcgggcgcttcctcgatcaccttctggtggcggcgctgcatcgagcaatcacgctcgccgagatagacggcgttgcgatgctggtcggcaagaatctggatttccacgtggcgcgggttttccaggaatttctccatatagactgcggaattaccgaagaacgtgcctgcctcctggctggtggttgccaccgcgttcagcagggccgcctcggtatgcaccacgcgcatgccacggccaccgccgccgccagccgccttgataatgaccggatagccgattttgcgcgcagtttgcagcacttcctgcggatcttccggcaaagcgccgtccgatcccggcacacagggcacgccggccgccttcatggcgtccttggcggaaaccttgtcacccatcaggcggatggtttcggcgcgcgggccgatgaaaacgaaaccggaggtttcgacgcgctcggcgaaatcggcattttccgacaaaaagccgtagccgggatgaatggcctgagcgtcggtgacttcggcggcagaaatgatcgccggaacgttcaggtagctctgcgccgacgccgccgggccgatacagaccgattcatcggccagcttcacgtatttcgcatcgcggtccgcttcggagtgcaccaccaccgtcttgatgcccatttcccggcaggcgcgctgcacccgcagggcgatttccccacggttggcgatgaggattttctcgaacatcgccatgggtcaaccaatcacgaaaagcggctcgccgaattccaccggctcgccgttatcgaccagaatcgccttgatcgtgccatcggcatcggcttcgatttcgttgagcagcttcatggcttcgatgatgcacagggtgtcgcccttcttgaccacgctgccgatctgggtgaaggcatcggcccccggcgaaggcgagcgatagaacgtaccgaccatgggcgatttgacgacgtgccccgccggcagatcatcgtcctcgtccagattgacggacgaggtgccgccggcagccggtgccatttgcggcgcggctgcgggcagggtgtattgcatgggcgcggctgccacgccgacgtgcttggcgatacgcaccttttcttcgccttcggtgacttccagttcggaaataccggattcctgaacgagatcgatcagttttttgagtttacgcagatccatgttgactccaagttcgcgcattttgtgcgcaattattcgatcaatcgcagcagatcgccgctttcaatcgagattgattcggttgagcagatactcgagggccagccggtagccttcgtgccccaggccgcaaatgacgccgatggccagatcggaaaaatacgaatgctggcggaacgcctcccgcgcatgcacattcgacagatgcacctcgatgaaaggaatggccacgcccgccagcgcatcgcgcagcgcgacgctggtatgcgtataagcagcggggttgatgatgatcgctcgcacgccctgttcgcgcgctgcatggatgcgctcgatcagcgcgccctcgtggttgctttgaaaggtttccagctcaacgccggcattttccgcaaacttgaccaagccaagattgatgtcggccagggtcaaacgcccgtagtgctcgggttcgcgggtgccaagcaggttcagattggggccgtgtaccaccaggatacggcttctttccgttggcttggacgcagtttttcgcttcgtcatggcggcaagtttgccgtaattacgggaactttgtccagtttaccaaaaggcagcccgcgctttcagtcgttgagcggaatgcaggcgatatgctgatttccgcgccggcgctgcggcggcagatagacatcaaattcaccggaaagcgcatataccgtttcgttgagcaggaaattgcggaacttcgcggttgccggcatcaagcgcttggtcgccatatgcgtgatataccaggtacgttcgatgggcgttccaagaagatcgagacatttcaacgcccccatcctcaattccagggaaagtgtatgcaaggaaatcaggctgacccccatgcctgccatcaccgcctgcttgatcgtctcgttacttcccagactcagcgtgcgccccggaatgaacagatgattcttgaacatgtcctcggccacgcgccgcgaaccggagccttcttcgcgcaacaggaaggtatctgcacgcaattcatgcaattcaaagcctttttcaccgaccagcggatgatcgggcggcgcgatcagcacatagggatggctggcgagaggctcggtgtgagcgtcgatttcctgcggcagacggcccatgatggcgagatcgatggtcttgtcctgcaatttctgcaacagggaagcacggttgccgaccgtgaattgcacgtccacccccgggtgcgcctgggcaaacttggccagcagtcgcggcatgaagtatttggcggtgctgaccaggcccaccgtgatctgcccgctttcagccccattcaaagcctgcaggctggcctcggcatccttgatctcgcccagaatacgcagcgcgtgatgcaccagcaattcccccgctccggtcagacccacgccacgccccagccgctcgaacagcggcaggccgacattgtcttccagttgcttgagctgcatcgacaccgccggcggcgtcagatgcaattcttccgcggcgcgcgcataactcaggtggcgggcggccacgacgaaaatctgcaactggcgcaaagtgagattacggacgaagttcatcttttgctgatgtttatcttggcataaccaagggaaacttaatctatacagtgcgccacaccgcgtcaaatcaaatcggcaagaccgggggccggcatgctagcgcggctttccgagcagcgaattttccagcgcatggcgggccagttgcgcaacgctgcgcacgttgagtttgcgcatcaggtcgcggcgatgcgtgaccaccgtggcgggcgaaatttgcagttgctgcgcgatttccgtcgatgtcatgccctgtgtcaccagatcgaggatttcacgctgccgcgcactcagtctgctgctcgccggggctggcagcgtttcctcccgcttgtcctcatccaggcgactgacacgctggatcagcccttcgatcttgcgcaacaggtcggtgccgtccagcatcaaacgctt

SEQ ID NO: 2874 - DNA, 23351 bp, synthetic construct
  source 1..23351: mol_type = other DNA
  misc_feature 1..23351: note = Synthetic
atctgcaggctgccgccgccaatgtcgagcacatggctggtggtcagccgctcgcctagcaactgacgggcgccgacatagccgtaggcgccctcctgcaactgcggaatgaccagcaccgcgactccgctggcggcgtgaatgcgggcgaggacggccgccagctgttcggcgtcctgctccagtgccaggcgccaggccgagaagccgccgccgacgcgcgcgcagtcggcgggaaacccggcctcgagcgggagatcgttcaacgcggcgatggtcgacgcaaccgtttcctcgaggccgcgccccgcccacagcgggtcgaggaaatcgatgcccacttgcgtcgtgatggcagtgccggtagcgcccgcccggatgccggacgagcccatgtcataggcgatgcggcaggatccaccggttgcggtcgacgccgcaagaagagcaaaaaccagcgcggcaacggtttgccgacaacgaccagcggcacgcatcgacatcagaggtgcggaaaacccatggcgccagccaggagtctgccgccggccgagccgcaaacgccgaccagaggacagcgttcatgggcatacatttcagcctcgctcttcttgtcagcctccccggcaaccgcttcgagcttgtccgcctcgccgctggtcagcgtgatcgacttcgtgatcgcgcggaccgcgtacgtgaaagccatgaccagacatttcttcctccttgagtctgccaggtgatctgaaaacactgacccaaaggtgctcattcagaaccctccaggctcagaaaacctcgatcgaggcttggccctcgacgatctcgccaatcaccgagacttgcgaaaacccctgttgcaggaagagcgacaggacctcggtgaccgtttccggcgaacacgaaaccagcagtccgcccgatgtctgcggatcggtcagcagtgccctctccgcacctccgatgccatcggcgagtgtcacatcgtcgccgaagcttctccagttacgctgcgaagcgcctcccacgtggccggcttcggctaacgccagcgcttgcgcaagcagtggcagcgccgcaaaacggatgcgggatgccaccccgccgcgcctgcacaccccgatcaggtgaccgagcagtccgaaaccggagacatcggtgaccgcatggactccatcgaggcaagccagcatcggccccggagtattgagttgggtgacgctggcgatcatctccccgtagtcgccggagttcaggtcacccctttccagcgccgtgctgtaaatgccgatcccgagcggcttgccgagaatcaggcgatcacccggccgggccgcggaattgcgtttgatgcgggcgggatccaccagcccgatcaccaccaggccgtagatcggttcgagcgaatcgatcgtatgcccgccggcgactgggatgctggcgagccggcacacagactcgccgccttcgaggattctggcgatcgcttcgagcggcagcacgttgaccggcatccccaccaacgccagcgcgaacagcgggctggcgcccatggcgtagatattggaaatcgcattggtcgccgccacccggccgaaatcgaacggatcatcgacgataggcgtaaggaagtcagtggtcgcgacgatcgcctggtgttcaccgatctggaatacggcggcatcgtcgccattctccttgccgatcagcaactgtggcgggaagatgcccgacctgacggcgccgaggatcttgcgcaggatgtccggggcgaccttggagcctccgcctccaccttgggtcagttgggtaagtttgatcttttcttgcggcacggtggttctctggagttgaagtcgtaaggcgagtttaactcactcggcatcgaaacccgcgtcctcgatcgccgcgaccagcacgccacgcgaaacgatcaacggatcgaaggccacccgcgcctcggcggcctcgagcgagacctccgccgtcgccaccccctccagggcggcgaggacacccgtgatgttcctgacgcaaccctggcagctcatgccgccgaccttgataacaactgcttccatgttctaacctttcttgcccatcaacccctgctgctcaagaaacgcgacaaactgctccggcggcagcggacggctgaaatgatagccctgaaacagttcgcagcccatgccgcgcaagatctcgtattgttcggcggtctcgacgccctcggccagcacctcgaggcgcaggctgcggcccatgctgatgatggtcgaagcaatggcgcggtcatccgggtcgccccccagatccctgacaaacgagcggtcgattttcaacttgccgaccggaatgcgctttagataagcgagcgacgaatagccggtaccgaaatcatcgatcgccagtttgatccccatatcgttaagcgccgaaagggtgccgaggttctgctcggcatcgttcatcacggtgcgctcggtcaactccagttccaggtagcgcgcgtccaggcccgacaccgagagcgcccgggcgactgtgtcgacgaaaccggcctgacggaactggatgggcgatacattgaccgccaccaacagtggtggcaacccggcatcctgccaggcgcgcacctgccggcacgcctcgcgcaacacccagtcaccgattgggttgatcaggccgatgtcctcggcgacatggatgaactggtccggcggcaccagcccgacttccggattctgccagcggatcagcgcctcgacgccgatgatgccgccggtctcgtgcaccagcggctgataatgcagaacgaattcgtgagcaccgagcccgcggcgcagaccgctctccatcagcagatgcttgagcgtcgttacgttcatctcgctcgaatagaagcggaaggcgttgcgaccggcttccttggccttgtacatcgcggcatcggcattgcgcagcagggcttcgaagtcggtgccatcgacagggtagagactgacgcccagcgacgggctgatggtcagctcgtgcccacccagcgcgaacggggccgcacagatatcgatcagacggcaggcgacttcggcgacgccggcggcacgcacgtcgggcaaggcgatgatgaattcgtcaccgcccaggcgggcgagcgtatcgaccttgcgcaacacagtcgacaggcgccgggacacggcacaaagcagttcgtcaccgacactgtggcccagcgagtcgttgacccgcttgaaatgatcgagatcgaggaagatcagcgccatctccgaaccgtcgcgttcggccgccgccagcagttgagtgcagcggtcccgcaggagccggcggttcggcagcccggacagtggatcgaaatcggccagctcgcgggcgcgctgttcggcttccttctgcgccgagatatcgaggagggtaccaaccgatgccggtcgcccttcgtaagtcgccggtgacccgagaatgatggccggaaaggtcgagccatccttgcgcacgcaaacgatttcatagggctttccgggctcgccgccagcccgttgccgcatctgttccgcaaccatggcgcgctgctcgggaatgagcaggtcgagcggaccacggcggtcgaccagttcctcttcgctgtaaccgaacagtttagtcaggaacgggttcacgtaacggaaaaggccatcctgcaacagaaaaatcccgacctgggccgcttccatcgtcgaccggaactgggattccttttcgtgcatgacttcagcttcccggatccgttcgctgacatcgacgacgacaccgatggccgccgtaggcctgccctccgcgtcgacctcaagcatcatcgaatcatggcaatgccgtaccctgccatcggcgccggccaaccggtaatgaacgaccagcgaggcgcgctgccccgggcggctcgctgccacttcggcgatacgggccagtgcggtttcataatcgccaggcagcatgtgccgcccgaccatgtccatgccagcatcgcggattgcgttcaactccagcccgaacaggctggatgcagcccccgagatgtattcgaagcggccgctctgcaggttcaggcgatatacgacacgcgtgatgctctcgagcagcgcttcacagaacgacagtttttcgatttcttccagactaccccttcccgcaactagcgcccacgcgggcgccagcgcttcagcaacagggaattcgagaccacggaaacggagctcatggccatcgccgcgccggcgaccaccgggttgagccagccaaaggccgccagcggaatccccagtacattatagataaaggcaaagaagaggttttgccgaatcttgctcagcgtcgcgtgcgaaagttcgatggcgtcgtcgacaccgcacaggtcgctgcggatcagcgtcaggtcggcggcctcgaccgcaacgtcggacccggcgccgatcgcaaagctgacatcggccgccgccagcgccggcgcgtcattgatgccgtcgccaaccatcgccaccagtccgccggccttcaattcgccgatcacggccgccttggcgccaggcaagatgccggcgcgaaattcgtcgatcccgacttcgtgggcgatcgccgccgccgtcgccgcattgtcgccggtcagcatgacgacccggatgccgcgcgcacgcaggcgctcgaccgccacccgcgaggtcgggcgcagcgtatcggcaatggcgaacagcgccaatgccgtgccattttcttcgagcacgacgacggtcttgccggcctgctgcaagttcaggatggccgcatcatcggccataccgaaccaggccggcgcgcccaaacgcagcgcgcgcccggcgatctcaccggcaacgccatggcccggtgtggcactgaaatttgccactttttccgggttgaccgcaacggtcgccgcccgcgccagaaccgcccgcgccagcgggtgctccgacccctgttcgagcgctgccgccagacgcagggcactgtcggcgtcggtggcgagcgccacgatgtcggttacctgcggttcgccgcgcgtcagcgtgccggtcttgtcgagcgcgagcacggcaatcttttccgcacgctcgagcgcctcggcgttcttgaccaggataccggcgcccgcgccctgcccggtgccgaccatgatcgccgtcggcgtcgccaggccaagcgcgcacggacaggcaataacaaggacggcgacggcattgaccagggcctcggcaaaatcgccggcatacaaccaccagccggcgaaggtcagcagtgcgatgacgcacacaaccggcacgaagattgccgaaatccggtcggccaggcgctgcaccggtgccttcgagccctgcgcctcgccgaccaggcgaatgatgctggccagcagggtgtgctcaccgacgccagtggcacggcaatggagaacaccctggccgttcgctgtcgccgcaaacaccttgtcgcctaccgccttgcccactggcatgctttcgccggtcagcattgcttcgttgatgctcgatttgccgtccaccacctcgccatcgaccggcacgctctcgcccgggcggaccatgaaaacatcgccgggcatcagcgcatcgacggcaatctcgatccacttgccgtcgcgctcgatgcgcgcggtcttcggctgcaggcggatcagtgattcgatcgcttccgacgtctgggccttggcccgcgcttcaagcaatttgccgagcaggaccagcgtaatgaccgccgccccgccttcgaaataaacgtgctgatcaagcccgaacagcgtcaccacggtcgaaaaaccccaagccatgctggtgccgagcgccaccagcacatccatgttggcgccaccgccgcgcagcgccttgaaggcgccatcgtagaaacgccagccgatccagaactggactggcgtcgccagcgcgaactgcagccagcgcggcagttcgggatgatgatggccgccgccgaacatgaagaacatctggccgaccagcggcagcgtcagcgcgacggcgatccagaagcggcgaatctcgcgctggtaatcagcctggcggcgcgccttttcgcgtgcccgcgtgtccttgtcgacaacgctggcagtgaatccggccttggctaccgcggcaatcaccgccgcctcgttggtagcgccgtcgagcctgacgcgcgcccgctcggcggccagattgacattggcttcgatccccgcctgccggttcagaactttttccaaacgcgccgaacaggcggcgcaggtcatgccggcaatggaaaattcgacaacacggctgctgctaaccgatgtttccacggcacttccagccgcttcgttcatttcaccagcagcaccgggcagtccgccagatgcagcacgcggctggcgaccgaccccatcaccagcccggcgaagccgctgcgaccgtgagtacccatgacgatcaggtcgcacgccaaatcattggccatcctggcgatcacctcggccggctgaccgacatggatgtgggtcgtgtggacgcggccggcggcatcgagccgctgctccgcgccgagcaggtgctcagagctctcctccatgtagtggctgtgcagggtttccttgccgacgtgggccagcgcgtgaccgatcgggatcggcggctgtacgtgcagcagatgaacctcaggcacctcccgaaaccaggcggcatgcgcgagaagatggccaaccgcgcgcagcgagcagtcggagccgtcaaccggcagcaggattttcatggtcatcgctatctcctagatccagtgcaacaggcgtgtcaggccgatcagtccgtagatgccgaagcccagcaccagcaggcccgaggccatgcggaccagcgggcgacggacgaattcattgacccttgccaacaggatgcccgccagcagcagatttggcaatgttcccagcccgaatgccagcatcagcagcgccccgcgccccggtgacccggcgccgagggccgtggtcagcgcgctatagaccagcccgcagggtaaccagccccagaggacaccaagcgggaaagcctgggcgaccgtcttcgccggcacgaagcggcgggtcaacggttgtatgtgacgccacaggtgctggccggcacgctcggtaaaggccagcgcccgagtcacgccgagcaggtagagtccgagcgcgacgagcatcaggttggccagcagatagagcgccaggcgcaccggcgccggtccgtccagcgccaggctggcggcgccgagcgcgccggcaagggcgccagcaacgccataagacaggatgcgtccggcgttgtaggcgaggtgcatcgaccagcgcgcgggcgcgccgagcgaaagcgccccgacgatgccgccgcacatgccgacacagtgggtaccgccgagcaggccgacgaggaacagcgccaggtaaccggaatcaggcatctcgaaggactggggcagcgcaggaagtcacggcgcaaggataccttactcccgcgtccttcccgaatcgccgcgcctcagatcacctttgagtagcgggtccgctggcgatcggcgcgcaggtagcggtcgaacgccatggcgatgatcctgaccagcaggcgccctggcggaaggacggttatccagtcacgttcgacctcgagcaggccggcacgctccatctccttgagatcgtcgagttcggcggcgaaatactggtggaaatcgatcaggtgcgcgctttcgatcgattcgatggacagctcgaagtgacacatcagcgcctggatgatcgaacgcctgagaatgtcgtcggcattcagttcaataccgcggaacaccggcaacatcctggcatcgagacgatcgtagtactcatcgagggtcttgacgttctggctgtaggtcggccccaccttgctgatcgacgaaataccgaaggacagcatgtcgcagtcagcataggtcgaatagccctggaaattgcggtgcaggcgcccctggcgctgggcgacggcgagctcatcgtcgggcttggcgaagtggtccatgccgatgaagacatatccggcttcggtcagtttcttgatcgccagcgcgaggatctgcagcttggtatcggccgacggcaagtcgggttcggcgatccgccgctgcggcttgaacatgctgggcagatgcgcgtagttgtagatcgacaggcgctcggggtccatcgccagcacacgctccagcgtccggttgaaacccatgacggtctgttgcggcaacccgtagataagatcgaccgacaccgacttgaagccgttggcgcgtgccgcctcgatcacggtggcagtctcttcctcactctggacgcggttgaccgcaacctgcacacgctcgtcgaaatcctggacgccgacgctcatccggttgaagccgagttcgccgagcagggcaaccgtggcgtaatcgaccttgcgcggatcaacttcgatcgaatattcgccaccatcaagcagcttgaagtgcctgcgcgtctcgcccatcaactggcgcatttcatcgtgcgacaggaaggtcggcgtaccaccgccccagtgcaactggatgacctcgtgttcgccatcgcgcccttccaggctctcgctctgcagtgcaagctccttcccgagatatttcaggtacttggcgctacgcccgtgatccttggtgatgatcttgttgcaggcacagtagtagcagatggtgttgcagaacgggatgtggaagtataatgagagtggacgaccgataccgccgatggtgcgtttgccgagccacagcctggccgcatcggaatcgaaagcttcgacgaaacgatccgcggtcggataggacgtgtagcgcgggccgttcacatcgaaacggcgaatgatctggggatcgaagacgaggttttcagttgcgaaattcattgaacaagccggcaaggactggactgattatgcccggattccgggccatcccggttgacgtggatcaagcttggacaggttgctgatgtccccacaatccgccggcaagcccatctctctggcgatcatcaagaccgcctgctcgaactgcaatctgcgcgaactgtgtctgcccctcggcctgaccaacgaagaactgcaccgtcttgacgacctcgtgtcgaatcgtcgccgcctgaagcgtggcgaccgcctctacagcttcggcgccccgttcgacgccatctatgcgatccgcagcggcttcttcaagaccgatgtcttgctcgaagatggccgtgaacaggtaaccggctttcagatggctggcgagttgcttggcctcgacggcatcagcagcgaacatcacacctgcaacgcggtcgccctcgaggacagcgagatctgcgccattccgttctcgcgactggaaggactttcgcgcgaaatccacaccctgcagcatcatttccacaaggtgatgagccgcgaaatcgtccgcgaccatggcgtcatgatgctgctcggcaccatgcgcgccgaagaacgcctcgccgccttcctgctcaacctgtcgcagcgcttcacggcgcgcggcttctcgcatgccgagttctacctgcgcatgacgcgcgaggaaatcggcagctatctcggtctcaagcttgaaaccgtctcacgaaccttttcacgcttccaggaagacggccacatcgccgtccagcagaagcatgtccggatcctcgatgtcgccggactcaaggcgctgatgaatcgccggggctgacggttgcgttgcgaacggctatagatagccgtctctctgtacccctgaaacaaaaatgagaaggcccggcaggtttccctgccgggccggattcggtcgtcacccgaaggtgacaccttattgtagcaacggctctcaccccggaaaactacaacgggagtattctactcgttccgaataagaacgagcaaatatcatggagacccgctacacccttgggctggacatcggtatcgcctcggtcggctggtgcctgctcggcgaagatcacatcatcgaccttggcgtccgcgccttcgacaaggccgaaaccgccaaagaaggcgacccgctcaacctgatccgacgccaagctcgcctcgcacgccgccggctcgctcaacgtgcctggcggctgaagaagctggcccgcgaactcaagcgccacggcctgattgcggacaagcggcttttccatcccgagaatccggctgtggtttccccatggacacttcgagtcgagggactcgaccgtttgctggcgcccgaggaattggctcgcgtcatctaccacctgtgcaagcatcggggttttcactggatcagccgcgccgaggcaaagcaggcggatggcgatgccaaaaacgaaggcggcaaggtcaaacaggggctggccggcaccaaacgccttatggaagaaaagggttaccgcagcatcgcggaaatggtgctggccgagtttcccgacgcgcaacgcaacaagcgtggcgaatacaccaaggcactgtcgcgcgttcttctgggtgatgaactgagaaagctgttcgccgaacaagggcgcctgggcaacccgcttgccagcgaatcgctggaagccgccattctcggcagcggcgaccgcaagagcggcctgttctggatgcagaagccaccgctctcgggtgccgcattgctcaaaatgctcggcaaatgcaccttcgagaaagacgaatatcgcgcccctaaagccagcttcaccgccgaacgccacgtctggctcacccgcctcaacaacctgcgtatcgtttttgatggcgagacgcggccgctcaatgcgcaggaacgtgctattgccctgccgctgccttatcaacaggtaagcgatttcaccttcaagcaactacacagcgccttggtaaaaggtgggctgctcccagattccttcgaattcgccgggctgcgtccgaccaaggacgggaaagaccccaagtcggaaaaactcgttaagctcccggcgtggcaggaactacgcaccacactcaagaccgccggattggaaaccgagtgggaaggactcgccggtgccgcttgtcgcggtcaaccggaaatattggacgaaattgcccgcgtgctcagcatctacaaggacgatgacgaagcccgcgcggaattgaacaagttgtcactccccaaccacgaaaagatggtcgagtccctgctcgacatccgcttcgacaagtttcacgcgctgtcgctgaaggcgttgtacaagatcgtgccccacatggagggcggcttacgttacgacgaagcatgcgccgaagccggctatcaccacagccagttgcacaaaccggaggacaaaaaggaactgtacctgccgccgctctacgaaaaccatcgcggcaaggagcctggtgaagtcgacaagatgatcttcagcgagcgcattgaaagggagactcttggcggaataccacgtaacccggtcgtgctgcgggcgctgaatcaggcgcgcaaggtggtcaacgccatcgtccgccgctacggttcgccactggccgtcaatatcgagatggcgcgcgatctttcccggccactggatgagcgcaacaagatcaagaaggatcaggacgaataccgggcgcggaatgaacgtgacaaggccttgtttaccgaagaatttggacagaccccgaaaggcggcgagttcgagaaatttcgcttgtatcgcgaacaactcggcaaatgcgtttactcactggacgccatcgacctcgaacgcctgctcgaacccggctatgtcgaaatcgaccatgccttgccctattcgcgtagcttcgacgacagcaagaacaacaaggttttggtgctggccagggaaaaccgcgacaaaggcaaccgcacgccctacgaatacctcggtggtgcggaaaacagcctgcgctggcagcagtttgttgccttcgtcgaatcgaccaaggcgtatcgcctcgccaagcgcagccgcctgctacgcaaagagtttggcgtcaaggacgccgaggaattcaaggaacgcaatctcaacgacacccgctacatctgcaaattcttcaagaactacgtcgagcgctatttgaagctggcggaaggcagcgaggccaaacgctgcgtcgtcctcagtgggcagatgacggccttcctgcgcgcccgctggggcatccacaaaatccgcagcgaaagcgaccgccaccacgcgctggatgctgccgtcgttgccgcctgcacccacggcatggtcaagcgcttggccgattactcgcgcaccagggaactgacgcaggttcacaccggcttcgtcgacacgaccaccggcgaaatcgtcgacccggcgatgttccggcagctcaagcagcatttccccgagccgtggccgcacttccatcacgaactcgaagcgcggctgaaaatcgacgatgagtccgtgctgcgtaacgaaatgactcaccttggcacctacgacgcggcggcactcgacgaactccggacgctgttcgtctcacgctcaccgcaacgccgcaacggtggcgccgcgcacaaggacaccatctacggtcaaccggaaataatgcgcgaaaaaggcagcgtcacgcagaaagtgccactcgccagcctgacgctgaaagacctcgacaaattgattgacccacaccgcaacgccaggctctacgacgccatccgcgaacggctggaggcccacggcggcaagggagaaaaagcctttcccgcagacaagccattacgcaaaccagaccgtgacggcaatccgaccggccccatcgtgcgttctgtcactaaagtgatcgacaaactctccggcatcccggtacgcggcggcattgccaagaacgacagcctgcataggttagacgttttcaccaagacgagtaagttctaccttgttccgtcatacgcgcatcatcgagttgccaaggcgctaccaaactgcacggcggatggcgaaacacaagtcgacgatagctttcagttccagttctcgatacatccgaacgatcttgtacgagtagccttggggggtggcgagtcaatcatcggttacttcaagggctacggaggcccacccaatccatctaacatcacgcttcaggtacacgaccgcaataagaatgggcaccggcgggcaaacgacaaaggcgaaattccgagtattggcgtaagaactgccctggctcttgagaaattccacgtcgacgtcctcggcaacatccaccccgccccgccagagaaacgccgtgggctggcgtagcgtgatgatttcccggccagccaggctgcgccgggaacatttctccctcgccatcgagcaggaacaaacggccttcgttcctttcgaggacatcgcggtgatcgtgctcaaccaccgcgaaatcgcgctgacccatccggtactctcggcctgtgcagaatacggcatcggcctttacgccaccggcagcaatcaccagcccagtggcgtattcctgcccttcctgtcgcactcgcgaaccacgcgcctgatgcgcaaacaactcgacattgcccgacctctggccaaacaagcctgggccagcatcgtccggcgcaagattgaaaaccagtcgggctgcctgcgtttttgctccaaaaagggcgttgaccgcatggattcatacgctcgtcgcatccgctccggcgacccggagaatcttgaaggccaggccgccgccttctatttcatccagctattcggccccggctttcaccgcgccgaagagcgctgggccaatgccgccctcgattacggttatgccgtcctgcgcggcgccatcgcccggggactggtggctcatggtctgcatccgcccatcggactcttccatgccagcgaacagaatgccttcaacctcgccgacgatctgatcgaacccttccgtccgctggtcgatcttcacgttgccaagcacccggcaagcaccgaaggcgatctggctccgcaggacaaggctgcgctggtcgcgttgctcaatgtggatgtcggcatgccacaaggcaagatgtccgtcctctcggccatcgaatacgcagtcgaaagtctcgcccggctttacgagcaggaagaaagcactctcgaactgccgacgctggtcggcttgcaggcacacgtgctggaatgctgaggcatggggctggagactcgacgcttcatgcgactactcgtcttcttcgatttgcccatggtcaccaagtccgagaagcgtgcctacgtccagttccgccgcttcctgctcaatgacggctacgacatgatccagtggtcggtctatggccgcatgctcaatggcaatgacgatcaggacaaacacctcaaacgtttggtggacagcctcccacccgctggctcggtgcgttgcatgacagtgaccgaaaagcagttcgccggaatcaaactgctggtcggaataccgctttttcaggaaaaaaaggttccggcaaaccaaatgttgctcttctgattcacgtttcaccaaaaaaaattcccgtccagctacgccgggcgggaatttagggtcggtctattgtagctttccggggtgagagagggagctacaacctattcggcaaaaagcttggcgcggaattgattgtagctttccggggtgagagagggagctacaaccggccggcggcgagcatggtcggcttctggattgtagctttccggggtgagagagggagctacaacggagaattggtgacttcttgcgcgatattcattgtagctttccggggtgagagagggagctacaaccgatccgctatcatgcgccgcaatacctatattgtagctttccggggtgagagagggagctacaacagacgcgatttcatggaccaatccagcgacattgtagctttccggggtgagagagggagctacaacatagaaagcgtgcagctctcgatccatgtgattgtagctttccggggtgagagagggagctacaactcgaaacaagtcggttcagacctgcccgtcattgtagctttccggggtgagagagggagctacaacaatgttgcagtggttgcgctcatcgtgagcattgtagctttccggggtgagagagggagctacaacctgccgctcggtcgtgagctcgaatgcatcattgtagctttccggggtgagagagggagctacaacttgtatagtcttcacatgcgcggctttcgcattgtagctttccggggtgagagagggagctacaaccgcttccgtccgcggaagaatggatactacattgtagctttccggggtgagagagggagctacaacgtaagcttgtcagcaaacatcaacatgtgcattgtagctttccggggtgagagagggagctacaacctcgcgtattccgggaagttttctagcagtattgtagctttccggggtgagagagggagctacaactgaaccgttcgccgccgaaaagcatattgtattgtagctttccggggtgagagagggagctacaacactacaacagcgtcagctgctgcgggatggattgtagctttccggggtgagagagggagctacaacaaaatgttaattctaggtttgcgtcagcaaattgtagctttccggggtgagagagggagctacaacgcgcagtggccatactggaaagagcgcgacattgtagctttccggggtgagagagggagctacaacgtggcacggccgcgccgatgggacaactggcatacttcatgaattcctgactctcaccaagccgacatgaaggttatccgctgccgtatgtcagtccgaacgcaccgagccaggccgacattcggcaggccaaccccgaggctcgttgcggggccatcaccggccggccgtggctgatgtcctcggtcggatggaagaccgggcatgccggacagacgacgatcacgctcaccgggttgcgcctcaatttcggcaaagtccgcgaggttcggcgaggtgtctccgtgcaacttacggcttgggcttcccgcactgcgaggcagttgacctgcgccaccgtttggcctctcgtccgcgattatctcgagcgggccctcgccgatagcggacctcttctatctcgtcgactcggccgatgtcatgcaaagggaatcggccagctgcggtttatgggttcatttgttgccaacaattcgcagcccttcgacaatttcgggaatcgtcgcatcgctttccggcaggcggcacagatggcagcgggcctcagcgtagcccgagaacgtcctgcatgtcgaacaggccgttgcggcggccagccaggaagcgtgccgcgcgcatgctgcccagcgcataaggcatgcggctgcccgccttgtgggaaatctcgacccgttcgccgatgccgcagaacatgacggtatggtcaccgacgacatccccgccacgcaccgtggcaaagccgatggtcgacgggtcgcgttcgcccgtcacgccctcgcggccatagaccgcgcattccttgagatccctgccgagggcgccggcgaccacctcgcccatgcgcaacgcggtgcccgatggcgcatcgatcttcatccgatggtgcgcctcgacgatctcgatgtcgtagtcatgattcaggatgcgcgcggcggtatccagcagcttgaaaacgaggttgaccccgacggccatgttcggcgcgaagacgatcgggatgtcgcgggccgctgcggcaattttttccttgccttcggcttcgaagccggtggtgccgatcaccatccccacccccgcctggcggcacagttcgagatgcgcaagcgtgccctgcggccgggtgaaatcgatcagacagtcgatcgcggtaaggccgccggcgagatcgtcgctgaccccgacttcgctcgccagaccggtcagttgcccggccgtctggccgatggcggcgctccccgcaacgtcgaacgcgccggccagcgtcactccttcatccttcagggccgcctcgagcagcatgcgacccatgcgcccgccggcccccagaataccgattcgcgttccgctcatgatcagaatccgacagactttatcaaaccctcgatgaaccccggtccttcaggaggaggcatcggcggtgccgacccgtcgctgggcagggtgccatagtcaaccacccgcgtccgcgcggtcggcacggcgagttcctcgaggtcggccacctcgacgtcgcccgacgccctttcgagacgattgtccttgtcgaaatagaccgaaaactggcgggtttcgacttcgccgctccggcccttgcggtagctgtagacatagtcccagcgctgctggtggaagacgtcggcaagcaacggggtccccaggatgaaacgcacctgttcgcgcgtctggcccggcttgagttgggcgaccatttcctgcgtcagtacattgccctgctggacatcgatcttgtagggattgaaactgccgcacgccgcaagcagcgagcaggcggcaccgagaataagcaggcgggaacggaacatgcgggaatccgaatttctctaacaggttcgaagcgttatatcatacccgaattgatggcacccccgcctccaaccaccgacggaaaacaatgagcgacccgcaaagcctcaagaacatggggctcaaggccaccttcccgcgcctcaagatcctcgaactgttcgagaagggcacgttacgccacatgacggcggaggatgtctaccgaatgctcgtcgccgagaacatggatattgggctggcgacggtctaccgggtgctgacgcagttcgagcaggcgggactgctcgagcgtcacttttttgaatcgggcagggccgttttcgagatcaatcacggcaagcatcatgaccatctggtgtgcgtcgattgcagccacgtcgaggaattctacgacccggaaatcgagcgccggcagaatctggtggccagcgagcgcggctttgtcatccaggaccatgcgctctatctttacgcgcagtgcaccaaggcggactgccccaaccgcaacaagggaagcaagtcttgattgatcccgccgatttgctggctggcaactggctggcttccgccggaacgtctttcatcctcgttggacttgccgaaatcggcgacaagagccaactggtgtgcatgaccctggcggcgcgccaccgtggcctgccggtggtcattggcgcgattgcggcgttcgccgttctcaacctgctggccgtcctgttcggcgccgccgtcgccgcctggcttccggaatggctggtcatcgtggccgtggccatccttttcgccggcttcggcatcagcgccctgcgctacaaggaagacggcgacgatgaaacggttgaggaaaagcccgggcacggaatcttcgccacggccttcctgctcatcttccttgccgaattcggcgacaagacccaactcgcggtcgccggcctcggcagcaccagcgaaccctccgcggtgtgggctggcgccacgttggccttggccatcacgtcgatcctcggtgtcttcgccggccgcaagttgctcaaccgcctgcccctgctgtggatccaccggatcagcggcgtctttttcctgctgctggcgatcttcgcggtaacccggctgttctgagttcggttttttcgaattttccaggttgaccgcggcagttcgttggcaacgtcatttctcagcggcattccaaaggcagcgggatcaggccgctttctctggacaagctcttgggatgagccattatcgagcctctttcggggtcgaccgcgagctgcaggcagcagccttggaaggtggccaacatgccgtggcggatcaaagaagagaccaagcgtgggctgcgcgtggtacctgccttcccctgtggcgagtcctgcctgctgctgattcgggctcccccccacgacataacccgggcaaacgggatgaatttttccccggcatcaactgttgcatcgcttgacgcacgaggctccattcgggtgtaggataggcaaagtcaaagctgtccccggcactatcgacaaggagccttcgtaatgcgttcgatgttgcgttgcatcgccgcgatcttcgccgccacgttgctgctcgttgcggcgccggttcgcgccgcggatcctaccgccttcaccgtcgagcaactggatcagatgctggccccgatcgccctgttccccgatgccctactttcgcaggtgctgatggccgccacctatccgtcggacgtcgcgcaagcagccgactgggcattcgccaaccgcaatctggagggtgacgcggcggtcaaggcggttcaggacaagccatgggatcccagtgtgcagtcgctggtcgctttcccgcaggtgctcgccatgctgggcgagaagccggaatgggttcacgaccttggcgatgctttcctggcacaacccgaggccgtcatggattccgtgcagtttctccgatccaaggcgaagaatgccggcaacctgagttccaatgaacagcagattgtcaccgtcgaggccgcgccaccgccgccgcagaccatcgtcgtcaatgcgccgccaccaccgacccagatcatcaccatcgccccggcaaatccgcaggtgatcttcgttcccgtctacaacccggtgcacgtcttcggtccctggtggcacccgatgcatccgccattattcttcccgccgccgccgcgctggggattcggctggaatccggtcggcaacgccatctggtggggcgtcggcattggcgtcacgtacgcgttatggggcggtgtcgactggcgacgccgcaacgttaacatcaacgtcaatcagtggaacaacatcaatgtcaacaaccgcatcacgtccaataaccggaacgtgaactggaaccacaatcccggcaaccggaggggcatcccctaccgggatgccgcgacgcgcgatcgcctgcagaacgcggttggcgagcgcggcggacgtcaggattttcgcgggcgtgaggatcagcgcgcgcaggcgcgggcggcactgagcgatcgcatcggcgccgagaacctggatcgcaatgcgctgcgtgacatcgaccgcagccagattccgcagcggccagcggctggcgccggcacgccggcgcgggatcgcgcggccagcatcgaccgtgggcagttgcaggaccgcgcggccggcatcgaccgaaatcaggtacgggatcgtgccggcaatatcgaccgcggccaggttcaaaatcgggcagccaacgtcgaccgcaatcaggcgcgtgaccgggccgccaacatcgatcgcaaccaggtgcagaaccgtgccgccaatatcgaccgcaatcaggtgcagaatcgcaccgccaatatcgaccgcaaccaggcgcgtgacagggcggccaacattgaccgcagccaggtgcagaatcgcaccgccaatgtcgaccgcaatcaggcacgtgaccgggccgccaacattgatcgcagccaggtgcagaaccgtactgccaacatcgaccgcagccgcgcgcaagaccgcaacgcaagcgccgcacgaaccaaccgcgacaatgcactgcgtggcgccaacgatggtcgccaaacccggcagcaaaccgaccgcggcgctgcgagccaggccgcccagcggcgcgcggcggcgaacagaaacgccaatgctgcccggccggcggcaggcgccgctggcaggcgccagcggtaatcatgagcctcgcgatggaatatcagacgatgaacaatcgatggatcaaaggcgcgttcgcgctgctgttcgccctgcttctggcgatgccctgcggcgccggcacgcggaagatattctcctcgccggaagccgccgcggacgcactggtcgacagccttgcacgctacgacgatgcggaactgcgggcggtgctcggccacgaccatcagcaactgattccgctcgacgacttttctgccgacgatcgcctcgcctttctcgaggcttgggcaaagggccatcgtatccagatggtgagcgatgcggatgcgcgcctcgaactggatggtggctggacgctgccaatacccatcgtccgcaccggcgccggctggtcgttcgatgtgcgggccgggcgggaagaaatgcgcacccgccgcatcggacgcaacgaactggcggcaatccagagcatgtacgcctatgtggaagcgcaacaggagtacgctaagcaggatcgcaacggcgatgtcgtgctcgagtacgcacagagggttctgagctcacccggcacccgggacggcctctactggccagcggcagccggtgatcccgagagtccgctcggaccgctatttgatacgaaggacctgaaggatggctacaacggctaccgcttcaggatactcaaggcgcagggagcggccgcaaaaggcggcgcccgcaactacgtccgtcacgggcgaatgaccgatggatacgcgctggttgcctggcccgcccgcttcgacgaaaccggcttgatgaccttcatcgtcaaccaggacggcgtcgtgtaccagaagtaccttggccccaattcagccgccattgcaagcgcgatgacacggtttgacccagacccttcctggaccgcacttcccgcaccctgagacagggatacgagagaaatccagccgggttctgaccaccagccgggagtgcgccattttcaagcgcattcgcgagttgaccgcgccgcaaggaaaaccacgagacagatcttgtcccggattgctcagatttgaccattctgcgagagaagtatcgcgattggacgcgtcccggaaaactcggcgaaaaccagcaccatgcatgcggtgatgggtaccgccagaaaggctccggggatgccccacagcgccgaccacacggccaggctcacaagaatgacgaaggggctcagattcagcgaattgcccatcaggtaagggtcgaggaaaaacccgatcacaaactgcgttgccgagagggacaccaggacgaccagcgcgataccaaaatcggcaaactgcatcgtcgcgaacgcaacgggaaaaacgacgcccaggaccgaaccaaggtagggaacataattcagcatcccgatcaataccgcccagaacgccgcaaattcgacgccgataaattccaggaccgcccaactgaccaggccttgtatgacgcttaccacggtcttgagcgcgagatacgcaccaatcctggcgttgatttgcgcgatgatcttctgtatctggaggacgttctgcggatcactggaaatcctggctatcttggtcgaaaacgtacgctgctcaattagcaggaagacaacatacagaaggacgacaaccagggtggagacgattgccgaaaccgaaagcatggtcgatccgatgagtctctgcgtatttatttgtgcaagtacgtcctgccggagagcggtccaggtgggagccaattcgacacccagcctttcggcggcgccctggatggcattgagcagtgacgcggcatacttcggcgccagcgccgagacattgccaatactgccggccacgagcgaggcaatgccggcaagcatcagagcaatcaccagggctgacaagagatggacgatctgggggggcaagaaacgcccgaagagcgggagcctcacaagcattcgggcaagaccgactatgacgtagacgacgaggacgctgaatacgatcggaacgaaaacaccttttccgatatagagcacccagccaatggccagcgcgaagaacaacccgtacacagtgccttgaaaacgcgcgttcatggcgacatgagccttgcaatcgggaacagtcccggttttcggaaatagcgccgggcgtggttcatggttcggagtctggcacagtcgaacccgccccggagaaggtgccttttgcgtgcaacagttcccgcgcatgctccagcgtgatgtccgttacctcgaccccgccgagcatgcgggcgatttcgcgaacgcgccgttcgtcattcagagattcaatggcgctgagcgtgacgctgtcgcgcgttgtcttgctgacctgccattgccattccgcgcgcgccgcgacctgcggcaggtgtgtcacgcacagcacctggcgttcgccgccgagctcgcgcagcaggcggccgacgatttcggcgacgccgccgccgatgccgacatcgacctcgtcgaagatcagtgtcggcacgctggccgagcgtgaggtcag

SEQ ID NO: 2875 - DNA, 23339 bp, synthetic construct
  misc_feature 1..23339: note = Synthetic
  variation 16809..16872: note = note, n is a, c, g, or t
  source 1..23339: mol_type = other DNA
tcgagccagcgccgccggagaactcaaccttggctagcgccccatttactaaagagagctggggtggcacgtgtccaatgtccaggtcgtacagcactgggcaatggataccacctagcactgatcgtatggcatcaatgtaactaaagtcatccgccgaatttgcgtcaggcgcggcgctcctcccaagaagaacgccttgcaaatcagcaaaccacccattcttgtccagtccgtgcaacgcgcgggcaagctcgaacggtttcaattcagcgttttcgaggtaaagcaataccccgtcagtacccgatgatcttatgaatgcaggcacgttgccgtatgacgttcctgcgagccttgaaattgagtcgaggcagccaccaattaaccgcccttgcatgttgagcggtgtcgcagaaccgtcgagacgcttccactgtgtttgtttgcctggaataagacctgcggttggcgtattcgtccagtctgctccaactgtttcgaaggaactggatgaatactgacaaacgtcggcaggatgcgaggaagcgaggacattccatacaccagcggtcgtgcggtcaagttccgcagcaccgagctgcataagattggggccatgcaaggtggcccatcctgcaatcgttgtgagcggaagatgcagcgtactcagatcggagaatccagaaaaccacttggccggtgtagatgccagcaccttgaagtcaagtcgatcaagcaactcggttgcaagttcacctccccagggcggcattaccgcagcaacatcagaatcagtgagaaaccgcattaactcagcagcccgccgctgcggcgtagcgcttgtgcccttaagctgctggcgtaggcactcaccttccacaacacggaagccacgttgcctcagcacggcaatcgccaaatctagacggggatgcaatggtccaggaacaccggatgatggtgctgtaatcgcgatcaagtcaccagccgcaagcggttttggaaaatctattttcatggaatatgcgcaaacgcaaggccagtcaaaattcagctaactaagtcgacatgctgttagattaagtctgcattgtgccgacaatctacggatttgcataaagatagtttcttgccgatcgctaacagacccgaatcgatcaagccaagcgatcaggctatggaaagcgcgcgccccaatagtcactccacccccaaactcgccaagtactcctcatagccgcccaggtaatcgaccaccgtcccgtcgcccttgacctcgatcacacgcgtggagagtgaggagacgaattcgcggtcgtgcgagacgaagaccagggtgccggtgaatttttccagcgcggtgttgagcgcttcgatggactccatgtccaggtggttggtcggttcgtccatcaccagcacgttgccgcgcgccagcatcagcttgccgaaaatcatccgcccctgttcgccgccggagatgacgcgcaccggctttttcacctcgtcgccggaaaacagcaggcgacccagcgtgccgcggatcagggtttcgacgtcgccgccctcgccggccgagtcgcgcgcatcctcggcaatccagtcggtcaggctgatgtcggaatcgaacagcgcggcgtggtcctgcgcgtagtagcccggcttggccttctcggcccacttcagcgcgccgaattgcggcgccagttcgcccatcagcagcttgagcagggtggtcttgccgacgccgttttcgccgatcaccgcgatcttctcgccggcgtggatggtcagggtcaggttgttaaaaatcttgcgctcgccgccttcgtaggcgaaggagaggttttcgatttccaccgcctgccgatgcagtttgtccttgtcgtcgaactcgaagcgaatccacgggtactggcgcgacgagggtttgacgtcttccggcttcagcttgtcgatcagcttgaggcggctggtggcctgcttggccttggaggcgttggccgagaagcggcgcacgaaggtctgcaattcggcaatgcgttccttggccttggcgttggccgccgactggcgttcgcgggccagcgccgaggcttccatgaagtcgtcgtagttgccggcgtaggtggtgatcttgccgtaatcgagatcggccatgtgggtgcagacctggttcaggaagtggcggtcgtgcgagatgatgatcatggtcgattcgcgctggttgagcacgtcttccagccagcggatggtgttgatgtcgaggttgttggtcggttcgtcgagcagcaggatgtcgggattggcgaacagcgcctggcagagcagcacgcgcagcttccagcccggcgccacttcgcgcatcgggccgttgtgctgttcggtggggatgccgaccccgagcaacagctcgccggcccgcgattccgccgtgtagccgccgtattcggcgaagtgcgattccagctcggcggcgtgcaggtagtcgtcctcgctcgcttccggattggcgtagatggcgtccttctcctgcatgcaggcccacatttcggcgtggcccatcagcaccacgtcgagcacgcgcatatcctcgtaggcaaactgatcctggcgcagataagccatgcgctcatgcgggtccttggaaacattgccggcggaagcttcgagcgccccgcagagaattttcatgaaggtggatttgccggcgccgttggcgccgatcaggccgtagcgatagccctcgccgaacttgacgttgacgttttcgaagaggggcttggccccgaactgcatggtgatgttggcggcgacgagcacggcgaatcctgatccaaattcttgaaaagacgcggattttacctgttttccggcaacttccggcgactcggctacaatgcgtcacaaatctcttggagaacgccatgagcggacaggatatcgacgaacgcagtgcctttgccatgtcgggctggctggccctgctgatctggctcgccgccctcggctggctgctgtggaccaccgtgcaggccctgcccttcggcggcccgccgctgcgcctgatcgtcggggttccggtgctgttgttcctcggcaagggcttcgtgatcctgcaaccgaacatcgccgtggtgctcacctttttcggtaagtatgccggcacgctgcgcgaagatgggttcttctggctcaacccgctctgcgcccgccagaaggtgtcgctgcgcatcgccaacctcaacacgcccaccctgaaggtcaacgacaaggccggcaacccgattgaaatcgccgcggtcatcgcctggcgggtggccgataccgcccgcgccaccttcgcggtcgaggactacgccgccttcatccacatccagtgcgaatcggctttgcgcgctgttgccagcacccgttattacgatggcgacaaggagggcaagcactcactccgaggcgatctggaagcggtcgtgcaactgctcaccgagaccatacaggaacacgtcacgctcgccggcctggagatcatcgaggccaagatcgcccaccttgcctacgcctccgaaatcgccggcgccatgttgcgccgccagcaggccgaagcggtcatcgccgcccgccagcgcatcgtcgaaggcgcggtcggcatggtcaagcaggcgctggaagagttgcagcaggccggcgtcgtcacgctgtcggaagcggatcgggtcaagctggtcaccaacctcctgaccgtgctggtgtcggaaagcgagacgcagccggtactgtcggtccgcgactgacccgggttggcgacgacgacacccccacggcgcgagcgcccgccactataatcggggcgcgccgcttcccatttgttccgattctcgcccatgtcgcccaaggatgtcgttcaactcggtcaggttttcaccccggattgcgtggtcgacctgatgctcggcctgcggcgcaaccgcggtcgcgtgctggagccttcggccgggaatggcgccttttcctcccgcctgcccggctgcgtcgccatcgaggccgacgcccggcatgcgccgccaggtgcgcgggtacaggattttttcgcctaccccgaacgcgagcgttttgcgaccatcatcggcaacccgccctatgtccgccatcaggacatccgcccggaaacccgcgatctgctcgattcgccgctgctcgatgcgcgcgccaacctgtacctgttcttcatcgaaaaggccgtccggcatctcgaaccgggcggcgaactgatcttcatcaccccgcgcgatttcctcaagacgacctcgtcggtcaagctcaaccgctggctggcgcaactgggcacgattaccgatgcggtcgagctgggcgatgcgcgggtctttgccggggccgttcccaactgtctgatctggcgcttcgagctggggacggtttcacgtgaaacgcgctttgcggaagccggcgccggcgacgatctcgcactcgccctgccgcatctgcgctggcacacgcgacagttcgtcgaggccggcggtcatctgatgtttgcgcgcaccgcctacgatctgcatgtgcgcgacctgttctcggtcaaggtcggcggcgtctcgggtgccgacgacctgtatgccgccctgcccggcaaccgcgatttcgtctgttccgaaacggtcagcaccggccgcacccgccgcatgctctggcaggcccccggttcgacggcccccgacccggccctgctgccgcacaaggatcgcctgatcgcccgccgcgtccggccgttcgacgagcgcaactggtggacctgggggcgcggctaccccgaatccgacgcgccgcgcatctacgttaacggccgcacacgccggccccgacccttctttctgcacgagtgccggcatttcgacggcgccgtgcttgccctgtttccgcaccgtcccggcatcgacctggctgccctgaccgacgcgctcaacgtggtcgattgggccgaactcggtttcgtctgcgacggccgctacctgttcacccagcgcagcctggagcatgcgccgctaccggcgggcttccgcgccttcctgccgggcgcggtgtaagataggcgcctgcccattcagacaccgcccgtatggttcctcatctgaccaccgccctcaccggcccgattctcgaactcgaacaacgctttctcgaaaacgccaccgccatcgaacgctggctgcgcggccaatggctggaacacacaccacccttctattcgagctgcgacctgcgcaattccggcttcaagctggcgccggtcgataccaaccttttccccggcggtttcaacaacctcaatccgtccttcctgccgctctgcgtgcaggcagcgatgagcgccatcgagaagatctgcccggaagcgcgcagcatcgtactggtgcccgagaaccacacgcgcaaccagttctacctgcaaaacgtagccaagctcgccagcatcctgcgtctcaccggcctcaacgtacgcatcggcagcctgttgcccgagatcaccgcgccgacgccggtcgatctgcccaacggcgaacagttgctgctcgaaccgctgaagcgcaccggcaaccgcctgggcgtcgaaggctgcgatccctgcgccgtgctgctcaacaacgacatgtcggcgggcatcccgcccatgctgcaagggctggacgagcaatatatcctgccgccgctgcacgccgcctgggcagtgcgccgcaaatccaaccatttcgcagcctacgatcaggtcgcgcaggatttcgccacggctatcggcatcgatccctggcgcatcaacccggccttttcggtttgccgcgccgtcgattttcagggccggcagggtgaggaatgcctgcgcgccaacgtcgacgcggtgctcgaaatcgtgcgcgagaagtatcgcgaatacggtatttccgaaacgccctatgtcgtcgtcaaggccgacgccggcacctacggcatgggtgtgatgacggtcaaagatgcctccgaagtggtcggcctcaaccgcaagcagcgcaacaagatgagcgtggtcaaggaaggcctggaagtcagcgaggtgctgatccaggaaggcgtgcataccttcgagacggtccgcgacgcggttgccgagccggtcatctacatgatcgaccgctatgtcgtcggcggcttctaccgcgtgcacacggcgcgcggcaaggacgagaaccttaacgcgccgggcatgcagttcgagccgctggccttcaccaccggctgcaacctgcccgactacgcctgttgcaacccggacgcgccgcccaaccgcttttacgcttacggcgtggtcggccgtctggcctgtctcgccgccgccatcgaactcgaacgcatggcgcccgaatgagcccggtgcgcgcatggcgtgcggtcgccctggcagcagggctgctcggcctggtcttgctcccggcgtgcgtgcgcccgcagatgcagcagcaggaggcgtatgttttcggcacccgcgtcgaagtcctcgttgccgatggcgacgaggccaaggctcgccatgcgatcaacacggtgctgcgcgaattcgagcggctgcaccgcgaataccatgcctggcaaccctcggaactgttcagcctcaacgaatcgctggcaaaggggcaaccccgaaccgtcaccccggaactggccgctttcatccgcgaagcggccgaactggccgagcgtggcgaccacctgttcgatcccggcatcggccgcctgattgcgctgtggggatttcaggccgacgagttcaaggcgcaattgcccgaccccgccgcccttgccaaactggttgcccaaaagcccagcgttgccgacatccgcatcgagggcaatacggtcagtagcggcaatcgggctgtcgcgctcgattttggcggttacctgaaaggcgtggcgctcgaccgcgccgccgccattctcaaacaggaaggcattcacaacgccctcatcaacattggcggcaatgtactcgcgctcggcaacaagcacggccgcaaatggaaggtgggcatccagcatccacgccagccggggccgctggcggcgctggagctcgaggacggcgaagccatcggcacttccggcgactaccagcgctacttcgagctggaaggcaagcgctatccgcatctgatcgatccgcggtcgggttggcccgccagtcatacccgcgcgctcaccatcgtgatcccggccggcgccaaggcgggtacctactccgacgccctctcgaaacccctcttcatcgccggcaccgacggctggcaagcaatggcacgcaagctgggggtcggcatggtgctgcgcgtcgacgccgaaggtcgcatccaggtcacgcgcgccctgcgtcaacgactggaaacacgagaggcgctcgatacggtcgagtaggtcttcatttccccattttgcgtgataaactggatacatgtccagttatcgccgcattgcccacctcgacatggacgccttcttcgcgtcggtcgaactgctgcgctaccccgatctacggggcgaggcagtcgtggtcggcggcggacgcgcgcatcagccgcacatgggaccggatggccgccgcgtttacgcccgcctgcgcgactatgtggggcgcggtgtcgttaccacctcaacgtatgaggcgcgggcactgggcgtccattccggcatggggctgatgaaatcggcggcactggcacccgacgcggtgctgttgccccccgatttcgacgcctaccggcactactcgcgcaccttcaaggccgccgtcgcggccgtcgtcccgaccatcgaagatcgcggcatcgatgaaatctatctcgacttctgcgcccgtcccgacgacgacatggctttggcagagcgcctgcaagccgccgtgcgcgacgccaccgggttgacgtgctcgctgggcgtcagcgtcaacaagatgctggccaagctgtgctccgatctcaagaagccgaacggcatcaccctgctcgcgcccgacgaaattccggcgcgcatctggccgctgccggtgcgcaaaatcaacggcatcggccccaaggctggcgaaaaactcgcccgcctcggcatccacagcatcggcgaactcgccgccacacccgtcgaccggttggtccgccatttcggcgcgcacagcgggcgctggctgcacgaagtcgcacacggcatcgacgagcgcccgttatcgaccgacgccgaacccaaatcgatcagccgcgagaccaccttcgagcgtgatctcgacgtgcagcgggatcgcgccgcgctgtcgggcatcttcaccgatctctgcacccgactggcgggcgatctgcaacggaagggctatgccggtcgcaccatcggcatcaaactgcgcttcgcggattttcgcgcggtgacccgcgatttcacgctgcctgtcgccgtggccgacgcgccggccattcgccgcgccgccggcgaatgcctcaaacgtattccgttcgaccagcgcctgcgcctgctcggcgtgcgtgccggcaaccttgtcccgctggcggcggcgagcgaggaacccggcgctcagggcaaactggccttctagggcggctcacgtctccacccggttacggccattctgcttggcgcgatacagggccgcatcggcctcggccaacagcgcttcgatgtcggccgcctgtcccggctcgcccagcgtggccgccacgcccagactgacggtgtaggcaggcaaggcggcatcgcgcttcttttcgatttccttgcggatgcgctcggccacctgccgcgcttcgaccaaaccggtctcgggcaggagaatcacgaattcctcgccgccgaaacgggcaaggatatcgggcacgcgcaacatggccccggtgcgcgcggcaaaatccttgatgaccagatcgccgacatggtgcccgtacgtatcgttcaccttcttgaaaaaatcgatatcggaagtcaccaccgccagcgcacgatgtgagcgctgacttctcgcccactccacttccgttctcgcaaagaaggcgcgacggttcagcgccgaggtcatcggatcgcgcgtcgccatgaattccagagcggcgcgcaggcgctcgttggccagcaacacgaacccgatggaaagtcccaataccccgagcgaaaacatgccgagatagatctgctgaatcgggttatggtcgaacaattcgtcgctttcgctcaccgccgcaggcagtgtcgcaatgcgccagaccgcgacgaccacgcccaaaacaaagaaggccgcgagaaagcggctaccgaagccggttggccgcgtgcgccaggccaacaccgccccggccgcgaagaagccgatgtgcgccaaggccatcacaaagacgcgaccttgataatgctgcgacccataggtgagccagacgatcaggatcagcagcgcaacgttgacatccagcgtcggccgccaacgcaccggcttgcccgaatagcggagcaagccgacgatcagcagaaactgcccgaccagcagcaggccggcagcacccaccaccgagaagacatccggccaatatccgcgaagcgacgccaaacccgacgcgcaaccgatcagcacgacggccttggcccaatccgccagaccgacgatatcccgcggaaaactcttggcctgcacccacaacacccaggcgcaaagcagccccagcagattggcaacgagcaggaaggtacggggatcgacggtcagcatggtcattgcacggcaatcaggacagatcagcccggacgaccgaaacatcctgtcgcgccgacactgtcgccaacagtaaaaagacccagcaagaaaacttgctgggtcgggttcggtcgtccccgaagagacaccttattgtagcaacggctctcaccccggaaagctacaagtggcgtattctacccgctttggataatgatgggaggatttatgtctaccccctacacgctcggtctggatatcggaatcgcctctgttggatggtgcgtgcttggcgaacagcacatcatcgacctgggcgtacgcgccttcgacaaagccgaaaccgccaaggaaggcgacccgctcaatctgacccgacgcatggcgcgacttgcccggcaccgcctcgcccagcgcgcctggcggctcaagaaacttgcgcgcgaactcaagcgccatggcctgatcgacgacaaacgctttttccagcccaccaatcccacggcggtttccccgtggcaattgcgcgttcagggcctggaccggaagctggaacccgacgaatgggcccgagccattttccacttgtgcaagcatcgcggttttcattgggtgagtcgggcggaggaaaaacaggctgaagacgacgccaagagtgagggcggcaaggtcaaacaaggcctggccggcacccgccgactcatgaccgaaaagggttaccgaaccacggcagaaatggtcctgtccgagtttcccgattctcaacgcaacaaacaaggcgaatacacgaaagcgctgtcgcgcgttcttctcggcgacgaactcagcagactgtttgttgaacaacgacgactcggcaatccacaggctactccagagttggaaatcatcatcctcggcaagggtgaccgcaagagtggcctgttctggcagcaaaaaccgccgctgtcaggggctgatctgcttcacatgctcggcaaatgcaccttcgagaagtcggaataccgcgccccgaaggccagtttcactgctgaacgacatgtctggctgacacgcttgaacaacctgcgcatcgtcattgatggcatcacacgccccctcaacgatgcagaacgggcaattgccatgcccctgccctatcaacagaccggcgacttcacctacaagcaactggccgccgcattgaacaaagccggcttgctaccgaaagaggggttccgcttcacaggcctctcctaccccagcgaaaagcagaagaccgaaggcaaggcaaaagatccggaaggcggcgcgctagtgaaatttcccggctggcaacaactccgcagcaccctcaagaacgccgggctggaaaccgagtgggaaggtctcgcggcgacagccttcgacggtcaaccggagaaactggacgaaatcgcaaaaattctcagcgtctacaaggacgatgacgaagcccgcaccgaactcgccaaactgcccctgcccagccgtgagcggatgatcgaggcacttctcgacatccgcttcgacaaattccacgcgctctccctgaaggcgttgtacaagatcgtgccgttgatggaaaaaggcatgcgctacgacgatgccgttgcggccattccggaatacggtcaccacagccagctgcacaagccgggcgaaggccagcacaagaccctgccgccactctatgccggacgcgacaaggatggccgcatggtatttgccgacgaccccgacatcccgcgcaatccggtcgtgctgcgtgcgctgaaccaggcgcgcaaggttgtcaacgctctggtccgacgctacggttcgccgatggcggtcaacattgaaatggcccgcgacctgtcgcgtccattggacgagcggaacaagatcaagaaagaacaggaggaataccaggcacgcaatgaaagggacaaagccttgttcgttgaagagtttggacagccacccgctggtggtgaattcgagaaatttcgtctctatcgcgagcaactggggaagtgcgcctattcacagcaagcgatcgatcttggacgacttctggaagccggttatacagaaatcgaccacgccctgccctactcgcgaagtttcgataacagcaagaacaataaagtgctggtgcttacccgagaaaaccgcgacaagagtgaccgcaccccctatgaatatctcggaggcgcgaccaatgaaccgcgctggctccagttcgtggcatttgtcgaatccaacaaagcctaccgcctcgccaaacgcagccgcctgctgcgaaaggatttcggcccgaaagaatccgaggacttcaaagaacgcaatctcaacgacacccgctacatctgccgcttcttcaaaaatttcgttgagcaccacctgaaactggatgcacgcagcgacgccaagcgctgcgtcgtactgagcggacaaatgaccgcctttctgcgcgcacgttggggcatcaacaagattcgcagtgaaagcgaccgtcatcacgcgctcgatgccgccgtggtcgcggcgtgcacacatggcatggtcaagcgcctggccgattacgcaaagaaccgggaactggcgccggtcagaggcggatttgtcgacgccagcaccggagagatcgtcggaaaacagtacttccccgaaccatggccgcactttcaccacgaacttgaggcacgggtgaagatcgacgatctcgagttgctgcgcgaagagatgactcgcctcggcagctatgacgatgccgcactggatgcgctgcgaccactctttgtttctcgcgccgttcagagacgcaatggcggtgcagcgcacaaagacaccatatacgcccaaccagagcgattgtgtgcaacaggcggcgtaacgcaaaaggtgccgctgggcagcctgacgttgaaggatctcgagaatctcgtcgatccgcaccgcaacgaaaaactctatgcggcaatccgtgcccgcctggaggcacatggcggaaagggtgacaaggctttccctgccagcgatccactccgaaaacccgaccgcgaaggcaacccgacaggcccgatcgtgcgcgctgtgacgttggtgatcgacaaactgtcaggcattccggtacgtggcggaatcgccaaaaacgacaccatgttgcgtgtagatgtgtttacaaaggcagcaaagttccacttggttccggtctacgttcaccaccgtgtcaaaggcttgccgaaccgggcaattgttcaagcaaaagatgagtctgactggaacctgattgacgatagctacgagtggcttttctcgttacacccaaatgatctaattcgcataacccagaaaggaaaaaccccaattgtcggctattacgcgggatgcgaccgcgcaaccgggaatttggcagtctggattcatgatcgaaactccgctgtggggaatgacggactgattcgcggcatcggtgtcaaaaccgcgctaaacgtcgaaaagtttcacgtcgacatactcggcaacattttccccgccaaaccggagccgcgccgtgggttggcgtagcgtgatgatttcccggccagccaggctgcgccgggagcatttttccctcgctattgaacaggagcaaacggcctttgtgcccttcgaggacattgcggtcatcgtgctcgatcaccgggaaatcacactctctcatccggtactttccgcgtgtgccgaatacggaatcggcctctacgccaccggccaaaaccaccagccgagcggagtcttcctgccctttctctcacattcccgcactacgcgcctgatgcgcaagcaactcgacatcggcaaacccgtggccaagcaggcttgggcgaacattgtcaggcgcaagattgaaaatcaggcgcaaagcctgaacctgtccaagaaacacggcgtggatcgcatgaaatcctatgccaaccgcgtccgctccggcgacccagaccatctcgaagggcaggcggcagcctactacttcacccaactatttggtcaaggattccaccgcgccgaagaatgctggaccaacgctgcgcttgattatggctacgccgtatttcgtggagccatcgcccgcggtctggttgcacacggcctgcatcctcctatcggcttgtttcacgccagcgaacaaaacgcgttcaatctggccgacgatctgatcgagcctttccgccccttggttgaccttcatgtccacaaccaccatgccgctacggaaggcggcctggcgccgcaggacaaggcttcgctggtcgccctgcttaacgtggatgtggccatgccacaaggcaggatgtcagcgctttcggcaatcgagtatgctgtggagagtctcgcccgcctctacgaacaggatgatagcaatctcgatctacccaaattgatcggcctgcacgcgcacgtgctggaatgctgaggcatgagccgggagacgcgacgtttcatgcgactgctcgtctttttcgacctgcccatggttaccaagaccgaaaaacgcgcctacgcacagttccgccgcttcttgctcaacgatgggtacgacatgatccagtggtccgtctatggacgactgctcaatggcaacgacgatcaggagaaacacctcaagcgcctggtcgataatttgccgccagccggatcggtgcgctgcatgactgtgaccgaaaagcagtttgccggcatccgcctactggtcggaatgcccttgtttcaggaaaaaaaggtttcggctaatcagatgctgctcttttgacgagcgattccaacaaaaaaattccccgctcagccaggctgggcggggaatcggtcacagccaaattgtagctttccggggtgagagagggagctacaacccgggcatcacgcatgcgcagaatgctgcgaattgtagctttccggggtgagagagggagctacaaccgaggcattgacagggtatggcttacctgaaattgtagctttccggggtgagagagggagctacaactcaggaacgccgtatctatacgcacaatgcaattgtagctttccggggtgagagagggagctacaactgctggggccaaggcaggccaaagctccacaattgtagctttccggggtgagagagggagctacaacaatcgccgtgcaagacatggaagcggccagaattgtagctttccggggtgagagagggagctacaaccccaaccagttggcaggcctgccagcgtaaaattgtagctttccggggtgagagagggagctacaacacgaaacaggcaggaaacccgcacggatagaattgtagctttccggggtgagagagggagctacaacctggcgacggtggcaggcaataccgggcgcaattgtagctttccggggtgagagagggagctacaaccgcattcggcctgtgctccgatccagtaggaattgtagctttccggggtgagagagggagctacaacagaaaacttctatacagaaactcgcgtatgaattgtagctttccggggtgagagagggagctacaaccttctccgaacgccaggcgaaggaagcgaaaattgtagctttccggggtgagagagggagctacaacttgccagatgacgggaatcaaatttgaataaattgtagctttccggggtgagagagggagctacaacccatatgcggcccgtacctatgcccgccgtaattgtagctttccggggtgagagagggagctacaacacgtctgggtaaatcaaccactcccgaggaaattgtagctttccggggtgagagagggagctacaacaacagcgaagccgtgtggtcggaaggcaaaaattgtagctttccggggtgagagagggagctacaacccattgagctgggcgatggcaaggacgaaaaattgtagctttccggggtgagagagggagctacaactcatacgcgcaaggttaggcgacgaggccgaattgtagctttccggggtgagagagggagctacaacttcgacctcgcagacaaactcggcaccggcaattgtagctttccggggtgagagagggagctacaacattcttttcgatgattgcgattttcccagtaattgtagctttccggggtgagagagggagctacaacttgcctggcgcaacaggtattgcaccttggaattgtagctttccggggtgagagagggagctacaaccgcccaacaggtcgaacagttgggcgaaaaaattgtagctttccggggtgagagagggagctacaaccggcggtacgcggcgtggtcttgccgtcataaattgtagctttccggggtgagagagggagctacaacatcatgagccttacgtcgcaacaggaagccaattgtagctttccggggtgagagagggagctacaaccttatgcatcagcaggcgtaacgactttccaattgtagctttccggggtgagagagggagctacaaccggcttcacgctcgacccatgcagcgacggaattgtagctttccggggtgagagagggagctacaactttgcgtgccgcgctacttaatagcgcaccaattgtagctttccggggtgagagagggagctacaacatcatgagccttacgtcgcaacaggaagccaattgtagctttccggggtgagagagggagctacaaccctgtcgtaccgttccacctgcttccgctgaattgtagctttccggggtgagagagggagctacaactttcggcttcttcttcgctgattagcgggtaattgtagctttccggggtgagagagggagctacaaccgtcggcgtcgtatcagggcggcgcgcaagaattgtagctttccggggtgagagagggagctacaaccacgtgttttgatagccagcttgcctgggtaattgtagctttccggggtgagagagggagctacaaccactgtcctcgtgtgtcaatcaacgtggcgattgtagctttccggggtgagagagggagctacaacnnnnnnnnnnnnnnnnnnnnnnnnnnnnnnnnnnnnnnnnnnnnnnnnnnnnnnnnnnnnnnnngagagagggagctacaactgaacctcatcccactcccctacaagatccaattgtagctttccggggtgagagagggagctacaacccgcatcgcttgcgaagcggcgatcttcctaattgtagctttccggggtgagagagggagctacaacgcccgccaagttcggattcgactccgtcaaaattgtagctttccggggtgagagagggagctacggctaccctggccgatgcagccgaaccaccttggcgagaccgccttgtgcggtttcgcggtaaccggaaccgagatcgcggccggtttcccacatggtcctgaccacatcgtcgaaggaaacgacatgcccgccgtccgacagcagcgcataagtcgcgcaatccaccgcgcgcacggccgccatggcgttgcgttcgatgcaggggatttgcacgaacccgtcgataggatcgcaggtgaggccgaggtggtgttccagccccatttcggcggcatattcgatctggcgcagcgaaccgcccagcagttgcgtcgcggcggcagcagccatcgcgcaggccgtgcccacctcgccctggcagccgacttccgcacctgatatcgaggcgttccgcttgaccagattaccgatcagaccggccgtggccaacgcccgcaggatcgcctcgtccgatgcgccctgatggtgccgcgcgaaatacagcacgctgggcaggacaccgcacgatccgcaggtcggcgccgtgacgacttcgccgccacctgcgttctcttccgacaccgccagtgcataggcgaacaacatggcggtctgccgagtcgggcccccgccgttcatggcctcggctttggcgtaatagcttttggcgcggcgcttcaacccgagcgcgcccggtagcacgccttcggcggccaagccccggtccaccgtgccttgcatggcacgccagatattccgcaagaaatccagaatctcgccgccctcgttgcgaatgacgagatcgggcagcgtcagtgcctcgcgctcgcataccgccagaatctcctgcaatgcggcatagggatagaccggggtggcggcgtcggaatccgccacctcgcccgccagtgcaccgccgccgatcgagaacgcggtgtacgaccgcacgacccgatcttcggcatcgagcgcctcgaaacgcataccgttcgggtggcgaggcaagctgatatgggccgcccagacgatctccaccggcagcggcgagaatggcccggtcaccgcgatgtcggtcaaatgccctcgtccggtggcggccaggctgccgaagagatgcacgcgaatgcccgccacattggccggcagggtttgccgaaacgcttccgccgccaggcgcggccccatggtgtggctgctggagggaccgattccgatgcggtagagctctttgagggatttcatgaacagtgcctggccaccatggtgtatttcattcgacagcttgcgcgccaaaaagctcaaacgcgctcaaaattgccgaattctatgcctttgccgcgaaccagtggccaagcacggcctggagttctgtcgggttcaccggtttggcgagaacgaggtacccctgttcctccgccaccgccaactcgggcgattccagttcaccgctgatcatcgcgccgcttgccgccggcaaacgctcgagcagggcacgtaacacttcaaatccgctctcgcccgagcgcaggcgctgatcgcagaaaatggcgtccggcgtcaatccggcgtcgagcagtccaaaagcctggcgcccagaatcggcacaggcgaccttcagcccccaggcatccagcatggtcgcccaggcgctccggaccaagggatcgtcatcgatgacaagacagctccccgaccagagcggctgcgcttgagtgctggcgggttcatgcaaacctgcactggctggtggttgcgccagggtagttgccggcagttgtatccagaaacaagatccgctgccctcgcgggagcggaatccgtattcagctcccatcagcgcacaacatcgcgcgacaacggccaaccccaggccatgcccggcgctgtcgatatcccaggcatgttcgttgcggaaatagggcgaaaaaatgttggcgctgtcgccggtcgcgataccgataccgctatcccacacctcgcatcgccagccaccgcctcgtcgccgtatggcgagcagaataccgccctctcgcgtatatcgtagggcgttgtgcagcaggttgctgagcgactggcgcaacagtgtcgtatcggccagcgcaacagcaaggcccgccgggagatggacgcgaagttccaaggcacgattgcgcgcctcctcgcggaagatggtcgccacggtggtcacgacctcggccagattgatggcttcggtcttgatctgcacgcgaccgctctcgattctcgacaggtcgagcaaggcattgaacatttgggtcgccgaacgcacgctttgccgcaaatcagccaaggcttgatggagcgctggatcccggttgttccgcgaaatcgactcgatcaggaaacccatggcatgcaccggctggcgcagatcgtggctggccgtggtcaggaacaggttcatgtcgtatagggctttttcggcttgctcctgaagcacgatgtttttcaggaaaaactggtgtgaaatcgccgagtgcctgagcatggtcagggtgtgaagcaaagccaacggaaggacgtagtgccagtgatcaggaaaactgaagggcaacagcatcgtcacgcccccccagccggtcaggaaaaaacatcggaacaccgacagcacaggcgacgaatgcacggaattcccggcgacgatggccgcgaccgcacaaaaatagaccagttggaactcgaaagaggcatggccggccgtcagcaaaggggggatgaccatactgaagccgtaacctagcgctatgccctgcacgactggcaaccatcggcgccaagtcgttacgtgacgccgttctgcacgctcacgctggtagcgtcgatataaactgcgaagcgccagaaagcctgcgagataccacccagaccatagcatcagcacgagcggattctggccaaggtggatgtaccaggcaataaagggcaggccaacgatgaccatcgccccaaaaccgtaattgatgcgcgagaacgcgacatcgagcagccccactcgtccggccgggctgatactggcgtagctcagttcattggtgttgtctgccccagggctcttatcgggctcaggcatcgatccgctttcctcgcagccgtgtaatcaattcgatgcggttacgcacccccagccgctcaaaaatgccgctcacatgttccttgactgtttgttcagtcagcgaaagcatttgcgcaatacgtttgttgggcaaccccttgagcatcaacgccagcacctcgccctggcgaggcgtcagacccagctcggcggcactcagaggaagttctcgcgcctcctcgccgcccaggctggcgcagggggcgtcatcaaaccagacctcgccacgcaaaatggccgagacagccaacgcaaagtgggccggttcgacatgtttgggcaggaatccatcgactgccagccgacgcaccttgtcgcggatggccacgtcgccatcgccgctgatcaccagcaggcgggtcgccggataatcccggcgaagtctttccagaaccggcaaggccgtaccgcccggtagccagaaatcgaccagggccaaagtcggcgccccatgtctttcgatgtgctcccagagatcgctcgcccggcagatcgcgtcggcctgcgcacacccgcagtaggcacgcagatagtccgcaatcccgcgcgcgaccagagggtgatcatcaataaccagggcagaagtgttgtcggtaggatccatgcgggccaatcaatagatacggcatcagagcggcgaaacgggagagcgccagggtcacagcgtatcaaaagcgccgcgcaacatcacccctaccagagtcgggtttccgacaaccttgcgctgcccaagaatgataccgcgccctgcaccgaaccccagtgtacgtcagcgacatatgtatcagcgggcgcagcaggaccggaacatcagttcgccggtcaatagcgtcgccgcgaggtgttccgcctgtcggaacccctgatgaacaacgcgagaccccaatggaaggaggtaaagcatgaactggctgctgaggctacgcgcaaaactcgcctggatctggcgcgtcgggttgatagatcgaacaaccgcctttcagtgggaaatggaggccgcgcgggtggaagcgctgatgcaagccgcgccacgcggccgaagaaaccaaaccaggtgaacctgggccgagtatcaccgcccctttctgtctcaggagatagtatgaaaacgatcaaccgagtagccctgtgtgtggcgctggccacgacagtgaacgcgccgacactcagccttgcccagagtatcccgttgccgccgcccgacagtaccgacccggtaaccacaaagctgatgcagggatttcccccgccgccagacaagatcgtccggctcgatagcgtgctgaaatatccgaacgcgcgctgggtggttcaaaacctgcggcaactcggcccgacaacccagatatggcgcggaaacaccccgcgcagcaccttcggtgtcaaaccacgcgatctcgatccgcttaccttcgagggtgccgggggcgagcggatttcaatctcggattggcaacggaacacctatacggacgccctgctggtgctgcacaaggggcgaatcgtctacgaaaaatactatgccggacttcaaccccatcagacgcatgttctttggtcgatgagcaaatcgctcaccgggctcctggccaccgaactgatcaaggaaggccgcctggaccccaacgccgtggtatcgagctatctcccggaactggccgccagcgcatatggcgacgccacggtgcaacaggtgctcgacatgacgaccggcgtgaaatatgcggaggatttcagcaacaccggttccgccgtatttcagtacctgatcgcctcgggtctggtacctgcgcccgcccaatatcctggtgcaaggaatctcactgagtttctggccaccctcaaaaaagagggcgaacacggtctgggattcaactacaagtcagcggataccgaagtcatcggctgggtactccagcgaatcaccggcaagagttttgccaccctgatatcggaacggctctggatccctctgggcgccgaggaagatgcctccgtctggaatgacgcgatcgggatgcaagctaccagcgtcggcataagcgccaccttgcgcgatctggggcgactgggcgaaatgctccgctcagacggccagttcaacggcaaacaggtggttgcaaaatcgaccgttgcggaactgcgaaaaggcgccgaccccgacaaattcagggcggccaagccccctcagcgcgacggctactcctaccacaatcactggtggatttcgcacgacaaggacggcacttatgaagccaaaggtttgatggggcaacacatccacatcaatcctgccgccggggtcgtcatcgtcaagctgtcttcgcacccggtgcccaataccctgtttacacacacactggaccgccaggcgttcgccgccatcgccgccgctctgcaataacgcacggacaccccgaaaggcacgggacgaccgatgggggtgagcggatcgaggctcaccccctaccagagtcgggttcccgaaggcagggcgctagctgagaatctagtggtgttccgccaagctgcctcacgccattgtcacggtccgacataggcgccgtgcagcccgaggcgcttctccgcaaactcgcgaagataacgagcacatcgatttgctgaccttggttgagccatatgtggccgaggtcggtgctccatagatatcccactcaaactcaatcccctcacggaaaggaaacaccatgaacgctcacagattgccggcgctggtcgcattctcgtcgctgactgccattttgattgccatgatcgctttcatctcgctgacctcgctgtcgggctgcgccagcaacccgtccaacggcgccggacaggacaatagcaaggccattaaaaagatttcgatggccatcggcgtcgaaaccagcgaattcgccatcgtgaaacaacaggccagcgatgctcccaccggctacgacggaatcgaatatacggtgaagacaacctcgggaaggacctacaagtgcgaaatcctggaaccctccggtgtcggcaaaatcgcgactctgggcatggccagcggtgcggacgcaatgtgtacggactttacgccgggcagcaaggataagggccgtgccgacaagccggtttgcaacgccctgctcaaggct

SEQ ID NO: 2876 - DNA, 23333 bp, synthetic construct
  source 1..23333: mol_type = other DNA
  variation 14557..19711: note = note, n is a, c, g, or t
  misc_feature 1..23333: note = Synthetic
tttccagaccgatcccgcgcgcgacgccagctcactggcgctgcacgccgccctgccggtgcgcgccggccactacgacgaactgcgcctgcccgccggcacgaccggcaccgcggccctgcggccggcctgggcccgcttcttcgaactgctggaccccaaagggctgcgcgagatgaaccgcaatgccgaggctgtgtcgcggcagatccaggaaaacggcatcacctacaacatctacgccgatgccgacggccccacgcgcccctggtcgctggatctgctgcccttcatcatcgaccaggacgactggcgcctgatcgaacgcggcctgatgcagcgggccagcctgctcaaccagatcatggccgatatttacggcccgcagaccctgctggcccagggcctgctgccgccggccctggtgcagggccaccccggctacctgcgcccgctgcgcggctataccccgcccggcggggtgtatctgcacatcgtggccttcgacctggcgcgcaacagcgacggcaactggcgcgtggtctcgcagcgcacccaggcgccctccggcctgggctatctgctcgagaaccgcatcaccatttccagcatgttccccgaggccttcaagcaactgcgcgtgcagcgcctggcgaccagctatcgccggctgatcgacatgctgcaccagctaagcccggccagcgccgacggcgcgcccccgcgcatcgcgctcctgacccccggcccctacaacgaaacctattttgagcagagttacctcgcgcgctatctgggcctgaccctggtcgaaggcagcgacctgctggtgcgcgacgaccagctctttctcaaaaccctgcacggcctggagcgcgtgcacgccctgctgcggcgcctggacgacgatttctgcgatccgctggaactgcgctcggactcggcgctgggcatccccggcctgctgcaggccatgcgcgccggcaacgtgctggtggccaacgcgctgggcacggggccgctggaatcgccggccctgcacggctttctgcccgccatctccaagcgcctgaccggcacccccctcctgctgccttcgctgcattcgtggtggtgcggcgaggccgccgcctgcgagcaggcgctgcccatgctggaccgcgcggtcatcaagtccacctaccccggcagccgccagcgcaagggcttcgaatcgcagatcggcgccggcgccgacgagaagcaattgcgggcattgcgcgcgcgcatcgagcaatcgcccgatgcgcataccgtgcaagcctacctgcccctgtcgcacgcccccacctggcacaaaagccgcatcgtgccgcgcgcggccatggtgcggctgttcgccctggccgacgggcagggcggctggcacgtgctgcccggcgggctcacacgcatcgccaaccgccagcagcgcatcgtgtccatgcagcgcggcggcagcagcatggacacctgggtcaccaccgacggcccggtcgacccgttctcaatgcagcccgcctcgatgcggcccgaagacatcgcccaggtacgccggccggtttccagccgcgccgccgagaacctgttctggatgggccgttataccgaacgcatcgaaaacgacgcgcgcctggccaacgcgacgctcggctggctcaacggcgatctgaaccccgaacctctgtccggcgcattggccaggctgtgcatgcgcagcggcctgatgccggccgagccgccgcgctcgatccgcgtgttcgagcacacgctggtggccgagctcgcgtcccgcgatccgcagcgcggcttcggccgcaacctgtcctcgcttacccacgcggccggccagatccgcgaccggctctcgcccgaacactggcaactgatcgtctcggcgggcgaccgctaccaccgcctgatcgcaggcgaccgctgcgacacggccgccgcactcgaagacgcggaccaggacgcaccgccgcgcaccaccgccgacgtgcagcgcggcctgcgccggctcaaccgccagatactctccatcacgggcgcgcagaccgaccacatgacacgcgacgacggctggcgcctgctcactatcggccgccacaccgaacgcctggccaccatggccggcatgctggccaccctgttcgaggacaatgccatcctgcgcgatggcggcttcaacctgctgctgcaactgttcgacagctccatcacctatcgcgcgtattaccagggccggcacgaagtccccgcgctgctcaacctgctggcgctcgatgccaacaatccgcgctcgccggcctgttcactgaaaatgctgcgcaacacgctgccgcgcctgcccggcaacagcgccgacctgccgggcctgctgcccgagcccgatctgggcctgaccttgtcacggctatgccagcgcgacgaacacggccgctacgcccaggtgctggccctggcgagccgcctggaagacgccgcctccgtcctgtccgacgaaatcagccgacgctacttcagccactcggccgacgtcgaccaaagcctggccgccacctaggccctgccatgaatacgcccgcatcccgccccctggccgtggtccacgagacccgctaccgatacgacgcaccggtcgaactggcgcatcacctgagctatctgcgtccacgccaagaccaggcccagacggtcgaggtccacaccctggatatcctcccggtgcccggccgcgtgcagcaagacctggacgcccagggcaactggcgcagcatcttcgccctgtcggctccgcacgaagaactggtcgtgcgcgcatgcagccgcgtcctcgtgcgcgggcgccaccgcgacctggacccggccgccggcctgtcctgggaggcggccacggcgcgcctgcgctaccgtgccggcgcgccctacgcgcccgaagccgaatacgcgttcccctcgccctacgtgccactgcacggcctgctgcgcgactacgcgctggaatcgttcacgcccggccggccggtcgcgcaagccgccatcgatctgatgcatcgcctgcacgcccgcttcacctacgcgccggccagcacgcagctcaccacgcccatgatcgaagccttcgaggaaaagcgcggcgtctgccaggactacgcccacgtcatgctgggctgcctgcgcgcgctgggcctggcggcgcgctatgtcagcggctacctgctgtccaagccgcccgcgggccggccgcgcctgatcggcgccgatgcctcgcatgcctggctggcggtgcattgcccgggattgccggacaacggcggctggctcgacctggaccccaccaacgacctgattccaagcaccgagcacgtcatcctggcctacgggcgcgactacggcgacgtgacgccgctgcgcggtgtgatccgcggcggcggcgggcacgagctgagcgtgcacgtgaccgtgatgccctgggacgacgcgccggcgcagttgggcctgccgcaatagcgccgccccgcaccggcatcgggcgccggcacggcggcacggcggcatcacaacaaaactgtcatatctgctacatatccaggaattagcatctgctcctggctggttcgatagcgtcgcacagcatgcgcagcacagcaccctcccctctccatcgcaggatcacaccgacaggccaccgccgcgcgggcgatctgtgcgacaccgtgccaaccatcgatgcgtcgagcaccaacgaattggtcatggaactgttttcggcccatcgcggcatgatcagcctggcggtgatcgaagaccagcgccccatcggcctgatcaaccgcaacatcttcctgctgcagatgagcaagcccttccatcgggagctctacgacaagaaaagctgcatcgcattcatggacaaggaaccgctcatcgtcgatgaggacatggatatcgacaccctcaccggcaggacgatcgaatacggggaaaaggcgctgaccgacggtttcatcgtcacccgcgaaaaccgcttcgtcggcctgggcaacggcctgagtctcatgcgcgcggtggccggaatacaggccgagaaaaaccgccagaccatgcagagcatcgaatacgccagcgtgatccagcgcgccatgctgcgcgcgccgagcgaaaccctggcggcggcggcaaaggattgcgcgttggcctgggaaccgcgcgatgtggtcggcggagatttctatcatttttcggctcacgagaacggctggttcggcgccgtggccgactgcaccggccacggcgtgcccggcgccttcatgaccctgatcgcatcgtcggccttgatcaaggccatcgagcagctcggcccgcgcgatccggcggcgctcctggccgcggtgaaccgcagcgtcaagacgctgttgagccaggtgcgcgacagcgtcagcacccctcagtcggacgacggcctggatgccgccttcttctggttcgacgcgcaacgccgcgaactgtgcttttccggcgcgcgcatcgccatgcatatcctcaagccgggccaggagcagttcgaagtcttgccgggccagcgcaagggcgtgggctatatcgacagccctgccgatcacgtctggacgcaaagcaccaccgcactgcccgagggcagcctgctcttcatcacgaccgacggattgacggatcagatcggaggcccgcgtcagatcgcctttggcaagcgccgcaccgccgacatcatcctggcgcatcgcgccgatcccgccacgctcatctgcgaaaaactccagcaggcgctggcgcaatggcagaacacaggccgagaacctcaaaaccggcgcgacgacctcaccctgtttttcgcccgtatttagcgcctgccgccactaacaggccctagcattaccgaggaccatcaagcatcatgacgagcccccagcccattttcggcaagaacgaagaattcttcacattggcccagcgccgcaatgtgctcttctatcacaagggatatttctcgcacaatatcatcgcggccatggccgaggtggtaaggctgcagctcgaagtcaccggcattgccgggccgacgcgccgcaggctcttttcgtccttcgtcgaactggcgcagaacatcatgcattattcgtccgatgccctgccgccggagggcaccgccccaggcatcgcgcgcgcgggcaccgtatgcatcagcgtcgagaacggacattacctgatgctgtgcatcaaccccatggcgacggccagcgtggaggcgctgcacgacaagctcgaacccctgcgcagcatgacgctggaccagatcaagcaggcctacaaggtatccttgcgcgaagaagcaccggaaagcagcaaaggcgccgggctgggctttctcaccatggcgcgcgacgcgagcgcgccactggaattcgctttccgcccgctggacgacgacccagacacgacgcttttccacctgaaagccattatctaggcagttatacgcgcatggaaaacctctacatcgccgctacggcaacgtcacccgaaatcgattttcgattcgaccagaaccagctttcgatcaccggcgaatcctatccggaaaactccgcggcgttctatgcgccgatcatccaatccttgaatgcctacctggccctgcgcgagaacgccgaaatcgtcgtgaatgtcgcgctgtcgtatttcaacagctccagcaccaagatgctgttcagcatcttcgaggcgctggacctggccgcacaggccggcaacacggtgctgctcaactggtaccacgacgacgaggacgagacgatcctggagttcggccaggagctgcaggccgacttcaccgcgatcgaaatcagctattgccccgtttccgcgcaataatcatccatgacatccagcgcctcttcaaacctctcggcaggaaatccgccggatctcttcgaaagcgagatgcaggtgctgcgcaaggcccgcgaaatccacgacgcgtccgatgccggcgaacagatctaccggcaggcgctgggcgaactgatcggacatttcgagcgcatgatgcgccagacgcggcgcatgatcggccacagcgaccgcgccgagcgcgagatgcacgagctcaacatccagctgcagacgctcacccaaaagctcgaataccacgcctcccacgacgctttgacgggcattttcaaccgccgggcggtcatcgagcagaccaacaaggtcttttccctggaaagcgccgtcatgatcgtgctggacatcgaccatttcaagcgcatcaacgacgagttcggccatcccgtgggcgacagggtcattctgggcgtcaccgagtgcctgcgcggcacgataggcgagacgggcatcgtcggccgcgtgggtggggaagaattcaccgttctgctgccacgcgtgcccgccgaagacgcgctgggcatcgcgcagacgctgcgcacggccatcaccggccacgcattcggcgcgccggtcgagcgccccgttaccgccagtttcggcctgagcgccaatccccgcggcaccgacttcgacacggcttacaaccaggccgacgccgccctgtatgccgccaagcgggctgggcgcaaccgcgtcgaaatcttcgaccctaggctccagacattggcctgagcgcagcggtcagcaagccgggcgcgcttgaagccttgccggtcagcgccttccagatacccagcgcggcatcggcctggttcaaggtatagaaatgcacgcccggcgcgccgccgtcgagcaggcgcgcgcacaagctcgtcaccacatcgtggccaaaggcgcggatggacgccttatcgtcgccgaactcggccaggcgcaggcgtatccagcgcggcacttccgcgccgcaagcgtcggagaaacgcagcagctggctggagttggtgatgggcatgatgcccggcacgatgggcgcgctcacgccggcggcctgcgcgcgctcgacgaaattgaaataggcgtcggcattgaagaaatactgcgtgatggccgagtcggcgcccgcctggatcttggcggcaaagtgcctcagatcgctcgcggcatcccgcgcttgcggatgcatttcgggataggccgccacttcgatatggaaccaatcgccggtttgttcgcggatgaaggccaccaggtcgctggcatgacgcaggtcgccgccgtcgccgcccatgcccgaaggcagatcgccgcgcagcgccaccaggcgcttgatgccctcggacttgtaggcctgcaggatctcgctgagccgggcgcgcgtggaaccgatgcacgacaaatgcggggccgcgtcgcagcccagcgcccgcagcgcgcgcacggcctcgaccgtgccggcctgggtcgaaccgcccgcgccgaaggtaacgctgacgtacttgggctgtaccgccagcagccgcttcgcggtctcgaccaggcgttcgtgcccggccgggtcgcgcggcggaaagaattcaaggctgtaggcaggattcgtatcggtcatgatggccgtcagggaatgatgcgggacaggaggcccgaaataatgctgtagagaaaggcgccgcccacggcccaccagaagccgctgacctgaaagccgcgcaagatggagccggcgagccagaacagcaaggcattgagcacgatcagaaacaggccgagcgtgacgatagtgatgggcagggtgagcagcaccagaaccggcttgaccagcatgttgagcaggcccagcacgagcgccgcgatcaacgccgagccgaagctggcgacggcaatgccgggcaatatgtaggccacgaccagcagggccacggcgttcagtatccagaccaggatcaaattcataacgatgctccttcagggttcttgattgaatgacaaggctgcgtcaaaaaaacaagcttcttgaggcgccgaggctgccctgcgcaattccgatgcgcgccgctggcagcggatgcgttcgcacgccccacgcttgggattgctccgggatccccggcttgcgaagcggcatgccatgcacaccgccccgcctgcatcaataacggtagtgatcggccttgaacggaccttgcaccggcacgccgatgtagtcggcctgctgcggggtcagtgtcgtcagcttcacgcccaacttcttcaaatgcagcatcgcaaccttctcgtccaggtgcttgggcagcacatagacctggcccttggcataggcctcgttgcgcgtgaacagctcgatctgcgcgatggtctggttggcgaaggaggaggacatcacgaacgaaggatggcccgtggcgcagcccaggttcaccaggcggcccttggccagcaggatgatgcgcttgccgtccgggaagatcacgtggtcgacctgcggcttgatctcttcccacttgaggtcttcgatcgaggcgacgtcgatttcgttgtcgaagtgaccgatattgcacacgatggcctggtccttcatggcgtccatgtgcttgcgggtgatgacgttgtagttgccggtggccgagacgaagatgtcggcgtgcgcggccgcctcgtccatggtcacgaccttgtagccttccatcgaggcctgcagggcgcagatcggatcgatctcggtcacccacacctgcgcgcgcagcgcggccagggcctgggcacagcccttgcccacgtcgccgaaacccgccaccacggcgatcttgccggcgatcatcacgtcggtggcgcgcttgatgccgtccaccagcgattcgcggcagccgtacaggttgtcgaacttggacttggtcaccgagtcattgacgttgatggccgcgaaggccaggtcgcccttctgcgacatctggtagaggcgatgcacgccggtggtggtctcttcggtcacgcccttgatctgcgacaggcgggtggaataccacttcggatcgcgctcgagcgtcttcttgatggccgcgaacagcacgcgttcttcttcgctgccggggttggccagcaccgaggcgtcctgctcggccttggtgcccaggtgcagcagcagcgtcgcgtcgccgccgtcgtccaggatcatgttggcttgctcgccgggccattcgaagattttgtgggtgtattcccaatactgttccagcgtctcgcccttgacggcgaacaccggcgtgccggtggcggcgatggccgcggcggcatggtcctgcgtcgagaagatgttgcacgacgcccagcgcacttcggcgcccagagccaccagcgtctcgatcagcacgccggtctggatggtcatgtgcaggctgccggcgacgcgcgcgcccttcaggggctgcttgggtccgaactcttcgcggatggccatcaagccgggcatctcggtttcggcgatggccagttctttgcggccccaatcggctagcgccatgtcggcaacaaggtagtcgatggatttggtcatggtttcgtgctccggtaaagattagtcgacactcggcgtcgcgccggcggcataggaggcacacacatgtacaggcccacctttacgccaatgcgacaaaggtgagcgccgttgctgaaacgcggcagacgccacgttccaaagagacttcctgagcctggcggtcccggaacggatcgagccgtcggtgggaaacgttgcagcgctcctcaggatttaaagattgtactgggggattcggacagcgcaaaactggggtcgattgccgtatacacggaccccaagctcagacaaaatcttgcaaactgctttcacatgtgagatttttatgcgaaaccaggcaaagacgacccccacgctgttccggcaaatgaaaagcccagcggggtcgccgctgggctggatacaggttattcacctttattgtagcaacggctctcaccccggatagctacagtggggtcgattatggaggaggaataaatggctgacaagccttggacaataaatctcgggccactgaccttcggattcgacatcggcgtcgcttcggtcggctggtgcgtcctcgggacgagccgaatcatcgacctaggcgtacgctgtttcgacaaagcggaaactgccgacagaggcgaatctctcaatcttgcccgtcgtaccgcgcggctgatgcgccggcgcttgcgccgacgcgcatggcgcctgaccaagctcgtccgcctcttgaaccaggcagggctaatcgacgatacccaggcattgcaacgccccgcggaaacctccccatggcagttgcgcgtggagggtctcgaccgaaagcttgatccgaatgaatgggcgcgtgtgctgtaccacctttgcaaacaccgtggatttcactggatcagcaaagcggagcaaaagaaagcagagtcggacagcgccgaaggtggccgagtcaagcaaggcctcgccgataccaagcaccgcatgtctgaaaagaactatcgcagcgcagccgaaatggtgctgaccgaattccccgaagcgcagcgcaataagcagggcgaatacaacaaggcgttatcccgattgctgctcggagatgagcttatcttgcttttcgagcgccagcgtgaatacggcaatccacatgcgacgccggacctcgaagcgcgcatcgctggcaatggcgaccgcaagagcggcttgttctgggaacaaaaaccgcccctatccggcaacgacctgctcaaaatgctggggcactgcaccttcgaaaaatccgaataccgcgcccccaaggccagctacgcggcagaacgccatgtctggctgacacggctgaacaatctgcgcatcatcatcgatggcaacgcacgccctctgaatgaagcggaaagacaagccgcgttgcccctgccttataaacaagttggcgattttacgtacaagcagttgaagtccgctttgatcaagcacgggctgattccagacgacacgaagttcgccggcctgtcctatcccatacaacaaggcgaaagcaaaacaaaagaccctgaatccgaacgcctaatcaggcttcccgcttggcaagagctgcgcaaggtcctcaaagacgcagcgctggaaaccgagtggcaaagcattgccagtcaaccagacctgctcgatcagattgcctggacgctcagcgtattcaaagacggtgatgaggtggagcgagagttacgcaaactgcccttacccggcgcagagcgcatgatcgaagcattgagtggaatcagcttcgacaaattccacaacctgtcgttcaaggccttgcgcaagatcgttccgcatatggaagcaggtttgcgttacgacgaagcctgcgtacaggctggctaccaccatagtcaactgttcaagaccggggaaggtcaaaataaattcctgccgccgttttactcgggacgcgataaagacggccgcatggtattcgacgataaggaagacattccgcgcaaccccgtcgtgctgcgctcgctcaatcaggcccgcaaggtcctgaatgcattggtacggaaatacggctctccctccgccgtgcatatcgaaatggcacgagatctatcgcgtccgatggatgaacgcagcaaagtcaagaaagcccaggacgaattccgggaacgcaacgaaaaagacaagcttcgtttcgcggaagacttcaaaattcccgccaaaggccgcgaattcgagaaatatcaactgtatcgcgagcagcacgggaagtgcgcttactctctggaggcactggatctcgattcggtcttgcaagaacccggatacgccgaagtcgatcatgtgctgccctactcccgtagttatgacgacagcaaaaacaacaaagtgctggtgctcagcagggaaaaccgcaataaaggcaaccgtactccctacgaatatctggacggagaaaacgacagcgcgcgctggcacactttcgtcgcctacgttgaaggcaacaagtcctaccgcctcgccaagcgcagccgcctgctgcgcaaaaatttcggcaaggaagaatcccgagatttcatggagcgcaatctcaacgacacgcgctacatatgcaaattcttcaagaactatgtcgaacgccacttgcaactggccgagggcggggataagcgctgcgtcgtactcagtggtcagttgacatcattcctgcgcacacgctggggactgatcaaagtgcgcagcgacagcgaccgccatcacgcactcgatgctgccgtcattgcggcttgcggacatggtctcgtcaaacgcctgtccgattattcacgccgcaaagaactggaacaggccggcaatgtcatcgacatagaaactggagaaatccgcgattcggttcttttagcaaaacttcaacagcacttcccgaagccttgggaattcttccgcgaagaattgctgatccgcttaaaccaggacaatctgactttgctcagagacgaagccgagcgcctcgcttatccgagagaagcgcgggacgccttgcgccccttgtttgtttcccgtgccccgcagcgccgcaatagcggagcggcgcacaaagacaccatctaccgaaaagcgccaacgaaagacgcccctcagcgcgttaccgaaaaggtcaaactttctgacctgactctcaaggacatggagaagctgagcgatccgcatcgtaatgaaaaattgtatgccgccatccgtgctcgtcttgaagcacatggcggcaaaggcgaaaaagcttttccgccgaacaaccccttgtacaagccagaccgtgaaggcaatccgactggccccatagtgcgcaccgtaacgatggtgaacgagaaactatcaggaattccgattcgcggtggagttgccaagaacgatacgatgttgcgcgtggattttttcaggcacaagaaggatgggaaataccatttggtgcctgtttatgtgcatcatgtggtcgcgaaggaattgccgaatcgagcgattgttgcttacaaggatgaaggcgaatggacacccatcgatgagcaaaattttgatttcgagttttccttacatcctaacgatttcctccgcgtgtctctaaaaaatgagacccaacagggttatttcgccggctgtgatcgctcgacaggcgctataggtctatgggcacatgatcgcaacgtcgcaataggaaaagatggtttgatccgaggtgtcggcgtaaaaacggcattgcatgtagaaaaattccacatcgacattctgggcaatatctaccccgccccaccggagaaacgccgtggtctggcgtagtgtaatgatctcccgcccagccaaactgcggcgggaacattactcgcttgccatcgagcaggaagaaaccgccttcgtgcctttcgaggacatcgccgtcattgtcctcaatcatcgcgaaatcacgcttacccacccggttctgtcagcctgcgccgaatacggtatcggactctacgcaaccggcagtaatcaccagccatccggcgttttcctgcctttcctgtcgcactcgcgcaccacgcggatgatgcgcaagcaactcgatatcgcgcgcccgatagccaagcaggcttgggcatccgttgttcacagcaagatcgagaatcaagcgatttgtttgaagctttgcggcaaagagggtgtagagcgcatggagtcctatgccaggcgcatacgttctggcgatccagacaatctggaaggacaagcggccgcgttctatttcccgcaactcttcggggccggctttcaccgcgccgcggaacaatggatcaactcggcgctggactatggatatgcggtactgcgaggcgccataacacgagggctagtggctcatggcctgcaccccaccatcggcttgtttcacgccagcgagcaaaacgccttcaacctcgctgatgatcttatcgaaccctttcgtccccttgtcgatctccatgtggccaaacgacataccgcagccgaaggggaattgagcacggaggataagcaggcgctcgtcgcgctgctcaacattgacgtgggcatgccacaaggaaagatgtccgtgctttctgcggtggaatacgcagcggagagcctcgtcagaacctacgaaacagagcaggccaccttggaattgcccaccttgatcggattgcagcctcaccagctggaatactgatatgggaatcgagacgaggcgctacatgcgattgatcgtcttcttcgatttgccgatggtcaccaaggacgagaaacgcgcctatgttcaatttcgccggtttctgctcaacgacggctacgacatgatccaatggtctgtctatgggcgcatactcaatggcaaagacgcagaaaccaagcacctggcacggctggcagacagcctgcctcccgcaggctccgtacgctgcatgaccgagaggtggcctcgtttgtttggacagtattgtgagatttataagtggaacgcccgaggcagtcatgctgccgatttaatcgctggcagcgtcgcgnnnnnnnnnnnnnnnnnnnnnnnnnnnnnnnnnnnnnnnnnnnnnnnnnnnnnnnnnnnnnnnnnnnnnnnnnnnnnnnnnnnnnnnnnnnnnnnnnnnnnnnnnnnnnnnnnnnnnnnnnnnnnnnnnnnnnnnnnnnnnnnnnnnnnnnnnnnnnnnnnnnnnnnnnnnnnnnnnnnnnnnnnnnnnnnnnnnnnnnnnnnnnnnnnnnnnnnnnnnnnnnnnnnnnnnnnnnnnnnnnnnnnnnnnnnnnnnnnnnnnnnnnnnnnnnnnnnnnnnnnnnnnnnnnnnnnnnnnnnnnnnnnnnnnnnnnnnnnnnnnnnnnnnnnnnnnnnnnnnnnnnnnnnnnnnnnnnnnnnnnnnnnnnnnnnnnnnnnnnnnnnnnnnnnnnnnnnnnnnnnnnnnnnnnnnnnnnnnnnnnnnnnnnnnnnnnnnnnnnnnnnnnnnnnnnnnnnnnnnnnnnnnnnnnnnnnnnnnnnnnnnnnnnnnnnnnnnnnnnnnnnnnnnnnnnnnnnnnnnnnnnnnnnnnnnnnnnnnnnnnnnnnnnnnnnnnnnnnnnnnnnnnnnnnnnnnnnnnnnnnnnnnnnnnnnnnnnnnnnnnnnnnnnnnnnnnnnnnnnnnnnnnnnnnnnnnnnnnnnnnnnnnnnnnnnnnnnnnnnnnnnnnnnnnnnnnnnnnnnnnnnnnnnnnnnnnnnnnnnnnnnnnnnnnnnnnnnnnnnnnnnnnnnnnnnnnnnnnnnnnnnnnnnnnnnnnnnnnnnnnnnnnnnnnnnnnnnnnnnnnnnnnnnnnnnnnnnnnnnnnnnnnnnnnnnnnnnnnnnnnnnnnnnnnnnnnnnnnnnnnnnnnnnnnnnnnnnnnnnnnnnnnnnnnnnnnnnnnnnnnnnnnnnnnnnnnnnnnnnnnnnnnnnnnnnnnnnnnnnnnnnnnnnnnnnnnnnnnnnnnnnnnnnnnnnnnnnnnnnnnnnnnnnnnnnnnnnnnnnnnnnnnnnnnnnnnnnnnnnnnnnnnnnnnnnnnnnnnnnnnnnnnnnnnnnnnnnnnnnnnnnnnnnnnnnnnnnnnnnnnnnnnnnnnnnnnnnnnnnnnnnnnnnnnnnnnnnnnnnnnnnnnnnnnnnnnnnnnnnnnnnnnnnnnnnnnnnnnnnnnnnnnnnnnnnnnnnnnnnnnnnnnnnnnnnnnnnnnnnnnnnnnnnnnnnnnnnnnnnnnnnnnnnnnnnnnnnnnnnnnnnnnnnnnnnnnnnnnnnnnnnnnnnnnnnnnnnnnnnnnnnnnnnnnnnnnnnnnnnnnnnnnnnnnnnnnnnnnnnnnnnnnnnnnnnnnnnnnnnnnnnnnnnnnnnnnnnnnnnnnnnnnnnnnnnnnnnnnnnnnnnnnnnnnnnnnnnnnnnnnnnnnnnnnnnnnnnnnnnnnnnnnnnnnnnnnnnnnnnnnnnnnnnnnnnnnnnnnnnnnnnnnnnnnnnnnnnnnnnnnnnnnnnnnnnnnnnnnnnnnnnnnnnnnnnnnnnnnnnnnnnnnnnnnnnnnnnnnnnnnnnnnnnnnnnnnnnnnnnnnnnnnnnnnnnnnnnnnnnnnnnnnnnnnnnnnnnnnnnnnnnnnnnnnnnnnnnnnnnnnnnnnnnnnnnnnnnnnnnnnnnnnnnnnnnnnnnnnnnnnnnnnnnnnnnnnnnnnnnnnnnnnnnnnnnnnnnnnnnnnnnnnnnnnnnnnnnnnnnnnnnnnnnnnnnnnnnnnnnnnnnnnnnnnnnnnnnnnnnnnnnnnnnnnnnnnnnnnnnnnnnnnnnnnnnnnnnnnnnnnnnnnnnnnnnnnnnnnnnnnnnnnnnnnnnnnnnnnnnnnnnnnnnnnnnnnnnnnnnnnnnnnnnnnnnnnnnnnnnnnnnnnnnnnnnnnnnnnnnnnnnnnnnnnnnnnnnnnnnnnnnnnnnnnnnnnnnnnnnnnnnnnnnnnnnnnnnnnnnnnnnnnnnnnnnnnnnnnnnnnnnnnnnnnnnnnnnnnnnnnnnnnnnnnnnnnnnnnnnnnnnnnnnnnnnnnnnnnnnnnnnnnnnnnnnnnnnnnnnnnnnnnnnnnnnnnnnnnnnnnnnnnnnnnnnnnnnnnnnnnnnnnnnnnnnnnnnnnnnnnnnnnnnnnnnnnnnnnnnnnnnnnnnnnnnnnnnnnnnnnnnnnnnnnnnnnnnnnnnnnnnnnnnnnnnnnnnnnnnnnnnnnnnnnnnnnnnnnnnnnnnnnnnnnnnnnnnnnnnnnnnnnnnnnnnnnnnnnnnnnnnnnnnnnnnnnnnnnnnnnnnnnnnnnnnnnnnnnnnnnnnnnnnnnnnnnnnnnnnnnnnnnnnnnnnnnnnnnnnnnnnnnnnnnnnnnnnnnnnnnnnnnnnnnnnnnnnnnnnnnnnnnnnnnnnnnnnnnnnnnnnnnnnnnnnnnnnnnnnnnnnnnnnnnnnnnnnnnnnnnnnnnnnnnnnnnnnnnnnnnnnnnnnnnnnnnnnnnnnnnnnnnnnnnnnnnnnnnnnnnnnnnnnnnnnnnnnnnnnnnnnnnnnnnnnnnnnnnnnnnnnnnnnnnnnnnnnnnnnnnnnnnnnnnnnnnnnnnnnnnnnnnnnnnnnnnnnnnnnnnnnnnnnnnnnnnnnnnnnnnnnnnnnnnnnnnnnnnnnnnnnnnnnnnnnnnnnnnnnnnnnnnnnnnnnnnnnnnnnnnnnnnnnnnnnnnnnnnnnnnnnnnnnnnnnnnnnnnnnnnnnnnnnnnnnnnnnnnnnnnnnnnnnnnnnnnnnnnnnnnnnnnnnnnnnnnnnnnnnnnnnnnnnnnnnnnnnnnnnnnnnnnnnnnnnnnnnnnnnnnnnnnnnnnnnnnnnnnnnnnnnnnnnnnnnnnnnnnnnnnnnnnnnnnnnnnnnnnnnnnnnnnnnnnnnnnnnnnnnnnnnnnnnnnnnnnnnnnnnnnnnnnnnnnnnnnnnnnnnnnnnnnnnnnnnnnnnnnnnnnnnnnnnnnnnnnnnnnnnnnnnnnnnnnnnnnnnnnnnnnnnnnnnnnnnnnnnnnnnnnnnnnnnnnnnnnnnnnnnnnnnnnnnnnnnnnnnnnnnnnnnnnnnnnnnnnnnnnnnnnnnnnnnnnnnnnnnnnnnnnnnnnnnnnnnnnnnnnnnnnnnnnnnnnnnnnnnnnnnnnnnnnnnnnnnnnnnnnnnnnnnnnnnnnnnnnnnnnnnnnnnnnnnnnnnnnnnnnnnnnnnnnnnnnnnnnnnnnnnnnnnnnnnnnnnnnnnnnnnnnnnnnnnnnnnnnnnnnnnnnnnnnnnnnnnnnnnnnnnnnnnnnnnnnnnnnnnnnnnnnnnnnnnnnnnnnnnnnnnnnnnnnnnnnnnnnnnnnnnnnnnnnnnnnnnnnnnnnnnnnnnnnnnnnnnnnnnnnnnnnnnnnnnnnnnnnnnnnnnnnnnnnnnnnnnnnnnnnnnnnnnnnnnnnnnnnnnnnnnnnnnnnnnnnnnnnnnnnnnnnnnnnnnnnnnnnnnnnnnnnnnnnnnnnnnnnnnnnnnnnnnnnnnnnnnnnnnnnnnnnnnnnnnnnnnnnnnnnnnnnnnnnnnnnnnnnnnnnnnnnnnnnnnnnnnnnnnnnnnnnnnnnnnnnnnnnnnnnnnnnnnnnnnnnnnnnnnnnnnnnnnnnnnnnnnnnnnnnnnnnnnnnnnnnnnnnnnnnnnnnnnnnnnnnnnnnnnnnnnnnnnnnnnnnnnnnnnnnnnnnnnnnnnnnnnnnnnnnnnnnnnnnnnnnnnnnnnnnnnnnnnnnnnnnnnnnnnnnnnnnnnnnnnnnnnnnnnnnnnnnnnnnnnnnnnnnnnnnnnnnnnnnnnnnnnnnnnnnnnnnnnnnnnnnnnnnnnnnnnnnnnnnnnnnnnnnnnnnnnnnnnnnnnnnnnnnnnnnnnnnnnnnnnnnnnnnnnnnnnnnnnnnnnnnnnnnnnnnnnnnnnnnnnnnnnnnnnnnnnnnnnnnnnnnnnnnnnnnnnnnnnnnnnnnnnnnnnnnnnnnnnnnnnnnnnnnnnnnnnnnnnnnnnnnnnnnnnnnnnnnnnnnnnnnnnnnnnnnnnnnnnnnnnnnnnnnnnnnnnnnnnnnnnnnnnnnnnnnnnnnnnnnnnnnnnnnnnnnnnnnnnnnnnnnnnnnnnnnnnnnnnnnnnnnnnnnnnnnnnnnnnnnnnnnnnnnnnnnnnnnnnnnnnnnnnnnnnnnnnnnnnnnnnnnnnnnnnnnnnnnnnnnnnnnnnnnnnnnnnnnnnnnnnnnnnnnnnnnnnnnnnnnnnnnnnnnnnnnnnnnnnnnnnnnnnnnnnnnnnnnnnnnnnnnnnnnnnnnnnnnnnnnnnnnnnnnnnnnnnnnnnnnnnnnnnnnnnnnnnnnnnnnnnnnnnnnnnnnnnnnnnnnnnnnnnnnnnnnnnnnnnnnnnnnnnnnnnnnnnnnnnnnnnnnnnnnnnnnnnnnnnnnnnnnnnnnnnnnnnnnnnnnnnnnnnnnnnnnnnnnnnnnnnnnnnnnnnnnnnnnnnnnnnnnnnnnnnnnnnnnnnnnnnnnnnnnnnnnnnnnnnnnnnnnnnnnnnnnnnnnnnnnnnnnnnnnnnnnnnnnnnnnnnnnnnnnnnnnnnnnnnnnnnnnnnnnnnnnnnnnnnnnnnnnnnnnnnnnnnnnnnnnnnnnnnnnnnnnnnnnnnnnnnnnnnnnnnnnnnnnnnnnnnnnnnnnnnnnnnnnnnnnnnnnnnnnnnnnnnnnnnnnnnnnnnnnnnnnnnnnnnnnnnnnnnnnnnnnnnnnnnnnnnnnnnnnnnnnnnnnnnnnnnnnnnnnnnnnnnnnnnnnnnnnnnnnnnnnnnnnnnnnnnnnnnnnnnnnnnnnnnnnnnnnnnnnnnnnnnnnnnnnnnnnnnnnnnnnnnnnnnnnnnnnnnnnnnnnnnnnnnnnnnnnnnnnnnnnnnnnnnnnnnnnnnnnnnnnnnnnnnnnnnnnnnnnnnnnnnnnnnnnnnnnnnnnnnnnnnnnnnnnnnnnnnnnnnnnnnnnnnnnnnnnnnnnnnnnnnnnnnnnnnnnnnnnnnnnnnnnnnnnnnnnnnnnnnnnnnnnnnnnnnnnnnnnnnnnnnnnnnnnnnnnnnnnnnnnnnnnnnnnnnnnnnnnnnnnnnnnnnnnnnnnnnnnnnnnnnnnnnnnnnnnnnnnnnnnnnnnnnnnnnnnnnnnnnnnnnnnnnnnnnnnnnnnnncaaacgcagcacaattttcaccatgaaaaccgccatcctcccccaagtccgcgtcgagcccgaactgcgtgccgccgccgagtccgtgctgcgggaaggggaaagcctctccatgttcgtcgaagccacggtacgcagcgcggtcgaatatcggcacgctcaggcggagtttcatgcgcgaggcgaagcagcctggcaggagttccagcgcacggggaaatcgcacccggccaagctagtggtcgcggaactgcgtgaaatgctcgatgacaaacgcaagcagctgcaagcacgcgccgcttcttcaaaatgatctatgaggtcgagttcgccccggcagcccgtaaagacctgcatcgcctctatgcctatttgctcgatcgcgccgaaaccctcgaagacctgaatctagccgaacgcgcgattgcagcgattgaaacggcactcgaaacccatcttgccaaaactcctttcatctatcgcaaaagcgataagggcaatagcctgcgccgcgagctgatcatccccttcggcgcgacgggatacgtcgctctctatgagatcgccaaaccgggaaaagtcatggtgcttgccgtccgccatcagcgcgaagaagactttcactgattcgccgagcaaggcgggacgccacgcggaccgcttcaatatcaagccaattaccgacaggttgaggatccgtcgctccggcccgcatctgccgaattccgaatttccttattccaaaaggatattaaggatgtttctttatgcaaataaaatatataaaacgccttgttggcaggcgcacaagttatttggattcaagaatatgaaacgcattcttgcccaggccgcgctggccctgggtctggccgccgcgacgtcggcggcaatgtccgccgcgtcaaccgccgccccgctcgaaatcggttacttgcccattcttccggcggcgcagctgttcgtggcggccggccagaacgccttgcctgccgtcgacggcgcgccgcccaagctcgtgcagttccagagcggtccggccatggtccaggccattctggccggccagctcgacgcggcgtatgtcggcatcggcccggcgctggtggtcgcggccaagggaggggacttcaaggtcgtggcatccaatgtcgtcgagcaggtcagcctggtggcgcggggcgatctggcgccgtacttcgccccgggcagcgacgcgtccacggcctttgcgcgctttgccaaggacaagggccgcctgccggtcatcgccagctatccgcgcggctcggtgcccgaagcggccctgcagtactggctgcgcaagcgcatcaaggccgaccccgcctcctacacgctgatcacgcagggcgaggcgcagatccagcaatcgctgctgaccggcgccgtcgacgcggccgcgattctcgagcccaccatcacctcggtgctggacaaggagcccaaggcgcgcgtggtggcgcacggctccgatctgtttccgcatcagcccggcgcggtgttgctggttcgcggcaagctcatccgcgaacaccccgatctggtcaaggcgctggtggccgagcagatttcggccacggccttgctgcgcgatgatccggccaaggccgcgccgctggtgcaaaaatatgtggccggcggccgcctgccggtcaagctggtcgagcaggccatccgcaattccagggaccagttccaggccgacccgaacgtcatcattcccgccacgcaggcattgcagcaatttctcaaagacacggacgcgcagcaaggcccgctggtcgacttgagccgcctgttcgacacccgcttctatgacgcggcggccaaggccagcgcccagcaatgaaaacccgcttgcgcagtgtgctgtatggcacggctggcgttgtcctgttcgtgctgctgtggaaagcggtgggcgcgttcggctgggtcaatcccgaaacgctgcccgatccctttgccgtgccggccgccttcatggcggaatggcgctcgggacggctgctgccggccgtcggctccagcctgatccattacttctggggcctggggctgggcacgctgatgggcatcgcctgggggctggcggcggctacgctgtaccgcttcgatctgctgcaggcctatctggtgcgcatccttcggcctatcccgcccctggcctgggtggtctttgccattgcctggttcaaggtcactcacgcgggcgccgccttcgtcatctccatcggcgtgttctggatcaactacttcgccacctacggcgcggtgcgccatatcgacccgcgtctctacgaactggcgcgcagcttcggccagggccgctactggcgccgtgcctggagcatcacgctgccggccatcgcccccggcgcgctggccggcatccgcgccggcattggccaggcctggatgacgctgatcgcggccgaactgctgggcgtgcccggcatgggccaggagatgaacgcggcggcgggcgtgggcgactacaacgccgtggtggtctacatgctggcgatttcgctggtctacgcaataagcgatctgatctacgtatggctggaaaaaaaggtgttggcatggcgtccctgatcgaattcgaagccctgggctatacccatcccggcgcggaccaccccgtcatctcggacttgtcgctggacatcgcggccggcgaattcgtggcggtggtgggcggctcgggcgtgggcaagtccaccctgctgcgcctggcggccggcctgatcgagcctgccgcgggtcagatgcgctttacgctgccgcgccggtcgggcagccgccgccgcgccgtggtgttccaggacgggcgtctgctgccgtggcgcagcgtggcgggcaatatcgcctatggcctggaaacgctggatctgccggcaagtgaaaagcgcgcgcgcgtggagcaggccctgcaactgacggggctggccgcactgggcgagcgctggccgcaccagctctcgggcggacaggcgcagcgcgtgggcattgcccgcgccttggccgtcaagcccgatctgctgctgatggacgagcctttcagcgcggtcgatgcgctgacgcgccacaaactgcagaccgagttgatccgcctgtggcaggtgaccggcgcagcggtgctgttcgtgacccacgacatcgacgaagccgtgttcctggccgatcgcgtggtggtgctggacggccatccggcccaggtggcgcagaacctgaccatcgacctgccgcggccgcgcggccgcaaggacccgcgcttcacgggctatgtggagcatctgtctgccgaactgggcctggaagtggaatgacccccgaacgcgagaaggccatgagcggcgccacccctgtccgcctgctgatccacgcgcccaccccgggcgcgcttgaacgtggccgccgcaacctggccaacctgctcaaggccgcgccggatgccgaggtggaactgctcgccaacgccggcgcggtggccgcggccctgcagcaccccgatccgctggacacccatctgcgcctgtgcggcaacaccctgcaggccaatgccctgaacgcgccgcctcctatcgccgtggtt

SEQ ID NO: 2877 - DNA, 23330 bp, synthetic construct
  source 1..23330: mol_type = other DNA
  misc_feature 1..23330: note = Synthetic
gctggtcattcttctgttgctcgccggctgcggcggacaaccggcccgcatcggcgacggcacgccggccggaacggaagccgaaaaatcatcgacgaagacggcgcgcaagcccgccgtgacgctcaagcgcggcggcggttactacaaggacgacggcccgggcgacgacattccggacaacctcgacgacatccccgacgcccagccgcgcctcgaagcgctgcaccgcttcgccaaccggccctacgtcgtcctcggcaaatcctacgtcccggccacccagctacaaccgttcagggagcgtggcatcgccagctggtacggcaagaaattccatggccagaagacctcgatcggcgagccgtacgacatgttctcgatgacggccgcgcacccgacgctggccattccgtcctacgtgcgcgtcaccaacgtcagcaacggcaagtccgtcgtcgtgcgcgtcaccgaccgcggccccttccatgccgaccgtgtcatcgacctctcctatgccgccgcctaccgtctcgattacatcaacaacggcagcacgcaagtcgaagttgaatccatcattcccgacgggtcgctgatgctggcctcagcaccgcccacgccggcggcttcgctgcccaagccaccgacaaccacccagaccgccggccgcgatgaaatcgaaatgctggccagcaaactgagcagcagcgagatcaccttcacgccgcagaccggtaccagtctgccgccggtcgtgcaaaaaggcgtcttcctgcaactcggcgccttttccagcgccgacaacgccgagagcctgcgttcgcacctgtcgcgcgaactcgattggctaaccgaaggcatccagatcaatgccggcggcggcatccatcgcgtgcatctcggcccctatccgagccgggccgacgccgaaaaggtcgccgaaaaaatccgcttggcgctcggctacaagccggcgttcgtaacgcgctaaccgacaagcccctcctttttcccgatctacgctccaaacggccgattgcgaaaataattgcatggcagcggcaagatccccgccactttgcactaccattttcgtttccgcgccgccgtgaatcacaacgatgccaagcctgaactacaaacatttgcgctatttctgggttgttgccaaatcgggcagcatcgcccgcgccagcaaacacctgcatttgacgccacagtcgatcagcggccagcttggcgaattcgagtcggtgctgggcattgaactgttccgtcgcgttggacgaggtctcgaactgaccgaggccggcgaacgcatgctcggctacgccgaacagattttcgcgctcggcgatgaattgatcgattcgctgcgcgaccagtcattttctcaatgcaagccgttccgcatcggcatcgccgactcggtgccgaaaatggtcgcttttcgcctggtcaaaccctcgctctccagcgaggagccgatcaagctgatctgccgcgaaggccgcctgacgacgctactcgccgatctggcggtgcatcggctcgacatggtgatcgccgaccggccgatgcccgagaatctcaacgtgcgcggctacgatcattttctcggcgaaagcgggatcagtttcttcggcaccggggaactgctcgggcaaaccgacctcccctttccgcaactgctcgatggcgcgcccttcctcctgcccggtgccgacgtcgccctgcatacacggctgatgcgctggttcgaagccgaacgcctgcgcccgcgcatcatcggcgagtttgacgacagtgccttgctcaaggctttcggccaggccggtatcggctttttcgctgcaccgtcggcgatcgaaagcgagctcatgcaaaagagcggcatcacggtcatcgggcgcaccgacgccgtgcgcgagcaaatctacgcgatcaccaacgagcgtaaactcagccacccgatcatcgccacgatctgccgcgaggcccagcacacgattttcggtgacgccggttcgccgaactgaagccgcaagacctcccggcaaccacgcaacacacaggatttttcgacgcatccaagccaataatccttgttttctttgcaatcagagttgcgtacccttacgcactctttcctaactcaggagttcaaacatgaaatttctctcgttgctggctgttatctttgcactcgggctgacgctgacagcgggcgatgccgaagccgccaagcgcttcggcggcggtaaatccttcggtatgcaacggcagtcctccacgttcaacaagcagaacgccgcgccggcccccaaccaggccacggcgcccagcgcggccaagagcgcaacccccggaccacaagccgcgccagccaaacgttcctggatggggcctctggccggcctcgccgccggtctcggtctggcggcactggcctcgcacctcggcttcggcgagggattggcgtcgatcatgatgatcgcgttgctggccatggtcgcgatggcggtgatcggcttcttcatgcgccggcgggccgccgcgcagggcggttcccgcgtgagcggtctgcaatacgcgacggcgggcgccaacccgtcggccgacgtcaggccgtttgaatatacggcaccggtcggcgggggatcgtccaacaccgcgagtaccacggataccccgacaggcgcagccatcccggccgatttcgatgccgatgccttcgtccgcaacgccaaggtcaatttcatccgcctgcaggccgcccatgatgccggcaacctcgacgacatccgcgaattcacgacgccggaaatgttcgccgagatcaagatgaacctctccgaacgcggaaacgccgcgcagcagaccgacgtcgtcacgctcgacgcggaagtggtcgaagtcgtccaggaagcgacgcgctacatcgtcagcgtgcggtttaccggcctgattcgtgaggacaaggacgcgacgccggaagcgatcgatgagatctggcaccttaccaaggcaaccagcggctccggcggctgggtcgtggccgggatccagcagacgcaataatcacctcgctacattccgggcaaccgacgtagcttacagcccccggcgccgccctgcggccccgggggtttttttctcgatcagccagcccgtctccaatctcgaatgcattcgtggcgaacgccgtcttttcgccggcatcggattccacgtcgccgccggcgaactcgtttatctgacgggacagaatggctccggaaaaaccagcttgccgcgcctcccgtgcgaactctcgcccccgcgtccggcgacatcttctggcacggcaagccgatcggacaagcgcccatagcaaacgggccggagaaatcccccggcccgcccattcctttgcgcaacaacggaccgtcgtttattccggggccgaattgcggatcaggtagtcgaacgccgagagcgacgccttggcgccttcgcccatggcgatgatgatctgcttgtacggcaccgtcgtgcagtcgccggccgcaaagacacccgccatcgacgtctggccacggttgtcgacctcgatctcaccgcgcggcgagaggttgagcgtccccttgagccaatcggtgttcggcaagaggccgatctgcacgaagatgccttcgagctcgaccttgtgcgagtcgccggtcgcccggtccttgtaaacgaggccgttgaccttttcgccgtcgccggtcacctcggtcgtctgcgcctgtgtgatgaccttgacgttgggcaggctgaacagctttttctgcagcacggaatcggcgcgcaaggccggatcgaattcgagcaaagtcacgtggccaacgataccggccaagtcgatcgccgcttcgacgccggagttgccgccgccgatcaccgccacgcgcttgcccttgaacagcgggccgtcgcagtgcgggcagaaacaaacgccgcgcgccttgtattccttctcgcccggcacgttcatttcgcgccagcgggcgccggtcgacagaatgaccgtcttgctcttcagcgtcgcgccgttcgccaggcgcacttcggtcagtccgtcgggatcgctgaccaacgcctcggcgcgttgcaaattcatgatatccacgtcgtagatgcggacatgctgctcgaggccggcggcgagtttcggcccgtcggtttccttgaccgagatgaagttttcgatcgccagcgtgtcgagcacctggccgccgaaacgctcggcgacgacgccggtgcgcacgcccttgcgtgccgcgtagatcgccgccgctgcaccggctggcccgccgccgacgacaagcacgtcgaacgctgccttcgccgcaatcttttcggcttcgcgcgccgccgcgccggtgtcgatctgggcgacgatctcttcgagcgtcatgcgcccctggccgaacggttcgccattcaggaaaacggtcggcacggccatgatctggcgctgctcaacctcatcctggaacagcgcgccgtcgatcatggcgctgctgatgccgggattgagcacggccatcagattgagcgcctgcacgacatccgggcagttgtggcaggacagggaaatgaaggtctcgaagcggaaggtgccggaaagtgccttgatctgttcgatgaccgccggctcgaccttcggcggatggccgcccgtctgcagcaaagccagaacgagcgaggtgaattcgtgccccatcgggatgccggcgaactggatgcgcgccggttcgccgggacggccgacggagaacgacggacgccgggcatcgtgaccgtcaaagcggaccgccaccttgtccgacagctcggcgatgtcggtcagcaggccccgcacctccccggacttggcgcccgcatcaagcgaggcgacgagttcaatcggttgctgcaatctttcgagataggccttgagttgggtcttgatggcggcgtcgagcattcttttctcccagtgcgacgggtggttttttattgaggaagcattgactgaggggaaaccgtcacctgcggaagcgggactccaggacaactcgctggccccggcatgcgccggggtgacggaggaccttgcgtaacttagatcttgccgacgaggtcgagcgacggcgccagcgtggcgtcgccttcattccacttggccgggcagacttcacccgggtgcgaggcgacgtattgcgcggccttgaccttgcgcaacagttcggaagcgtcgcggccgatgccgccggcgttgatttcgatgatctggatcttgccctgtggatcgatcacgaaggtgccacgctcggcgaggccggcttcctcgatcatcacgccgaagttgcggctgatcacgccggtcgggtcgccaaccatcacgtattcgatcttcttgatcgtttccgagctgtcgtgccatgccttgtgcgtgaagtgcgtgtcggtcgacacgctgtagatctcgacgccgagcttcttgaattcggcgtagttgtcggccagatcgccgagttcggtcgggcagacgaaggtaaagtcggccggatagaagaagaccaccgaccacttgccgcgcagatcggcgtcggagacggcaacaaatttgccgttatggaaggcggtggcgttgaacgggagaacttcggaattgatcagtgatttcatcgttacgactccttgtttcgggttgaaaagtgaagcgacgagtgaatcttaaagacacacaaatcatttaaccaattgattgtttcgataacaacgatagcctttgtttatcgttgttattcaggtgtgacggaacggccatgacacatgccttgtcccaaagcgccgggagcccagatgctacaatcctaacgcgtccccggacaagcttgaaaacccaaccattacagacaatccggaacgcatcgaggttccggcttaccatgacccgccaccagaattcgcacagcgccgtcgcacgtcacatcgggcttgccttgaaccgggcatccatgacacgcggttttgccggcctggcggccttgctggtcggtctctcgctgatcacgaccacggaaaccctgattgccctccgcgccagggagattgcgtcggaaaattcggcgaaaactctggccatcgcctccgaactgcgcgcccgcaccgaccgcgaactcaactccgtgctctatctgtcgagcggcatcgtcggctatctggccgtgcgccacgatcaactcgacagcgaggaaatcaaccgcatcctggaaactgtgcatggcttcgggcgccacatccggaacttttccatcgccatcggcacgcgcatgacttacgtctgcccgcgtgccggaaacgaacaggcgcttggtcgcgattaccgcgacattccggcgcaatggccggctgttcggcaagccgtcgaaaatcaccagacggtactgaccgggccggttaacctggttcagggcggcaccggcctgatttaccgcgttcccgtcatcgtcgagggcaaatactggggcctgctgtcgacggtgatcgacataccctcgctgcaccaagcggtattcgagggaatggaggacaagtctttcgagttcaccctgcgtagcgaagaacggaacggcgcgcccggcggcatcctgtggggacggcccgaactgttcgccgatccggccaccgtgcaactcaaggccgagatgcccagcggcacctggacctacgctgtacgcaacaacgacaagggccgcgccgatctggcatggacaattcgcagcattggctggcttctcgccgtgctgggcggcctctgcgttttcacagtactccgccagcgcagcgaaatggcacgtctggccggctttgacagcctcaccgaactgcccaaccggcgcctgttcgacgaccgcctggaacagagcatccggcgattgatgcggcgcaacggcggacaaatcgccgtcattttcatcgacctcaacggtttcaagcccatcaacgatcgatacgggcataaattcggcgaccgggtactgcacatattcgccacccgactccagcaagaagtacgccttgccgacaccgtctcgcgctgggcaggcgacgaattcgccatcctcattgaggacgccgacgaagccctcctcgcccgcgtgatcgaacgcctgcgcaaacgcgcaagcgccgccttcgaaatcgacggcctttcgcttcacgtcggcgcggcgattggcgcggcgctgtatccggccgaagcggccacccccgccgcactgatcgagctcgccgaccggcgcatgtacgaggacaaagacgaaaagcgcgactgatcgcgcgccacccgttttacgattcgtcaaatccttactcttcttcccggcagcagaccgcgcgcctcgggtacaatggcgggcttgtcaaatcaaagactttccgaggttttcgagtgctcgtcgccgccaacatcaccatgcagttcggggccaagcccctgtttgaaaacgtttccgtcaagtttggcgaaggctttcgttatggcctgatcggcgccaacggcgccggcaagtcgaccttcatgaagatcctcgccggcgagctggagcccaccgccggcaatgtctcgaaggatgcccacgagcgcatggcctatctgcgccaagatcagtttgcctacgaagacatgcgcgttatcgacgtggtcatgatggggcacgagcagatgtgggcctgcatgcaggaaaaggacgcgatctacgccaatccggaggccaccgaagaagacttcatgcacgccgccgaactggaaagcaagttcgccgagtatgacggctacaccgccgaagcacgtgccggcgaattgctgcttggcgtcggcattccgttggaacagcattttggcccgatgagcgaagtcgcgccgggctggaaactgcgcgtgctgctgacgcaggcgctgttcgccaatcccgaaatcctgctgctcgacgaaccgaccaacaacctcgacatcgccaccatccgctggctggagaatgtgatcaacgagcgtaacagcacgatgatcatcatctcccacgaccgtcacttcctgaaccaggtgtgtacgcacatggccgatctggattacggcaagatcaccgtctatccgggcaactacgacgacttcatggaagcctcgacgcaggcgcgcgaacgtcaggcttcggccaacgccaaggccaaggaacgcattgccgaactgcagaccttcgtccgccgcttctcggccaacgcctcgaaagccaagcaggcaaccagccgcatgaagcagatcgacaagctcaagcccgaggacatcaagccgtcgtcgcgccagtacccgtggatccgcttcgaatacgacgagaaggaaaaactgcaccgtctggccgtcgaaatcgaaaagctgacctttgcctacgaaggcagcgagcgcaagattttcaacaacttcgatctggcgctcaatgccggtgaccgtctggccatcatcggtgaaaacggcgtcggcaaatcgacgctgctcaagctgttgatgggcgaactgcaaccacagttcggcaccgtcaaatggaccgaaaaagcgcgcgtcggctattacgcgcaggaccacgccgaggacttcaagggcgataccagcctgaccgagtgggtcgccgagtacgcacgcgccaacgccgccgagggcgaggatctggaaacgctgattcgcggcacgctgggccgtttgctgttctccggcgacgaggtcaagaaatcggtcaacgtcatttccggcggcgaacagggccgcatgatcttcggcaagctgatgctgatgaagaacaacgtgctggtgctcgacgaaccgaccaaccacctggacatggaatcgatcgaatcgctgaacaccgcgctcgaaaaattcaagggcacgctggttttcgtctcgcacgaccgcgagttcgtctcctcgctggcgacgcgcatcctcgaaatccgcatggacggcaccatcgtcaattacctcggtaattacgaagagtatctggccagccaggggattgaataaccacaccgccgcatcgaccatgccacgcgccatctcgtcctcccgcagcggctcgctgacctcccgcgtcaccgaccgcctgcgccgggccatcctcgacgccgaactcgggcttggcgaggcgctttccgaagacaagctcgctaccgccctcggcgtcagccgcacgccggtgcgcgacgcgctgacggcgctgcaggtacaagggctgatcgacatccggccgcagcgcggcagttacgtattcatgccaacgcggcaggatgtcgccgagttgtgcgaattccggaccattctcgaagtgcaggcaatcgcgctcagtagcacccggcacaagcaggcaaccctcgccctgctgcgccaatcgatcgacgaaatggaggccgccaaggcagccaacgattttctcgcggtagcccacgccgatacggactttcatgcgtcgttcgtcgaaaacagcggcaacaagtacctgatcgaggcctatcgcgtctcctcgggccgttttgtcgcgctgcgctcgcatgtcctgctggccgtcggcgacgtgcgcacgcgctcgatgtccgagcactgggcaatcgtcaatgcctttgaacagggcaacatcgccgaagccgaagcggttcttaccgagcacatcgccaaggcgctcgacgccttcgatctggcgctggaacacggcctcctcaccaagccttacacatccctcagcgaatccggtctgacgctgcagatcgacgactgacggccaccgcccgggcagaaaaaccaaacaagaaatgaaaaggcccgacaggtttccctgtcgggccggattcggtcgtcatctttcgatgacaccttattgtagcaacggctctcaccccggaaagctacaaacgggcgtattctacctgcatttgaataatgccaggtcaatttatgcaacacgcgtacacactcggactggatataggcatcgcttccgtcggctggtgcctgcttggtgaaaaccgcctaatcgacttaggcgtccgcgctttcgacaaggcggaaacggccaaggaaggtgatccgctaaacctcacccggcgcatggctcgtctcgcacgccatcgccttgcccaacgcgcatggcgtctaaaaaaactgacacgagaactcaagcgccatggcctgatcgaggataagcggcattttcagccgagcaatccggcagaagtgtctccgtggaaactgcgcgttgaggggttggacagaaagctgaacagagatgagtgggcgcgggttatctatcacctctgcaaacaccggggctttcactgggttagccgtgccgaggaaaaacaggcggaaggtgatgcgaaaggcgaaggcggtcgggtcaaacgtgggctatctggcacacgtcgcctcatggaagaaaaaagctatcgctcggttgccgaaatgttgctcaccgagtttcccaacgcacagcgcaacaaacagggcgaatacacaaaagcgatctctcgtttgctgcttggcgaggaactgaaaacgctgttttctctccagcgcaaattcggcaacccatatacaagcgcccccctggaaatgaccattctgggcaatggtgaccgaaaaaacggcttgttctggcggcagaggccggcactttccggagccgccttgctcaaaatgctgggcaaatgcacatttgaaaaagcagaacaccgcgcgcccaaagccagtttcaccgccgagcgccaggtctggctgacccgactgaacaacctgcgcatcgtgtgcgacggcgtcacccgccccctcaatgctgaagaacgcgcgatagctcttccactgccctatctgcaagccagcgatctgacctacaagcaactgcatagcgcactcgtcaaaaaaggcctgctgccagaatcgttcgaatttgcgggactgcgtgcggccaaagaaggcaaagaccccaagtcggaaaagctgattcgtttgcccgcctggcaggagcttcgcaacaccctgaaaagagccggactggaaaccgaatgggaaagtctcgctggcgcggctaatggcggcaatccgcatacactcgacgacatcgcccgaattctcagtatctacaaagaagacgacgaggcccgcaccgagctggaaaaactggagctgcccaatcgggaaaggatggtcgaagcactgctcgacattcgttttgataagttccatgcgctgtcgctgaaggtgcttcgcaaaattgtcccgttcatggaacaggggcaacgctacgacgaagcctgtgtttccgccggctatcatcacagccagttgcacgcaccggatgaaagcaaattccgcacgttgccgccgctatacaaaggacgagactccgatggccgtatgctttttgctgaagatgctgatattccacgcaatccggtggttttaagagcgttgaatcaggcgcgtaaggttgttaacgcgattgcgcggcgttatggatcgccgatggcggtaaatatcgaaatggcgcgtgatttgtcccggccgcttgatgaacgcaacaagatcaagaaagagcaggacgaataccgcacccgaaatgaacgcgacaaaaccctgttcatcgaagaattcgggcaagagcccaaaggcggcgaattcgagaaatttcgcctttaccgcgaacagctgggcaaatgcgcctattcccaggaggccatcgacctcgaccgtttgctcgaagccggttacgtcgaaatcgaccatgcactcccctactcgcgcagtttcgacgatggcaagaacaacaaagtactcgttctcgcccgggaaaatcgcgacaaaggcaatcgcacaccgtatgaatatcttggcggagcagaaaacagcccgcgctggcagcgatttgtggtgttcgttgaaacaaacaaggcctaccggttagcgaaacgcagccgcttgttgcgcaaggagttcggaagcaaagaggctgaagagttcaaggagcgcaacctgaacgacacccgctacatctgcaaattcttcaaaaaccatgtcgagcgctacctgcaactcgcagacggcagcgaggtcaagcgctgtgtcgttctcagcggacaaatgaccgcctttttgcgtgcgcgctggggaatcaacaaaatccgcagcgagagtgaccgccatcacgcattggacgccgccgtcatcgccgcctgctcgcatggcatggtcaaacgtctggccgattattcacgcacgcgggaattacatcaggttcgtgacggctttatcgacacgaccacaggcgaaatcatcaaccccgccaaattccgacaactgaaacagcactttccggaaccgtggtcgcacttccgccatgagcttgaatcccgtctcaaaacagatgaccgcatgcagcttcgtgccgatatagaacgctttggcacctacgacgatgccgcgctcgacgcactactccccctgttcgtctcccgcgcgccgcaacggcgcaatggcggtgccgcacacaaggacaccatctacgcgcaaccggcacggtttcaacaactaggcagcgtaacgcagaaagtaccgctggccagcctgagcctgaaagacattgacaagctaattgatccgcaccggaacgaaaaactctacgccgccattcgggaacgcctgaatgcacatggaggcaagggagagaaggcttttccacccgacaatccgcttcgtaaacccgaccgggatggaaacccgaccggcccggttgtgcgtagcgtcacgatgctcatcgacaagctctccggcattcctgttcggggcggcatcgcaaaaaacgacagcatgttgcgggtggatgttttcacgaaagcgggcaaattccatctcgtgccagtctatgtgcaccacaaagtgaccgtgttgccaaaccgggcgattgtgcaggccaaggacgaaggcgaatggacgctgatcgacgagacgtttgactggtgtttctcgctttatccgaacgatctggtcagagttacacaaaaaggcaaacaaccaattattggctattactcgagttgccatcgtgggacaggaaatctaaacatttgggtacatgaccgaaatcagcaggtgggcaaagatggaatgcttgaagggattggcgtaaaaaccgccttggcattagagaaactccacgtcgacaccctcggccatatctacccggcgcaaccggagccacgccgtgggctggcgtagcgtaatgatctcccggccagcccgtctgcgtcgggagcacttctcgctcgctatcgagcaggaagaaacggcctttatcccgtttgaagacattgccgtcatcgtcctcaaccaccggcaaatcaacctgacccatccggtgctatctgcctgcgccgaatatgggatcggactctatgcaaccggcgacaaccatcagccgaacggcattttcctgccctttctgtcgcattcgagaacgacgcgcctgatgcgaaagcaactcgacgtcagcaagccgcttgccaaacaggcatgggccaacatcgtccgccgcaagatcgaaaaccaggcggcatgcctacgtttggctgcgcgacagggagcggaccgcctgagttcatacgcgaaccgggttcgctctggcgacgtcgacaatatcgaaggacaagccgccgccttttatttcgcgcaactcttcggccccggtttctaccgtgccgaagagcgctggatcaatgctgcgctcgattatggctacgctgttctccgtggagcaattgcgcgcggccttgtcgcccacggtctgcatcctccgctgggtattttccatgccagcgagcaaaacgccttcaaccttgctgacgacctgatcgaaccatttcgccccgtggtcgatctgcatgttgcaaagaatcccccaagtacagaaggcgatctttcaccaaaagacaaagccgatctggttgccctgctcaatgtcgacctcgcgatgccacagggcaagatgtctgtcatgtcggcaatcgaatacgcagtggagagccttgggcgacttttcgagcaagaagatagccatctcgaattgccttccctgattggactcagaacacacacgctggactattaaacatgagcagggagacgcgacgtttcatgcgactgattgtcttcttcgacctaccgatggtcacaaaaaccgaaaagcgcgcctacgttcaattccggcgcttcttgctcaacgacggttacgacatgatccagtggtccgtctacggtcgcctgctcaatggttcggacgatcaagaaaaacacctcaagcgtttggtagacagccttcctcccgccggctccgtccgttgcatgacagtcactgaaaagcagttcgccggcatccgtctgctcgtcggcatgcgcctttttcaagaaaaaacggtcacagccgaacaaatgctacttttctgacacggatttttcagaaaaaattcccgcccagctcacgccgggcgggaattttggggaggtctattgtagctttccggggtgagagagggagctacaaccttcattcttgcgtactgtgctgctttgcaattgtagctttccggggtgagagagggagctacaaccctcttggctcggcaggttgattgtcaggaattgtagctttccggggtgagagagggagctacaacttcttctcgtagccaacggccagggcaagaattgtagctttccggggtgagagagggagctacaacttatgccaatgcatcagtcgatgtgctggaattgtagctttccggggtgagagagggagctacaacagcgctcgcccttcttgctcatgcgcacctattgtagctttccggggtgagagagggagctacaaccatggcggcaaggggccgaaacctaaatggattgtagctttccggggtgagagagggagctacaacagtcagacagcgaaggcttcgacgaagatgattgtagctttccggggtgagagagggagctacaacacaggagaacgccacccttccgggtgtagtattgtagctttccggggtgagagagggagctacaactacacctataaagtgccgcgtgtggatcgaattgtagctttccggggtgagagagggagctacaactgctccggcgttgtgccgatcttgaaaaacattgtagctttccggggtgagagagggagctacaacaacgcgacggcaagcgagacgactgcgattattgtagctttccggggtgagagagggagctacaacagaccgtttgatggctatctacaacgatcgattgtagctttccggggtgagagagggagctacaacctcaggcgccgtgaccgtcaaatcgttgacattgtagctttccggggtgagagagggagctacaaccgtatcagacgcggatcgcgattcctggggtttgggttctcatttagcgatccccaaaaacacggccaagcaacgttcgacttcgagcagtgcatcagcgtcaatgcgcccgaaggcttggccaaccttatcccgtttcacagtcatggccttgtcgaccatcacctgcgatggcttttggagaccgttcgccgtgctcggccgcaccgtgacacggaacaagggagctgcaacgagcgtgctggtcacgggtagcaccgtgacgctcgcgtgttcgtcaaactgatcggactggattatcaaggcgggacgtggcttgccgaaatcgccttgcatggcgatggtaacgaggtcgccgcgcatcactcagtccagccgtccacgtcggccaaggcctcgtccatgaagtgctgcatatcggtgtcggcggcatctgcctgagccgcgagtcggcattgtcgccggcattcttcggcgaagccgggccggcgcgtgtcgggcacccaaatctgaaccgggcgcagcccggccatgcgcagggctgcgcggtgcttctgcactcgggcgtttacgtgagttgtggccatgttgaacctctttttccatgttacatgaaacactatacaacaaatccagttacatgcaacacacccgagcgtgctacaagctttttcgcacaggccgaagcagcgtaccgcctgaacgggagcagttttgtcccgattttttagcagatcgattgacacactaacacctcagtgattaaatgaactgaggtactagcgctccacaccactcgtgccggttctatccaatcacttctcggaggacttccttgatgaatacgacactcaaaaaaatcgccgcgggtctgttttcggctgccttgttggttgggggctcggccgcattggcgcaggaaaaggtgctgcgcctgactttccagaatcaggccgatcacccgcaaggcatcggctcgcaaaagtttgccgatctggtgaaggaaaagagcggcggcaaaatggccgtaaagctgtttccgggcggcgtgctcggcggcgacttgcaaaccgtcgccgcgctgcagggcggtacgatcgacatgacctcgctcaacgccggtctgctcaatggtctgatcaaggaattcatcgttttcgacctgcccttcctgttcaacaactcgaaggaagccgacgccatcatggaaggcccggtcggccagaagatgtttgaccgcctgccggagaaagggctcgtcggtttgggctatttcgacaacggcttccgcaacctgaccaacagcaagcggccgatcaccaaggtcgaggatatcgccggcctgaagatccgcgtcgtgcagtcgccgatctatatcgacctgttcaacgccctgggcgccaatgccgtgccgatgccgttcggcgagttgtacaccgcgctggagcagaagaccatcgacggccaggaaaacccgccgcgcacgatcgaggcgtccaagctgttcgaggttcagaagtacatgacgctgacccagcacacctacaacccgatggcgttcctgatcagcaagaaggtctgggacaagttcactcccgaagagaagaagatcatcggcgatgccgccaaggaagcgtccgtcttccagcgcaatctgtcgcgcgagcagaaccagcaagcgatcgagcgcatgaagaaagcgggtgtgcaggtcaatgaactgacgccgcaggacgtcgccaagctgcgcgaaaaagccaagccggtgatcgacaagttcgtccagaaggatgtcggcgaagcgctgtacaaggaattcaccgccgaaatcgccaaggtgcgcggcagcaagtaagccgctggaacgggggctggcgtctcagcaggcgctggccgcccccgccaacatctcggacgcaccgcaaatgaaaagacaattctcgctggtatatctcaccgcttcggaactggcgccgccggaaatgatcgagacggcgggccgggccggtttcgattatgtcagcctgcgcaccatcgccatggggcttcccggcgagttgaatttcggactttcgagcaatccggccttgctgcgcgacaccaaggcggcgctggccgacagcggcgtcaagctgctcgacatcgaaaatgcccgcctccatgacgacgtcgatatcaggaaatatctgccggaaatggaaattgccgccgaactcggcgccaaggcggtgctgacgaacatctggtcaaccgaccgcgctttcgtcgtcgacaagttcgccgagctttgcggtcatgccaagtcttacggcctcaaggtcaatcttgaatttgtcacttgggcaagcatcaccgacctcaaggattccgtcgagatcatcaaatcgtccggcgccgacaacgccgcaatcgccctcgacacgctgcatttttcccgctcgcgctgcacgctggaagaactggccgccctgccgcccgactacctcggggcgctgcacctgtgcgatgcgccggccgaaatcccgacgaccaaggaaggattgatccacaccggccgcggcgaacggctctacgtcggggaaggcggcatcgacatcgccggcatcgtcagcaacatgccggcgaacgtcgtttgcggcatcgaaatcccgcatatcgaacgcctcaaggccattggcgcctccgaacatatttcccgcagcatcgagacaaccaaggcatatctggaagccaacggactctgagcgcgcaaggcaatcgcacggcacatctgaactcgaaccatcggaggtgaacacatgagactgaaagacaaagtggcattgattaccggcggcggcggcgatgtggccatcgcgatcgccgaaaaattcctcgccaacggcgccagggtcgtactggtcgacctgaaacccgagctgctcgcggccgccgcgcagaaactgaacgccggcgccgcgctggcaaccgtcaccggcgacgtgtgccacctcgacgacatggaagccgccgccaggctggccgtcagccagttcggcaagctcgatatcgtcgtgccctgcgccggcgtgatcaagcacatgccgatcgacgagatgtcgctcaacgactggaaatgggtcgtcgatatcaacctgaccggcaccttcgtcacctgcaaagccgccgtgccgttcatgaagcagcaacaaagcggtcgcatcatcacgatctcatcggtcggcggccgcaccggccggccgaaggtcggcgttaattacgccgcgtcgaaagccggggtcaacggcctgacgatgtgcctcgcccgcgaactcggcgccttcaacatcaccgtcaacagcatctgtccgggcccgctggccggccgcatgacggaatcgatgccgccggaaaacctcaaggcgctgatcagcaccgcctgcatcggccgccttgggcgccccgacgacatcggcaatgccgccctctacctcgccagcgacgaggcagaatgggtgactggcgaaatcctcgacgtcaatggcggcgtgtatatctgagcgttatggattgcagtagaagtagtacccgcagtggcagcaagcagtacctcttgaagcacgacttgaagccttgactgccggcgcagggagttttcattcctcgccggcagcttttttcaggcaaatcgccgtgtcggaatcggacaaggaatcgctcaactcaattgcccttcgccttgtcggccgccgctttctcagccgccttcgccgcttccttggcttcccgcttggcccgctgggcggcgcgttcggcatccttcttggcgcgcttttcgttcttttctgcccgcctggcctgctcctcggccagtttctggcgattctcggcggcctgttgcgttttttcggcggcttttcgctcgcgctcgaccgctttggcggcctcttcgctacggtactgttcgcccctcgtctgctgctcggcttcgcgcaccggacgatcggcttcgcgcttcgcttccttggcctcgacgtcggcacgcttggcctcgcgctcgaagtcgcgggccggcgtgtcgagattgcgagcgtcgatcttcgactgggtcagacgctttttcgcttcgtccaggcagtcgttgaccagaatcttctggtaacaagcggcttcgtcagcggcgtagcgctgctcggcatccttctccatttgcgaggcgcgttcgcgttgcgccttcgcctcctccagcgttttcggcacgggccccggatgggcggcaggcacctgcgcccccagcggggtgctggtcaacagcaaaacggtcatcagattacgcatgtgcattacggtttcctccacagccggcgattttacgccgcggcggagacgggcgcctccggtttgcggaaaaacggcgatgaatcccgctgaatcagccacatgcgccactcccccctttggtagaatgaccggctgtttttttactcattctctgggagcttctcgtgaaaatcgtctgtctcgaccttgaaggcgtgcttgtccccgaaatctggatccagtttgccgagcgcaccggtattcccgaattgcgccgcacgacgcgcgacgagccggactacgacaagctgatgacctatcgtctgaacattctcgccgagaaaaaactcggcctgccggacatccagaaggtgatcggcgaaatggggccgatgccgggcgcccgcgaattcctcgacaagctgcgcgaggattatcaggtgatcatcctgtccgacacgttctacgaattcgcccacccgctgatgcgccaactcggctggccgacgctgttctgccacagcctcgaggcggacgccaacggcttgctcgtcgactaccatctgcgcatgcccgaccagaagcgcgaagccgtccagcgcttcaaggaactcaacttcaagatcgtcgccgccggcgattcgtacaacgacacggcgatgctcggcgaagccgatgccggcatcctcttccacccgccggagaacgtcatccgcgaattcccgcagttcccggtcaccatgaactacgacgaactgcgcacggaaatcgacaaggcattcgcccgcgtcggaggctgagcgccgccatgtactcgaaacgctattacacgctatcggcctcgtgccccgaccaggtcggcatcgtcgcccgcgtcgcgggcttcatcgccgagcacaagggctggattctcgaatcgcgctaccactcggacaacaataacggcgacagccgctatttcatgcgcatcgacatcaaggccgactcgctgcccttccatctcgcggaattccgcgagcgtttccgcccgcttgccgaggaaatcaagatggactggaagatcaacgattcggcggtcaagaagcgtgtggtcgtcctcgtcagcaagcaggaacactgcctgtacgacctgctggcgcgctggcagtcgaaggagctcgacatcgagatcccctgcgtcatctcaaaccacgacaccttcaagggcttcgtcgagtggcacggcatcccgttccatcacgtaccggtgacgccggacaacaaggaatcggcctacgccgaagtgcagcgcatcttcgaggaagtgaagggcgacacgatggtgctggcgcgctacatgcagattctctcgccgtctctgtgcgagaaatttgccggccagatcatcaacatccaccactccttcctgcccagcttcatcggcgcccgcccgtaccaccaggcctaccagcgcggcgtcaagctgatcggcgcgacctgccactacgtcaccagcgagctcgaccagggcccgatcatcgagcaggacgtgatccgcatcgaccactccgactcggttgaagacatggtgcgctacggcaaggacatcgaaaagaccgtcctcgcccgcggcctgcgctaccacctcgaagaccgcgtgctggtgcatggcaacaagacggtggttttcaagtaaatcgaactagaaactctttcaacgcagagcgcgcagagccgcagagatcgcagagaaaaatcagatttgaacttctctgtatctctgcggctctgcgttctctgcgtttaaggcgtttgcgcagtttttcaaaagacgtcccccttcatgattaccctcaagaatgtcaccctgcgccgcagcgccaaggtattgctcgaaaacgcgtcggtcacgatcaatcccggcgagaaagccggcctcgtcgggcgcaacggcgccggcaagtcgtcgctgttcgccttgatcaacggcaacctgcacgaggacggcggcgaattcttcatgccgccttcgtggcggctggcgcaggtggcgcaggagatgccggaaacggcgcaaagcgcgacggccttcgtcatcgagggcgatacgcgcctgaaagctgcgcaggacgaggtcgccgcggccgaagcctccggcgacggcgagcgcatggcgcacgcctacatgacgctgcacgacgccggttcgcacgacgccgaagcgcgggcgcaagcgctgattctcggcctcggcttcaaggtcaccgagctcgaaaacccggtcaacagtttctccggcggctggcgcatgcgtctgcaactggcgcgtgcactgatgtgcccatccgacctgctgctgctcgatgaaccgaccaaccacctcgatctcgacgcgctggtctggctcgaagcctggctcaagcgctacgacggcacgctgctcgtcatcagccacgaccgcgaattcctcgacgccatcaccaacgtcacgctgcacatcgacagcggcaagctgacccgctacggcggcaactactcgaccttcgaggaaacacaggcgatgcagcttgaattgcagcaaagcgcctacgccaagcagcaggacaagatcgcccacctgcagaaattcatcgaccgcttcaaggccaaggcgacgaaagccaagcaggcgcaaagccgggtcaaggcgctcgaacgcatggaaaagatcgcgccggtactggccagcgccgacttcaccttcgaattcaaggaaccggccaacctgcccaacccgatgctggtcctgcgcgacgccgactgcggctatcccgctcccgacgacgcgccggccggcaccccgccgaccgtcatcgtgaacaaggcaacgcgcacggtgaacgccggccagcgcatcggcatcctcggcgccaacggccagggcaagtcgacgctggtcaagacgatcgcccgcacgctggccccgctcggcggcaccgtcaccgaaggcaagggcctgaagatcggctatttcgcgcagcaggaactcgacgtgctgcgcccgcaggacaacccgctcgaacacatggtgcggctggccaaggaagcgctgccggacggtgaatcgggccgcgagcaggatctgcgcaacttcctcggctcgttcaatttcagcggcgacatggtcaaacaaccggtcggcacgatgagcggcggcgaaaaggcgcgcctcgtgctgtgcatgctcgtctggcaacgcccgaacctgctgctgctcgacgaaccgaccaaccacctcgatctcgcgacgcgcgaggcgctggccgttgcgctcaacgaattcgaaggcacggtgatgctggtcagccacgaccgcgccctgctgcgcgccgtctgcgacgagttctggctcgtcacgcgcggtggcgtcggcccgttcgacggcgacctcgacgactaccagcaattcctgctcgacgaagccaaacgagcgcgcgaggaactcaaaacctcgctcaaggaagaaaaggccacaacatcagccgccgccccggtcgcgccgc

SEQ ID NO: 2878 - DNA, 23327 bp, synthetic construct
  misc_feature 1..23327: note = Synthetic
  source 1..23327: mol_type = other DNA
ggcggtcagcgcctggcccagcgccacgcgcttgacgccgccgccggagagcgccccgatcagggcatcgccatccaggccgagccggctgatggcctgctcgacgcgcgagtgcagactccagccgtcgccgtgatcgagctgttcctgcagtgcctgcagggccgccagatgctcggcggtggcctcctccgcgacggcgtgcgccgcctcgtggtaagccagcagcagcccgcccgcgccgcccagagccgaagccaaggtctgatagacgctggcctcgggatcgaaagagggctcctgcgccacataggccagacgcagacccgactggcgccagaccacgccctcgtcgagcgtggacaaaccggccagcgcgcgcatcaaggacgacttgccgctgccgttgcggccgatcagggcgatcttctcgccgctgtcgatctgcagagcggcgccgtccagcaacgcgacgtggccgaaggccagatgggcattttcaagcgtcaacaacatatgttctaccgggtgttcctcgcgactggtgcgcgagggatgaagtgggccaagagccggcagattatacgtgagcgccggtatcgggctagaatacgcgccggccgctccccgtggttcaatggatagaacgagtgcctcctaagcgctagatctgggttcgattcccggcggggggaccagcgccgcagcacacaccgagtcatcatgcccgagcacccgatagagatcagcgaggaagccggggtacgcagcctgcacttcggctccgactggatccagggggcgatgcgcatccgccggccctactccctggaactggcctacacgcgcgagatgatggcctgcctgctactgcgctccaacgacaactggccgcgacgcgcgctgctgatcgggctcggggccggatcgctggccaagtacatctaccgccacctggaacatacccgcatcaccgcggtcgaaatcgatccacgcattgcgccgatggcccagcaatactttcacctgcccgtcgatccgcagcgcctgaaggtcgtcatcgccgacggcgccgactacgtcatcgacgcccggagcagcttcgatctgatcctagtcgacggctttggtgccgatgcccgagccggccggctggacggcgcagccttctatgccgcggcgcgcgcacggctgtccgccagtggtctgctggtgtgcaacctgctgggccggagccgcggttttgctgctggcgtcctgcgcatagcccaggctttcgagggccgcagcctggtttttccctcctgcgacagcggcaacgcgatcgccttcgccgccgccggggagccggtcgatgtcacactggaggagatgcggatccgggcggaagagttgcggcgcgccaccggcctcgatctgcaccccaccatcagccgcctgcagttggcccaatcgctgccggccggaaggctggtgctgtagagcttagcctacttgatccgcgtcaggtgcgagcgcccagatggtggcggctccggcgacggctcctcggccgaaggcgttgcgaccgaggcttcggcgcccgacccggcgggggcgacttcgaaggccataccctggccgttctcgcgcgcatagatggcggcgacgttggcgacgggaatcgacaaggcctgggagacgcctgaaaagcgcgccgaaaagctaatcacttcgttgcccatgaccagctggtgggtggcttcggggccaagattcaggacgattccgccgtccttgacgtactggcgcggcaccttggtgtggccatcgacgaccacgttcaggtagggcgtgaagccctgatcgacgcaccattcgtggatggcgcgaagcagatagggcttggtggaagcgggttccgacatggcgtcctgcgagagcgaagggcctagcggcgcatgaccttttcggacggagtcagcgcatcgataaagccctgacggctgaagatgcgctccgcgtacttcatcagcggcgctgcctgcttgcccagttcgatgccgtaatgatccagacgccacaacagcggcgcgatggcgacgtcgagcatcgagaactcgtcgccgagcatgtgtttctgcttggtgaagatcggcgccagctcggtcaagcggtcgcgcacgtgttcccgcgatctctcggccgatttctggtttttctccagcgcttcgatgtggctgaagagttcgtgttccatcgtgaacagcaactggcgcgcccgcgcgcgcatgatcggatcgggcggcatcaactgcggatggggaaagcgctcgtcgatgtactcgttgatgatgttcgattcgtagagtacgaggtctcggtccaccagcaccggcacgcggttgtacgggttaatgacggcgatgtcctcaggcttgttgaagagatcgacgtcaatcacctgaaagtccatctgcttctcgtacaggacgatgcggcagcgttggctgaacgggcacgtggtgcccgagtacaggttcatcatggtactcgtaccccaggaatagtccgcgtcgcgcaccacgcggcgaaccgatgctgcgctgtaatctcggtgatgccccatatgcaacatatcgtgatgcgctgacggttagtgaatgtctttccagaactcgcgtttcaatgcgtaggccaggacgaagaatgccgccaggaagagcagcacgtagacgcccaggcgcttgcgcaccggcgccgcgggctcgcccatgtactggaggtagccgaccaggtcggcaacgtcggcgtcgtaggccgccggcgacaactgcccggccttctccagcttgagcttgccgtccgcgcccagcacctgctcgccctgcagctgccacagcacgttcggcatggccacgttcgggaacaccgtgttgttccagccggtcggccgggaatcgtcgcggtagaagctgcgcagataggtgtacaaccagtccgcccccgatcccgcctccgaggtccgcgcccgcgcctccagcgtcaggtccggcggcggcaccccgaaccacttcttggcgtcgtcccggcgcatcgcgatggtcatcagctcgcccaccttgtccgcggtgaatagcaggttgtccttgatctccttgtcgttcagcccgatgtcgtgcagccggttgtagcgcatctccgacgccgaatggcaggacaggcagtaattcacgaacagcttcgccccgtgctgcagcgccgcgttgttgcctgtccggtccggcgcacggtcaagatgcagctcgccgcccgccgcatgagccatcagcggcgccagaagcaaagcgataaataacttcttcattatccagtcaccctttccggttccggtttgcacttgtccagcttgctgtagatcggcatcagcaggaagaaggcgaagtagatcaccgcgcagatctgcgacaccatcagccgcgccggcgtcggctcctgcatccccagatagcccaggatgcagaacaccaccacgaacagccccagcgccgtcttgaagatcggccccttgtagcggatcgacttcaccggactgcggtccagccacggcaggaagcagaaaatcaccaccgccgaccccatcccgatcaccccccagaacttcgcctccagcccgaacagcggataggtgatcgagcgcaggatcgagtagtagggcgtgaagtaccacagcggcgaaatgtgcggcggcgtctgcagcgggttggcctggatgaagttgttcgactccaggaagtagccgccgccctccggcgcaaaaaagatcaccgccgagaacaccatcaggaacaccaccaccccgacgatgtccttcaccgtgtagtagggatggaacgggatcccgtccagaggaatgcccctctcgtccttgtgcttcttgatctcgatcccgtccggattgttcgagcccacctcgtgcagcgcgatcacgtgcgccaccaccagccccagcagcaccagcggcaccgcgatcacgtggaaggcgaagaagcggttcaaggtcgcgtcgccgaccacgaagtcgccgcgcagccacagcgacaggtccggcccgaccagcgggatcgccgagaacatgttcacgatcacctgcgccccccagaaggacatctggccccagggcagcagataaccgaagaaagcctccgccatcaggcacaggaagatcagcatgccgaaaatccagatcagctcccgcggcttgcggtgcgagccgtacagcagcccccggaacatgtgcagatagaccacgatgaagaaggccgaggccccggtcgagtgcatgtagcggatcagccagccccacggcacgtcgcgcatgatgtactcgacgctggcaaacgccaccggcaccccggagccgttcaacgacgcgtccggcttgtagtgcatcgtcagaaatatcccggtgacgatctgattgaccagcaccagcaaggccagcgacccgaagaagtaccagaagttgaagttcttcggcgcgtagtattcggacagatgcgccttccagctcgaggtcagcggaaaccgttcatcgacccagtcgagcagtcctttcatccttgcagccatcccttatgcccccttcttctcgtcttcgccgatgacgatcttggcgtcggaaaggtaccggtacggcggcacctccagattgtccggcgccggcttgtccttgaagacgcgaccagccaggtcgaaggtcgaaccgtggcacgggcacaaaaatccgcccggccagttcgggcccagtcccgattcggtcccaggctgaaatttctcccccggcgaacaccccaggtgcgtgcagatcccgatcaccaccatgtactccggcttgatcgagcgcgtctcgttcttgcagtacgccggctgctgcggcttctccgaattcggatcgctcaccagcccatccgccttcttcagcgacgccagcatcgccgccgtccggttgatgatccacaccggcttgccgcgccacgccaccgtcatcatctgacccggcgccagcttgctgatgtccacctccaccggagcacccgccgccttcgcccgctccgacggcatcatgctcgccacgaacggcaccaccgtcaccaccccagctaccccgcccaccgccgccgtcgccaccaccagacgacgtcgcccgcaatccacttcctcctcaccacccatagcttctatccctgaagtaggaaaatctcttgaccgtcagagcccgcatgccacgcgggcgacggaaacgaggcaatataaaccgtcactgattatatcttttgacctatatcaaatggaagattatgaagcgcttggcggactccggcttcggcgcccgcgcccgtgtcctgcagactcgcatagcgggccagtgcggcagagctgcgccctgcaagcgctatttaaatgacaacgggatcgatgatccagaaatgtgctgcggttctacttcgaatgaacctcagatagcatgtaacaaaaaaaacccgcaaggctattggccgtgcgggttttcgatgaatcgttggcggagtggacgggactcgaacccgcgacccccggcgtgacaggccggtattctaaccaactgaactaccactccgtacttcgtacttgacgtacttgaaactaggctgctcgaaacaaaaggggttgcccttcgaagcaacccccgtgcagcttggcgaccccaccgggattcgaacccgggttcataccgtgaaagggtattgtcctaggcctctagacgatagggtcaatactgtcatcaaacttggtggaggtacgcgggatcgaaccgcggacctcttgcatgccatgcaagcgctctcccagctgagctatacccccacaagagagcgcgaattatacgtagcgaccggatttgtgtaaagcgctgcgcggaaaaaaagtttacagcaccttgcccggattcatcagatcctgcgggtcgagcgcctgcttcacgcggcgcatcagatccatctccaccgcgctcttgtagcggcggatctccaggcgcttcagctgtcccaggccgtgctcggccgagatgctgccggagagctcgtgcaccaggtcgtgcacgacgcgattgaccgccccgctctgcgcgatgaaatcggcattggccagcgccgccggcttcgacaggttgtagtgcaggttgccgtcgccgatgtggccgaagcagacgatgcgcacgccgggaaagcgagcggcgagcgcatcatcggcacgcccgatgaactcggcaatggccgagaccggcaccgcaacgtcgtgcttgatgctgacaccctcgatcttctgcgcctccgagatgttctcgcgcagccgccacagtgccgccgcctgggcgccgctttgcgcgatgacggcatccctcgcccggcccgcctcgatctccgcgccgagggcggactccagcgcggcgatgaggtcgaagcccgccagcgtgtcggtcaattccaccagcacctgccaggcgtgggtttgggccaagggatcgcgggcatccgggatatgcctgatcaccagttccagcgcgctgcggccgatgatctcgaaagcggtgacgcgctcgccgcattgttcgcgcaggcggcgcaacagcgccaccgcggcggccggatcggcgaccgcgacccaggcgacggcggtggcgcgcggccggggaaagagcttcaacaccgccgcggtgatcaggccgagcgtgccttcggcaccgatgaacaggtgcttgagatcgtagccggtgttgtccttgcgcaagccgcgcagaccgttccagacgcggccgtcggcgagcaccacctccaggcccagggtcagctcgcgcatgttgccgtagcgcagcacctggacgccgccggcgttggtggacaggttgccgccgatggtcgccgagccctcggcggcgagcgacagcgggaacagcaatccggcgtccgccgcggcctgctgcacctgctgcaggatgcagccggcttcgacggtgatggtgttgttgtcgcggtcgatagcgcggatcctggagagccttgcgaggctcaccagcacctggccgccggaatctcccgcgagcggcgtggcgccgccgaccaggccggtgttgccgccttgcggcaccaccgcgacgccggcttcggcgcagcgggcgacgacacgcgccacctcctcggtgtttcccggccgcaccacgcagagtgcggcaccagaatagcggccgcgccagtcggtgaggtagggcgccatgtcggcggcggcagtcagcacctggccggcgccgacgatatcctgcaacgattgttccagcgatgcgctcacttgccgatctccaggacgtggcggatcgccggccacatccgctccaccgccgcccgcccctcggcgatcgattcgacgccgcggtgatagtccatcagcccgatctgcgccaggcgcggctccagcaccaggtcggcgggctcgccggccagccggctgcggctgatccgcacctgcatgatgttcacgctggccaccagcacctccaccagcgagggcagcatcggctcgccgccgttcgcgccgttccggccgaagcgctgcagcagccggctgcgccagttgtccggtgcggtcatgtcgttgcggtgcagatgaccgctgcggtccgaaccgagatcgacggcgatgacgatgtcggcgccctgcgcccggcacagcgacaccggcacggggttcaccagggcgccgtcgaccagcagccggccgtcgtgctgttgcggcgtgaacaggcccggcagggcgatcgaggcgcgcaccgcggcggcgacgctgccctctctcaaccagatctcccgccccgactccagatcggtggcgacgcaggcgaagggcttgggcagcgcggcgaaatcgtggtctacgaaattccggctgaagaaatcgatcagcttctcgcccttgatcaacccgcccttcaggctgaagtcgaacatcccgaacacgcccttccagtcgagcgcggcgacccagtgttcgagtttttccaggtcgccattgacgtaggcggcgccgacgaaggcgccgatcgagcagccgcagacgatgtccggctcgatgccggcttcggcgagcgcggtgagcacgccgatatgcgcccagccgcgggcggaaccggcgcccagggcgatgccgagcttgggtttcgccgtcatcgtctagcccttcgccacttctgcgtaaaggtcatggacgtcgcagtcggtgaccgtgacctgcgcgaactcgccgacttccagaccctggccgtcggtgacatagaccaggccgtcgatctccggcgcgtcgccctggcttctggccaccgcgccgtcctcgtctacctcgtcgaccagcacctcgatggttctgccgatcttcgcctccaggcggcgggtgctgatgtcctcctggaattccatcagacgtcgccggcgctcctcgcgcacctcgtcgggcaaggcgccgggcagctcgttggccgccgcccccgccaccggcgagtaggcgaaggcgccgacgcggtccagttgcgcctcctccaggaactgcagcagctcctcgaactcggcctcggtctcgccgggaaagccggtgatgaaggtgctgcggatcgtgatctccgggcagaggtcgcgccaggcgcggatccgcgccaggttgttctcgctgctggcgggccgcttcatcagcttgagcagacgcgggctggcgtgctggaagggcacgtcgaggtagggcaggatcctgcccgcgctcatcagcgggatcagttcatcgacgctcgggtaagggtagacgtagtgcagccgcacccagacgcccagttcgcccagagcctgacagagttcgagcagccgggtcttgaccggccggccctgccagaagccggtgcggtacttgatatcgacgccgtaggcgctggtgtcctgggagatcaccagcaattccctgacgccggcatggaccagcgcctcggcctcgttcatcacctcgccgataggccggctgaccagatcgccgcgcagcgaggggatgatgcagaagctgcagcggtgattgcagccctcggaaatcttcaggtaggcgtagtgctggggcgtcaggcgtatgccctgtgccggcaccaggtcgatgaagggatcgtggggtgcgggcagatgggcgtgcaccgcgctcatcacctctgccgcggcgtgcgggccggtgaccgccagcacccgcggatgcgcctgcttcacgacgtcgcccttggcgcccagacagccggtgacgatgacgcggccgttctcggccagcgcctcgccgatcgcatcgagcgactcctcgaccgcggcgtcgatgaagccgcaggtattgaccaccaccagatcggcgccctgataggagccggagatggcgtagccctcgctcttcaggcgggtcaggatctgctcggagtcgacggtggccttggggcagccgagcgagacgaagccgatcgtgggggttttgcgtgtgctgttcatgtgcttgctgctttcattcggggccttggatcgccggcgccccgaggtgcgggacggaggatggactattatccccggtattcgccccagggtttcactacagggtcttgatgttcagcccggcccccacccggcttgcgaacggcttggctccctcgaccagatagatcagggtgccggcgtcaataaaggcgatcacgcccgactctcgcgctcttctcgcaaagccttgtcgatctcggtcttccgctcggtaccgtatgcatcaccgaccagcaaaggacgccccgggctcaaacagatcgttgctgacatccaatgattccagaaaataaagacccgacaggcatgcctgtcgggtcgggttcggtcaccacccgaaggtggctaccttattgcagcaacggctctcaccccggaaagctacaatgctgtcattatatcccaaaagggagatggtcatgcaatcgggaattccgtcgtacacgctcggtctcgatatcggcatcgcctcggtgggctggtgcgtgcttggccagaatcgcatcatagatctcggagtgcgtgcgttcgacaaggccgaaaccgccaaagagggcgattcgctcaatctcgttcgccgcagcgcgcgcctgatgcgccgccgcctgcgccgacgcgcctggcgactaaccaagctcgcgcgtttgctcaagcgccacggggtgatcgacgacacccggatcttccagccgcagcacccgtttctgcattcgctctggcaaatgagggtggccggactggatcgcccgctgagcaacgaggaatgggcacgggtggtctaccacctgtgcaagcaccggggctttcactggatcagccgcgccgaagagaggcaggcggaagcggacaacaagggcgaaggcggaaaggtcaagcaaggactcgccggcaccgcgaagctgatgcaggaaaacggctatcgcagctcagccgagatggtgttggccgaattcccaaaggcccagcgcaacaagcagggcgactacagcaaagcgctggcccgcacccttctgggcgaggaactggcgctgctgttcaagcgacagcgcgaactgggaaatccacacacgggcacagcgctggagctggcaattctcggcaacggaaatcgcaagagcggacttttctgggcgcagaaaccagcgctggcgggaaacgatctcttgaggatgctcggcaaatgcaccttcgagaagggcgagtaccgcgcacccaaagcgagctttaccgccgagcgccatgtctggctgacgcggctcaacaacctgcgcatcgtcgtggacggcggcacgcgaccgttgaacgcacaggagcggcaaatcgctctgccgctgccctacacgtatgacagcgatttcacctacaagcggttacgcagcgcgctgctgaaggcaggtcatttgccagagtcttttcgcttcgccgggctgccctaccccagcgccgctcagcaggccgatgaaaaagcaaaagacccggaagcggccgcgctggtgaaattcccggcctggcaggaaatgcgccgaacgctgaagaaggccggactggagaccgaatggcatggcatggctggcgccgcgatcgatggccgtcccgaattgctcgaccagattgcctgggtgctgagcgtgttcaaggacgacgaggaagtcacagccgaactgcgcaagctgcccctgccaagttcggagcaaatgatcgacgccctgctggacatccgctttgacaagtttcacgccctgtcgctcaaggcgctgcgccggatcgtgccgcacatggaagtcggcctgcgctatgacgaagcttgcgcacaggtcggttatcaccacagccagctacacaaggccggagaaggcgagcacaagtatctgccgccgctctatgccgggcgcgacaagagtggacgcatggtattcagcgaagaaatggacgtgccgcgcaacccggtggtgctgcgcgccctcaaccaggcgcgcaaggtggtgaatgcgatcgtccgccgatacggcgcgcccatggcggcgcatatcgaaatggcgcgcgatttatcgaagcccatcgacgaacgccgaaagatagaaaagaatcagaccgaatatcgtgagcggaacgacaaggacaaggcgctcttcgcggaacatttccagcgaatgccgacggggatcgagttcgagaagtggcgcttgtaccgggaacagcaggggaaatgcgcctactctgttgagccgctcgacatcaatcgcttgttggaacaaggctacgtcgaagtcgatcacgccctgccctattcacgcagcttcgacgacagcaagaacaacaaggtgctggtgctcgccaaggagaaccgggacaagggaaaccgcacgccctacgaatacctgggcggtgcggaaagcactccccgctggcagaccttcgtcgctttcgtcgaatcgaccaaggcttatcgcctcgccaagcgcagccgcctgctgcgcaaggacttcagcgccaaggaagccgaagaatttcgggagcggaatctcaacgatacccgctacatctgccgctttttcaagaattacgtcgagcgctacctgcaactggccgaaggcgacaaaacgaagcgctgcgtcgtgttgagcggtcaattgacgtcattccttcgcgcccgctgggggctgctcaaggtgcgcggcaacaacgaccgtcaccatgcgctcgacgccgctgtggtggccgcgtgcagccacggcatggtcaagcgcttgtccgactacgcgcggcgcagggagcttgaaaaggtccgggaaggattcgtcgacctggaaaccggagagatcgtcagtccggcaatgttccagcagttgcggcagcactttccggatccctggccacactttcgcgacgagcttgaagcgcgtctgaatatcgacgacccggtgcagcttcgtgccgatatggagcgactgggcagctatccgactgaagcgctggagcaactgcatccattgtttgtgtcgcgtgcggtcgtcagacgcgaaggtggagagattcataaagcaaaaatattttccatcaaggccagtgaggtaaatagggctttcgagaaagtgccattatcgagtctcaccttggcaaaactcgaaaagatggtgggaaaagatgacccaagaaatcatagcttgtacgaaattttgcgcgagcgtttgagcaagttcgatgacgatccgaagaaagcattcgggcctcagcaacccaagatattgaaacccagtaaagatgccaagaatgcgcctgaggttcgcgcagttcgcgtcgaaataacacagaacgccggtttactggtcaggggcggcattgccgatctaggcgaaatggtttgtgtcgatgtattacgacagaccgatggatttgctgtgatcccacagtatcaagcgagccgatcaaaaatgcgtggcgctaccgtgagctcagtggagggcaatttttgtttcagtcttacaaaaaacgaatttgtcgaagtagtgattggtgaagagactattcgcggctatttcgtcatgtacgagagcgacggacgaatgaccttgcgtgggcacgatcagccacagccggacaagcgcttttttagaaaatcaattttcaaagcgactcgcgctacaaaattccatgtagatgtcctcggcaacatctaccctgcccggccggagccccgtcgtgggctggcgtagcgtcatgatctcccgtccggcacgactgcggcgggagcatttttcgctggccatcgaacaggaggaaacggccttcgtgcccttcgaggacatcgccgtcatcgtcctcaatcaccgcgaaatcaacctttcccacccggtgctgtcggcctgcgccgaatacggtatcagcctattttccaccggcgacaatcaccagcccagcggcgtcttcttgcccttcctgccgcattcgcgcaccacccggctgatgcgccgccagctcgatgtggcgcgaccgctcgccaagcaggcctgggccaacattgtccggcgcaagatcgagaaccaagccgcctgcctgcggctcgccgggcggcaaggcatcgaccggcttgaatcctatgcccgccgcgtgcgttcgggagacgccgaaaatctcgaaggtcaagccgccgccttttacttcgtcgcgatgttcggctcgggctttcaccgcgctgaggagcgttgggaaaactcggcgctcgattatggctatgccgtgctgcgcggcgccatcgcccgcggcctggtggcccacggactgcatccgacgatcgggctgtttcacgacagcgaacagaacgccttcaatcttgccgacgatctgatcgaacccttccgcccgctggtcgatctgcatgtgttcaagcacccaccctccaccgaaggcgatctattgcccgctgacaaggccgcgctggtggccttgctcaacgtcgatgtcggcatgccacagggccgcatgtcggcgctgtccgccatcgaatacgcggtcgaagggctggtgcgcctgttcgaggaaggcgatagcacgctcgatcttcccaccctgatcggcctccagccgcaccggctggagtgctgaagggtgggcagcgaaacgcgccggttcatgcgcctgctcgtattcttcgatctgccaatggtcaccaagaccgagaagcgcgcctatgtgcagtttcgccgcttcctgctcaacgacggctacgacatgatccagtggtcggtctatgggcgcctgttaaacggtgccgacgcacaggcgaagcatctgaagcgcctcgcagaaagcctgccgccggctggttcggtgcgctgcatgacggtcacggaaaagcaattcgccggaattcgcctgctcgtcggcatgccgctttttcaggaaaaaaaggtcaccgctgcccagatgctgctgttctaacgcggaaaacggatgaaaaaactccctcccagccaaggctgggagggaattcaagggctgccagattgtagccttccggggtgagagagggagctacaaccacggaagcaaccttgattcaagtccgttcgattgtagccttccggggtgagagagggagctacaacagcgatgtctgtgcgccaggatccatgatcgattgtagccttccggggtgagagagggagctacaacaatggtggtgatgatgaagccgttcgctggggattgtagccttccggggtgagagagggagctacaacgccaagtgcgtaaggtagattttgcgaagcgattgtagccttccggggtgagagagggagctacaactgatctgctcgaagttcgccttctgaaacggattgtagccttccggggtgagagagggagctacaacacaatgagtggctgcaatacacctttttgcgattgtagccttccggggtgagagagggagctacaacctccgacgaggtgcaaaagctcatccagaagattgtagccttccggggtgagagagggagctacaacacatgggtgacgatgccgacaaaggctcgagattgtagccttccggggtgagagagggagctacaacggataaacggatgacctttaggtcatccgtttatccgtgtcgctaccgcgacgtctacaaaacattgcagcttgcatatttattagataatatgcaagcttatatcagttgtttaacaaccgccaacggggacattcatgagtgaccacaccatcgacaccgcgctggcccgccgcatgatcgaagccagcgccattcgaggcgcatcgattatcggccgaccgggcggctggtctgtaatgctcaaactgggcaaagcagaaaagccattgagcgcccagcgcaccggcaaaccgcgcatgtggcgcagcctggacacctgcgtggaatacctgaagaatgagctgcacatcgtccgggtagagttgctagacgccagcgggcacagcgccaacgatgccgcacgcacaacgcgggcggactcttccgagcgcttgaaacacgcccatgaagccgccgcccacgacaagtggtttcgcgcccaagtggagcaggccatccgggaagccgacgaccccgataccgcttgggtgccgcatgatgtcgtcaaaaaggacatggcgaaacaacgcaaagccttgaaggccagaattgcagccggggctaagtgatgcagttggtatggacgcctcgcgccgaggcgtcacgccatgcggccatcgaatacatcgcccaggacaatccacacgccgcactggatcagcttgacgagatcgagcgacaaatcgatttgctgctgcaacatcctggaatcggtcgaccgggccgcaggcggggaacccgcgaattggtcataagtcgcacacccttcattctcgtttatcgcttcaggccgagagccgggcgcatcgagattctgagaatgttgcacggctcccagcagtacccgtgagccgtgcaacccgcctacttcttctcctcggcgggggtcttgacgttgggaaactggaagcccgcaaacaggttgcgcgtctggccctggatctgttcctgcatctgctggaacatcgcctggctctgttccatgtaggtgctcatcatgctctgcatcgccggtccctggaagctcatgaactgcgcccagaggtcgttggagggcacggcgttttcgccgtagagcgtcttcgcctgatccttgagcttggcctgcatgtcgctgaaggccttgatgttgccctccagatacttgcccatcatgccctgcatggcgttgccgtagaagcggatgatctgcgccaggatgtcgctggagaacatcggcgatccgcccgcctcttcctccaggatgatctgcatcaggatgctgcgcgtcaggtcctcgccgctcttggcgtccaacacctggaactcctcgtgggcgagcaccagtcccttgacatcgaccagggtgatgtaggtgctggtccgggtgtcgtacagacggcggttcgggtatttcttgatcagtctcagcttctcggccatcgcttcattcctccaggactagggcaccgatgttcgattcgtcggcaaaagatcgcggcctcagcacatgtgcaggccgccgttgatgttgagcgtggcgccggtcatgaagccggccagttccgacaccaggtagcgcaccagatgaccgatctcctcgggccggcccaggcgtcccatggggatggtggcgacgatctgctcgcgcacctccggcctgatcgccatcaccatctcggtgccgatgtagcccggggcgatggcattgacggtgacgcccttcttcaccacttcctgggcgatggccttggtgaagccgaggatgccggccttggccgcggaataattggcctggccgaactgccccttgatgccgttgaccgaggacatgttgatgacccggccccagccgcgctcggtcatgccggagagcacctggtgggtgacgttaaacaccgagtcgaggttggtggtgagcaccgcatcccagtcgccgcggcccatcttgaggaaggtgccgtcgcgggtgatgccggcgttattcaccaggatgtcgatcggcccgacctcggcctcgatcttcgtcaccatcgccgcgcaggagtcgtagtccgagacgtcgccctcggcggcgtggaaggcataaccctcggcccgggtccgggccagccattcctcccgctgcggaaaaccgggcaggcagttggccacgatgacgcagccgtcttgcgccagcgccttgccgatcgcggtgcccagtccgcccatgccgccggttatcaacgcaattctcttcgacatcgttccacttcctcagctgctgaaaaaaactgtcagaacatgtgctggccgccgttgatcgagatgttggcgccggtcacgaaggccgcctcgtcggaggagagataagccaccaggcccgccacctccttcggcttgcccaggcgcgacatcgggatctgcggcaggatcttcgattccagcacctcctggggaatcgccatgaccatctgggtgccgatgtagcccggggaaatggtgttcacggtgacccccttcttggccacttccagcgccagcgacttggtgaagccgtgcatcccggccttggccgcggcgtagttggtctggccgaaggcgcccttctggccattgaccgaggagatgttgatgacgcggccccagttgcgttccatcatgccgtccatcacctgcttggtcatgttgaacaccgagtcgagattggtccgcatcaccgcgtcccagtcggccttggtcatcttcttgaaggtcatgtcgcgggtgatgccggcgttattcaccagcacatcgaccgcgcccacgtcctgctcgatcgcgtcgatgcaggcgcggcaagagtcgtagtcggagacgtcgcaggggtaggccttgaagccgaaacccatattgttcatcgactgcagccattcctgcgcgcgggtattggtcgggctgtgggtggtgaccaccttgtagcccaaggccgccagcttgatgcagatcgcctcgcccaggccgcccatgccgcccgtcaccagcgccactctttgcatgctccgtctccttattcatatgggatagcccgcgcgcctctcggggcgcttaggctgcgccatgttacgccgctttctccctgacatagcgccccggcgccggctcgatagcggcgtggcgcgcgctgcccaggaccgcccgggcggcgcgacgcttgccggcgtgggccgccagccactcactccacagcggccaccaactgcccggccgctcctgtgctgcggccaaccatccgtcgccgctggcggcgtcgctgtcactcagccagtggctgcgcttgcccttcgccggcggattgatgacgccggcgatatggccgctggcgccgagcacgaagcgcgtaggcccggagagcagcgcccgcgactgataggaggtcttccagggcacgatgtggtcctcgcgcgaggcatagaggaaggccggcatgtcgaggctgcggacatcggcgcgaacgccgcacatctccagcccgcccggccgggacagcccgttctccaggtacagacggcgcaggtaccaggcggcgaaaggccccggcaggctggtgctgtcggcgttccagtagagcagatcgaaggcgggcggcttgccgcccttcagatagttgccgaccacgtactgccagatcaggtcgttggcgcgcaggctggagaacaccgaggacagctcgcggccggagagcagcccgcccttgccgatggtggcctcgcgtgcggcgaccgaggcctcgtcgatgaagcagcccagttcgcccggttcggagaagtcgagcagcgtggtgagcagggtcagggcggcgaccggacgctcgccgcgcgccgccgccaccgccagcgccgaggccagcagcgtgccgccgacgcagaagcccagggcattgacctgcttcacggcgcagatctcggcggccacggccagcgcctggttcacgccgcgttcgaggtagtcgtcccaggtgaggtggcccagatcggccttgggattcacccaggagaccatgaacacggtgttgccctgctcgaccgcgtagcgcaccagcgagttctcgggctgcaggtcgagcacgtagtacttgttgatgcacggcggcaccatcaccagcggccgctgcccgaccttgtcggtcagcggcgcgtactggatcagctggaacaattcgttctcgaacaccacggcgccgggtgtcgccgccaggttgccgccgacctcgaaggcagcatcgtcggtcatcgagatgcgccccttttcgatgtcggcgatcaggttcgcaagccccagggtgatgctcttgccctgggtttccagcgcggtcttgatgaattccgggttggtcgcggcatagttcgacggcgccagggcatcgaccagctggcgggtgaggaagcgcatcctggccttggccgcagcatcggccaggggcatggcttcggcgaggctggtcaggaactgggcgttgagcacataggcctggcgcaggtagtcgaagatcgggctctgggcccattcgggcgcggcaaaacgccgatcggagggctcgggcagcgccaccgccggcgccgggtcgtccggcttgcgggcgagttcggcggcccagagccgggcatggcgggcggcgaactcctgctgcaaccgggccagcgtctcgggcgggaccgaggcaggcttgccgaccggctgctggcttgcgagccagcgattcacgccctcgaccaatgagcccagaccctgggtccacgcctgaccgctctgcaacattgcctgcatgcccactgccaagggatcgggtgctgcggacatccgctactcctgttggccggtctgatgacctgacgggattcccccaatggcggggggaaaacccgatgattttgcactgcagcatatggcctgtcaaggcgacctcggcgggccagcagggcgtcacgccagccagaccagggacgccatgcgcccggtgacgccatcgcgtcgataggaataaaagtgcaagggatcggcgtaggtgcataggccgccgccgaagacgcgggcgacgccggcccgcgccaggcgctgcctggcgagtgcggcgagatcgcactgccatctgccgcggtcgttggccgcgaaggccgccgccgcggccggatcgtggccgcagaaaatctcgcgcacctcggcgccgacctcgaaggccgccggcccgatcgccggtcccaaccaggcgatcaactctttcggcgccaccgccatcgcggtcaccgtctgctccagcacgccggcggccaagccgcgccagccggcgtgcgcagcggcgaccgcgctgccatcggcagcgcacagcaacagcggcaggcaatcggcgctctgcaccgcgcagatccggccgggactgcgggcgacgcaggcatccgcggtgagctcagctcccgcctgctcggcgctcaccacccgcgtgccatgcacctgggttagccacagcggctcggccggcaaaaccgagcgcaatcgcctgcggttttcgatcaccgcagccggctcgtcgccgacgtgggcgccgagattgaaactgtcatagggcggggcgctgacgccaccgctccgggtcgtcaccagggcgcgcacgcgggccggcgccggccagtcgggaacgatccagtcgggattcatgcgccgcgaagctgcgccagcagttcgacgaaatccgccggcagcggcgactcccaggcgagctcgatgccgctgcccggatgcaccagggccaggcgggcggcgtgcaatgcctggcgccggaaggcggcgagcggcgcgctggctgcaccgcggcggccgtaggtcggatcgccgaccagcggatggccgatcgatgccatatgcacgcgaatctggtgggtgcgtccggtctccagccggcattcgagcaaggtggcctgggcgaagcgctcgcgcacctggtaatgggtgcgggcttcccggccgccggccagcaccgccatcttgatccgctgggtcggatggcggccgatcggcgcatcgaccgtgccgccttggggcacccgcccgtggaccagcgccaggtaatggcgacgcaccgtgcgcgcctgcagctggcgcaccaggtcggtctgcgccgccagggtcttggccaccaccagcaggccgctggtgtccttgtcgaggcggtggacgatgccggcgcgggggatcgccgcgagcccgggggcgtgatgcagcagggcattcaacagcgtgccggcgcggttgccgctgccgggatggaccacgaggcccgccggcttgtcgatcaccaggatgtcatcgtcttcatggacgacactcaatgcgatgtcctcggcggcgtcttcgagcgcgaagacatcgggcgcagcctcgacctcgatctgctcgccgccccagatcttgcgcttggcgtcgaccaccgccacgccttcgacgcggacccgtccggcgcgcagccagccctgcaagcggctgcgcgaatgctcgggcagcagacgcgccagggtctggtcgaggcgcaggccggcatactcggccggcgccacgaagcgcgccggggtgcttgcgctataatcgaccggattcgatcgtggggcattcatcatgcgtagtgtagcggtaatcgtcgcgcttcttctgtccaccctgctggccggctgcggcctgctgcccgaacaggtcgacgagacgtccagctggaccgcgcagaagctgtacaccgaagccaaggacgcgatgaatgacggcggctacgacaaggccatcaagtattacgagaagctggagtcgcgctatccttacggcagctatgcgcagcaggcgcagctcgaagtcgcctacgcctactacaagcagtcggagcccgcctcggcgatcgccgcctgcgaccgcttcatccgcctgcacccgaaccacccgaacgtcgattacgcctactatctgaagggcctggccaacttcaacggcgacctcggactgatgggctacttctccgaccaggaccagtccgagcgcgatcccaaggccgccagggaatccttcgacacgttccgggaactggcggtcaagttccccaagagcaaatacacgcccgacgccatcgcgcggatgaagtatctggtcaatgacctggcctcgcacgaggtccatgtcgcggtctattacctgaagcgcggcgcctacgtcgccgccgccgatcgcgcccaggaggcgatcaagacctatcccgacgccccggccgacgaggaggcgctgtacgtgatgatcaaggcctacgacgcgctggggctcaagaccctgcgcgacgacgcccaacgcgtgatgcacaagaacttcccccacagcgtttatctggcccagggcctggagcgcaagcaaccgtggtggaaactctggtagtcctagaaagaaactcatgaccctagacattcaaaacccctccctcaccctcgccatcatcggcaccggcgccatgggccggggcatcgcccagatcgccgcccaagccggcgtcaccgtgctgctccacgacgcgcagcccggcgccgccgacaaggcccgcgaggcggtgaccgccacgctgaccaagctggccgaaaagggcaagatcgcgccggcggccgccgccgctgccgccgagcgcttgaagctcgtcgcccggctcgaagaactggcgccggcccaggtcgcgatcgaggccatcgtcgagaacctcgaggccaagcgcgcgctgttcaagcagctggaggccatcgtcggccccgactgcgtgctcgccaccaacacctcctcgctctcggtcacggccatcgccgccacctgcgcgcggccggagcgggtcggcggcttccatttcttcaacccggtgcccttgatgaagatcgtcgaggtgatcgacggcctgagaaccatgccctgggtcggcgacgcgctgctggcgctggggcggcgcatgggccacaccgcggtgcgcacccgggacacaccgggcttcatcgtgaaccacggcggccgcggtttcgtcaccgaggcgctgcgcatcctcggcgagaacgccgccccgtttcacgacgtcgaccggatcatgcgcgaagcgg

SEQ ID NO: 2879 - DNA, 23324 bp, synthetic construct
  misc_feature 1..23324: note = Synthetic
  source 1..23324: mol_type = other DNA
cggcagacagatggaatactggctcgcccggctgcgcaagagcgaaaaggactgaacgcttcaagcccccggcgaaagcccgcgacccgagagggagcgggcttttttatcgacgtgcgccccgaaaatctggcgcccccggcacgaatcgaacgtgcgaccctccccttaggagggggatgctctatccactgagctacgggggcgaggcgcgcattttacccaatcgcgcgccgttccgttcgccgcgcacggcccgatcgatccggcattatgattcgtaccggggggggaaccatgaaaattctgctgggcggagcggctgtcctgctgattctggcgagcgcgatattgtggatgctgcggccgggcacgcgcctggtcgaaggcagtccggcgccggacttcgtgctgcacgatcaggcgggccggagccaccggctggccgactacgcgggacgctggctggtgctctatttctacccgcgcgacgatacgccgctgtgcacccgggaagcctgccgcttccgcgacgacatcggcgtctacggcgagcttggcgcggccatcgtgggcgtcagcgtggacgatcgcgcatcgcacgccgccttcgcggagaagcaccgcctgcctttcccgctgctcgccgacgccgacggccgcacggccgccgcatacgacagcctgctcaacctgggcgtggtgcgcttcgcgcggcgccacaccttcatcgtcgatccggcggggcgcatcgccgcccgtttcgaccgggtcgatcccgccacgcacgcggcggaggtcgccgcccgtttgcgcgcgctgcagtcctgagccctgctttttgggtcgttttgagctaaaccacaggtgtcgcggccttcatccccgatcatgaagcctccccgtgccctaccgctgaccaccggtaccgcgttcgccgtcctggtggtcctcattttcgcgcaggcgctgaacagcctcttccagttgcacacgctcggcgaggaagtgcgcacgatgaccgagaaacacaaccgcaagatcgacatcatcacgcagacccaggtggccgcgcacatccggacggacagcctgatcaacatcctgctcgccggcgacgccttcgcgcgcgacgatcagttcatggccttcaaccgggccggttttctggtcggcagcggccgcaaggcgctggccgacatggggctcagcccggcggaacagcgcgatttcgacgaccagacccggctggtgaaccggatacaggcgatccaggaggcgatcatcgaccagatctacgccggtcgcaccgaaaccgcgcgccagcagctcgtcgcggaagccattcccaaccaggaggtcttcaaccgtcagctcgcagagttgcgcgcgcgctaccagacggccaatctggcggcccagcagcgcgcgcagcgcacctaccggcagaccctgctgctcacgctcgcgctgggcatcggcgcggtcctgctcgcactgctgatcgcccggcggaccctgcacaaggcccggctgcgggccgggcagattcaggcgcagttgctcgaactggaacactcgcgcgcggcgctgcgcgaggaggccacgcacgatccgctgaccggactggccaaccgccgcctgttctacgaccgcctgcaacaggccatccgccatgcccgccgctacggcggccggatcggcctgctctacgtggacctggacagcttcaaggcgatcaacgaccggcatggccaccacgtcggcgacacggtgctgaccgaagtggcgcgccagttgctgatctgcgtgcgcgaatccgacaccgtcgcgcgactgggcggcgacgaattcgtggtgctgctggaaggcgttcagggccggccggactgcatcgccgccgccctgaagatcgaacaggcgctggcgggcaacacgctcttcggttcgctcggcctcgacgtcgaggccagcatcggccaggcgatctttcccgaggacggcgacaacgaggacgcgctcctgcgcgccgccgacgcggccatgtaccgggtcaagtccggctgcgaatcgcagcgccaggtcgcgctgccgttctgatcaggaggaacggtgcgcgcccatctcgcggcgcgccttggcgccccagatccacacgtactggatgccggacgccgccgcgacgacgaacacgccggcgaacagggcatccagccagccgccggtccggatcaggccggccagggcgccgagcaccagcgcgagcagggcgaactcggcgaacatgtgcgtcttgccgagccaggtgggatggatttcgaggtggccggcgagcccgcgatagctcagcgcgcccagcacgatcaccgtgtcgcgcgcgaggatggccagcgtgacccacagcggaatggcgtcttccagcgtgagcatcaccagcgtgacgatgccgagcgccttgtcggccacggtgtcgagcgccgcgccgagctgcgtcgtctgcttcagcgcgcgcgccaggaagccgtcgaggccatccgacagcgccgccgccaggaacagccagcacgccggctcccactggcgctggagaatcagccaggccacggccggcaccgccgccagccgcagcagcgtgatgaggttgggcagattgaagacgcgttcgtgcatgccgctaccgtaatcaatccagcggctgtctggcaagctcgtcccacagtttgtccagccgcttgaccgacaccggataagacgtcttcagttcctgcgcgtacagggaaatgcgcaattcctccagatgccagcgaaatgcgtcgagcgcggcggatgccgcgccaagaccgcctgaaaggcgagcgtcaggcggcgtgccccttgcgggtaccgcgcccttcgcctgcgcgcgccgtgccaggtagcggttctgcagcgtgaggatgccggccatcgcgcggccgtcgcgctcggcggacgccggcagcttttccagccgcctgaggatgccgttcagatagcgcggcagatccttcagccgcgcccacggcgtggcgacgatgaaatcattcggcaccagcgcggcgagatgcgcctgctcgtcgcgcatcgggccgggaaactgcggcgccgcgcccagccgcgccgccacctgggcgtggagatcgagaatcccggccacgtcgcgcagcagcgcctgcttcaccacggcgacgcgcggtttggcgcgttccttctgtttgtcgaagtccttttgaccgcgcggcgcttcgtcgtcgcccagaagcgcgcgcgcggcgatcgcgtccagcagttcggcgcgcagcttgtccgcgccgccgaaggcgcggtatttcagcgccagcgcggtttcccgcgcgaggtccttgtcgagctgcctgaactgcgcggccagcgccagccgcagcaggcgcaccgcgccgcgccgcgtttccgcctcggccgccgcggcgtcgtcgagcaggcgcagatcgaccgcgtcgccgctatcgaccagcgcgggatagcccgtcagttcgcgcccgccgcgtttgaatttaatctgcgccggcaggtcaccgaaattccattcggtcagcccgctgcgctcgaaggcgctgtcctccgccccgccgccgtaggcgatgcgcgccgtcccgcccagttgtgcgcgcagcgcggccaggtcacgcccgctcgccagctcctggccgccatcgtcgatcacgctgaaattcatccgcagatgcgcgggcaattcgcccttccattcgtcgggatgaatgtccgcgccggtcttcttgcgaatccaggcggcgagcgcctcggtcggcatccgctcgcccggcggctcggccgagagaaacgccgtcaccgcgtcgggcagcggtatcagcggacggcggcggtccttgggcaggttcttcagcaacgcggtcagcttttcccggatcagccccggcaccagccactcggcgcgcgcggcgtccacccggttcagcagatacagcggcagtttcagcgtcacgccgtcgagcgggtggcccggctcgaagcggtatttgagtttgcagcccacgccgtcgatctccatcgactcggggaacagcgtgtgatccgcgccgatgccttcggccacgatgtcctcgcgcgcgaggaacaggatttctggattcgccgcctcggcctcgcgccgccactgctcgaaggccggcccgttgtggagtccggccgggatgcgcgcgtcgaacacgcggaagatgcgctcctcgtccagccatacgcccgatttgcgcgccttgtgttccagcgtttcgatttccctgatcagcgtgcggttgtgcgcatgccacggggcctgcgtgtcgtattcgcccgccaccagcgcaccgcggatgaacagctcgcgcgacagttccggatcgatggggccgtagtggatgcgccggcgcggcgccagcgtgatgccgtagaggctcacgcgctcgaaggccgtcacgcgcgcgctttcccggtcccagtgcggctcgatgtacatccgggtcagaagatgccggcccgccgcctcgatccactccggccgcacttcggccacggtgcgcgcgagcaggcggccggtgtccgtcagctcggcggcgacgatccatttcggacctttcttcgccagcgccgagccgggatggatcgacaacttgatgccacgcgcgccgaggtagttgccttcgcccggcttgggccgcgccttcgcctcgtccgccttgaagccgacgttgccgagcaggcccgcgagcagcgcctgatggatcgcatcgtagccggcgtccttttcgttttcgcgcaaacccagctcactcacctgcgcatgaagctgcccgtggatgtcgcgccattcgcgcatccggcgcggcgacaggaaatggtcctgcagcagcgcctgcaaagaccggttggttttcttgtgcttcaactgctcgtcgtaccacgtccacagcctcagccagcccatgaagtcggagcgctcgtcctgaaacagtctgtgtttctcgtccgccgcctgcgcgcgttccatcggccggtcgcgcgggtcctgcaccgacagggcgctggcgatgacgaggatttcgcgcacgcaacgctgctgttccgcggcaagcagaatccgggcgatgcgcgggtcgagcggcagcttcgcgagctggcggccgattttcgtcagttggcccgcttcgtccagcgcgtgcagttcggcgagcaactggtaaccgtcggtgacgagccggttgcccggcgggtcgatgaagggaaagccgaccacgtcgccgaggttcagcgatttcatccgcaggatcacgccggccagcgaggaacgcagcagctcggggtcggtgaagcgcggccggttggcgaaatcggcctcgtcgtagaggcggatgcagatgccgtcggccacccggccgcagcggccggcgcgctggttggccgaggcctgcgaaatcttctcgaccagcaactgctcgaccttgttgcgcgccgagtagcgcttcacccgcgcagtgccggggtcgatcacgtagcggatgcccggcacggtgagcgaagtctcggcgacgttggtcgccagcacgatgcgcctgagcgcagcggtcggccggaagatcgcgtcctgttcggccaccgacagccgcgagaacagcggcaggatttcggtgccgggcggatggtgcttccggagcgcctcggcggtgtcgcggatctcgcgctcgcccggcaggaacacgaggatatcgcccggcccttcgcgcgccagttcgtcggtggcgtcgaggatggcctgggcgaggtcgggcgtctcgcgcttgttccctttcccgcttgcgcgcgcgggagccccgcgcccctctcccccggcccctcccccgcttgcgggggaggggagggcatcgtcgcgctcgatcggccgccagcgcacttccaccggataggtgcggcccgacacctcgatcaccggcgcgtcgttgaagtgcttcgagaagcgctcggcgtcgatggtggccgaggtgatgaccacggagagatcggcgcgcttctccagcagggtcttcagatagcccagcaggaaatcgatgttgaggctgcgctcgtgcgcttcgtcgatcaggatggtgtcgtagcggctcagcagcggatcgccctgactttcggccagcaggatgccgtcggtcatcaccttgatcgcggtgtccgcacgcaccttgtcggtgaaacgcaccttgtagccgacgatgccgccgagttcgccgcccagttcctgcgcgatgcgcgccgccaccgagcgcgcagcgatgcggcgcggctgggtgcagccgatcagctttccggcgcgcgccgtccccgatccgagccgcgcttccaggcacatcttgggtatctgcgtggtcttgcccgagccggtctcgccgcacaggatcagcacgcgatgcgcgcgcagcgcggcgaggatgtcgtcgcgccgggcggagacgggcaggtcggggtaatgaagggtcgggggcgtcaattcgtgtcctgcctgaacgggaccggcggcaggccgggccgtcatttgttctggatgtagcgtgcgtcgtcgaaggtttcgagccagtcgggcttgtagaccgccatcacggtcaccgccatgccgctcatgaaggcctcgccccaactgataagcaacgtggcgtagggcgtgtaatgcgtgaacaggtattctgtggtgtaggcgccgctcgccgccatgacgaaggtggtgacgagcccgatcgccgccaccgacagggcgccgccgagaaagccgttgccgagcacgtagatgaagaaatggttgggcaggcggcggtcgagcagacggtagagattccagctcaccgccgccggcagcgccgccgtcagcagcgcgtcgaagccgagcgcgtaccaggcgcccttgccgaaggcggcgttcgcggccagcaccagcacgccggcgaaggtggcccgccagaagccgaacatcatcgtcagcgcggcgatgccgtagagatggaagctcagtcccggcttgacccctgtgcggatctgccacaacgccagcaccgccaccgtggcggcgaggaaaagattgagttttgccggttcgcccagccgccgccagtcgcccgacatcatccagcgccaaccgagcaacgccagccccgcccagccggcgagcagcagcgcttcgggcaatgccagggaagcggggtttagcacggtagaattcatgggcgaattttacgcgatgctcccttgcccccatgcctgccgatctcgcccgcccgctttccgacgacgaactcgccgcctacgacgacctgctgcagaccgccggcgaacgggccgacctgtcgctgtcggtggaagaagccgacggcttcaccgccgcgctggtcgtggcgccccgccgggccgagccggcggaatacctgccggtgctgctcggcgaggcgggtctggacgtattcgagaccgacgccgagcgcgcgctgttcgaggccagcttcgcgcgccgccgccgcgagatcgaacgcgcgctcgccgcgccggtggaaaacctggccgaccccaaggcctactcgccgctgatcctcgactggcaggccatcctcaaggagatgcccgcggacgaggccgccgcgctcaaggcccagggcctgccggcctacggcgaaatctgggcggccggtttcctgctcgcggtggaacactgggaagccgactgggcgctgccggaaggcagcaaggacgaacagttcgtcgacgcctgcctcgaccccttctacaccctgacgacgccccgcgacgaatggacggcggacgagcagaagctcaaccgcgacgcgcacgtggccaacgccatctggtcggtgtacgacctgcgcgaattctggctcgaccgcgggcgcggcccgcgcgagccggttcgcaaggcgccggaacccggacgcaacgatccctgtccctgcggcagcggaaagaaattcaagaaatgttgcggcaccgcgcccgactgaccgctcactgctcaccgccccaccatgaacctcgttctcttcgatctcgacaacacccttctcgccggcgattccgactacgaatggggccagttcctcatcgccaaaggcgtgatcgaccgcgcccaccacgaggccaggaaccgcgccttctacgaagactacaaggccggccggctcgacatccacgccttcctcgcgttcgccctgcgccccctggcgacgcacccgcgcgaccagctcgacgcctggcacgccgaatacctggaaacgcgcatccggcccatgatcacctccgccgcgcgcgacctcgtcaagcggcacctcgacaccgccgacctcgtcgccgtcatcaccgccaccaaccgcttcgtcaccgcgcccatcgtgcgggaattcggcatccctcacctgatcgccaccgaacccgaggaaaagggcggccgcttcaccggcgaggtcgccggcacgccctgcttccgcgaaggcaagatcacgcggctggaacagttcctcgacgcgcacggcacccgcctcgactgcctcgacaacagccgtttctacagcgattcgctgaacgacctgcccttgctggaaaaagtgaaacaccccgtcgcggtcgaccccgaccccaccctgcgcgtgcacgccgaaacccgcggctggcccgtcatctccctgcgctgacatgagcctgcccgccctgaccgaagccgtggccagccagcgcgaagcgctggccaacctgctgcgcgaaccgcttgcgctcgtcgccgaagcctgcggccgcgtctggcccaaccgcgccgcgctcaacgccgtgctcaccgacgcgctcgccagactgcccgcgtgcaaatatctgtacgccaccgacacgcacgccgtgcagatctcggacaacatcagccacgaaggcctcatcgaaaccgattacgggcgcgaccgctccaaccgtccctacatgaacgaagccgtgccgagccagggcttcctgctgtcccaggcctacatcagcctgcgcgccaagcgcccctcgctcaccgccatccagatcgtgcgcgaccgggaaggccgcgtgctcggcttcgtcggcgccgatttcgacctgcgcaacctgccgctcaccgccaagctctacgacgaaccgaccacctggcggcagatcaagggcgaccccgccatccgcggcggcgtcttccagcagacccgcagtgaaagcgcgatggaccgcgcgctcgacaccgtgctcggcgtaatggaggaattcatgaccgaccgcggcgtcttccacggcaagctgcacttctccagcagccgcgccaccgtgtggctctacgacgacccctaccgctaccgcctgctcgacatcgacgccctgaccgaccccgacacctgcctcatctacccggtgcgcccctaccccgccaacgccgtcgtcccgcgcgagcgaatccgccccgtgctcgacgccatcggcgccctgcgcttcatcgacgacaccttctacctgcgcgccggctcgctcaacatcatgaacggcatggtcggcctcaccttctcgtgcgacggctcgcactacctgccgtgggacgaattcctcgccaaggggcgggaattctgggcgagcggcgtgacgaccggataaacccttgtcagcgcaacgggtatcgcgcacactcaggccataacaagcagaacccgtgcacagagcacgcgacatgaacaccgggtttgagcagactcgacgaactttatcgcctgcacgacaagtacagggccgacctgccgcgttccgaatcgagtggcacgccgagcagttcgcgtcccgacgacttagtctatgtccagccaagcaacgctaaagacttccgcgaaatgccccgaaaaaacagaaaggcccgagacaagctcgggccttgggttcggttcgtcccttgcgggactaccttattgcagcaacggctctcaccccggaaagctacaacgcgcccaagtttacaccagaggagacgcaacacaacatgaataacaaaagcagtcatgcatacacactcggactggatatcggcatggcttcggtaggggccgcactgcttgcccaggaccacatcctggccttgcacgtccgcaccttcgacaaggccgaaaccgccaaggaaggcgaaccgctcaacaagacccggcgcgaagcccggttgacccgccgtcgcatccggcgacgcgcgcatcgcctgttgcgtctcgcgcgttgcatgaaacgcatggggctgatcgagcgtgccgaaccccaggcgttcgcacttaaggagacctcgccgtggacactacgcgccgaagggctcgaccgtcgtcttgagcccaccgaatgggccgccgtgctctatcacctcgtcaagcatcgtggtttccaatccacccgcaagagcgaagcgaaggacgatgaaaaggctggccagatgctcagtggcgtgtcggcgaatcaacagcgcatgaaaagcggcggctggcgtagtgtcggagaaatggccgcacgcgatgccgccttcatcaacgccaaacgcaacaagggtggctcatacacgcataccttcgcgcgcgccgacctgacggacgaactcacgctgctgttcgtccaccagcgcgaaaccggcaatccacacgccacaccggaattcgaagcccaaatacacgatctgctgctcgcccgccgccccgcgctggctggcgacgatctcttgaagcttgttggaaaatgcacactggaaccaggcgaataccgcgcgcccaaggcaagctacagcgccgagcgccacgtctggctgaccaagctcaacaacctgcgcatttcagaagtcggcgagcaacgcagcctgactgcgggcgaacggcaagtcctgctcgacgagccctacaaactcgccaagctgacatataaacaggttcgacagaagcttgggctgatcgagtccgcacgtttcaacagcctcacttatcgaggagacaaagacccggaggctgccacactgttcgaagccaaggcctaccacatactgcgaaaagcctatgaagccgccggtctcaaggatttctggcagcgtgacgcgctcgactccgagaaactggatcgactcgcatacgcactgacctgctacaaaaccgacgacgacattcgagccagtctcgcggaacagggtgtagagccgacaattgccgaagccgtgctcgatgtgtcgttcgacaagttcgttgcactgtccctgaaggcactgcgcagtattctgccattcatggagcagggccagcgttacgacgaagccgtgcaaagcgcaggctacgcgcatcacagccagttgaacgcggatatcgccaagtccttcgccttgccgccgcccgaccgcgaccagatccgcaaccccgtcgtctaccgtgcgctcaaccaggcgcgcaaactggtcaacgccatcgtccgcgaatacggcccgccggctgccgtgcacatcgaattggcgcgcgacctgtccaagcccatcgatgaacgtcgccgcatagagagagagcagaaggaatttcaggccaacaaggaaaaaaaccgtgccgacttcgtcagccagttcggcttcgaacccaaagggctggatttgcagaaataccggctttatcgcgagcagatgagccaatgcgcctacagccagaagcctgtcgacgtgacgcgcctgtttgagccggggtatgccgaaatagaccacgccctaccctactcacgtagtttcgacgacagccagaacaacaaagtattggtactgaccgccgagaaccgcaacaaaggtaaccgtaccccttatgaatatctggatggcgcgagcaacagtccgcaatggcaagcattcgaggcctgggttttatcgagcaaatcctaccgacgtgccaagcgcgaccgcctgctgcgcaagcattttggggaaaacgaggcccgtgaattccgtgatcgcaacctcaacgacacgcgctacatttgccgcgcgttcaagcgcatgatcgaagaccatctgcaatggcattccgtaagcgacgccgggaaccgctgcgtcgtcgtctccggccagttgaccagcctgctgcgtgcgcgctggggcttactcaaagtgcgcgagaacggcgacctgcaccacgcgctcgatgccgccgtcatcgccgccgcaagccgcgcgcttgtcaagcgcatggccgaccatgcgcgacgcgatgagctcgcgcaggtacgcgatcgctacatcgacccggaaaccggcgaagtgctcgaccttgccgccttgcgcgatctggaagagcgtttccccacaccgtggccgcatttccgcaccgagctcctcgcgtggctcgcacccgatccggaaaccggtctggccgacgtacccggttatgacgaggcgcggcgcgcgaacgtccgtccgatacgcgtctcgcgtgcgccaacccggcgtgggctgggcgcagcgcatcaggaaaccatccgctccgtgggtcgcgaaggccggttgctgcgcgacggccaatcggcagtgaaaaccccgataacaagcctgaaactgaaagacgtggacaacatcgtcggcgcggaagacccgcgcaacgccatgtggatcgctgcactgcgcgagcggctggcgcagttcggtggcgatggcgcgaaggccttcgcgcccaaccagccaccccttctgaaacccagcgcaccgggcaagacggcaccggccatccgcacggtgaaactgctcgccacgcagaaaagcggcatcccgatccggcagggcatcgccaacaatggcgcgatgctgcgggtggatgtgttcaccaagggtggaaagttttacacggtgccggtgtatgtggcggatgcggcacggacagaaccgccgaatcgggcggtggtggcttacaaacctgaagaggaatggccggaaatgggcgaaagccatgctttcctgttcagcctgcatcctaatgactgggtacgcctgagctataagaacggcccggtcaaagaaggctattactccggtttgaaccgggcaacaggcgctatcgatatctgggttcacgaccgaaattccggcacagtcaaaaacggtctttttgaaggatgcggagtcaaaaccgcccttgccgtcgagaaattccacgtcgatctgctcggcaagctacaccgcgcccacacagaaacccgccggccgctgcgccgccagaaagccaaaggctgactgacatgggctggcgcagcgtcgtcatcgccaatcccgctacgctggattttcaccagcgcgcattacgcatccggcaaggcgacaacactgcgcatgtgccgctggaagacgtcagcgtactgctgctcgaacatcgggaaatttcgctcacgaccgcactgttatcggcctgcgccgatgcacagatcaccgtgctcaccgtcggccaggaccaccacccgaacggcatttttctgccctacctgccacactcgcgtgcactcaaggtcatgcgtgctcaactcgataccagcgagcctgcacgcaagcgcctgtggcaaaccgtcgtccagcgcaagatccgcaatcaagcggcagtgctcgggcaccgcgaaggcacggacgcggaacaacgactcctgctacgcatagccgacgacgtgcgctccggagactcgggacatcatgagggtcaagccgcgcagcgctatttccgcgcgctatggggcgatgacttcactcgtaaccagccccgcttctacaatgccgcactcaattacggttacgctgtcgtccgcgccgcgcttgcgcgtagtctcgtcgccttcggcttcctgcctgccttcggcatccatcatcgcagcgaacagaatgctttcaatctcgccgacgacctgatcgaaccctaccgcccactggtcgatgcgcacattctgaaaagctggccgtttgagccagaacgtgaattaagccccaaggacaaacaacacctggttgccttgctccatcgcgatgtgcaaaccacagcctcacgccaaacgctactcgcttcaaccgacgcctgtgcggcaagtctcggtcagtggcttgaattcgccagccctgccgtgctggttatgcccattctcgacttggccggaggtccggatggctaatgccacccgccgttacatgcgcctcatcgtcttcttcgacttgcccactgtaacgaaagcggaaaaacgtgcctacacgctcttccgccgctttttgttgcaggacggatacgacatgattcagtggtctgtgtatgcgcgcatggtcaacggcttcgacgacgccgacaaacatctcaagcgtctgtccggaaatctcccgaaacaaggctcggtccgttgcctccaggttagcgaaaagcaattttccgccatgaaactactcgtcggccaactgagttttcaggaaaaaaccgtcaacgcccagcagatcctgttgttctgagcacaagaaaaaaaggggccaacccgcgtgaatcaaggattcatgcgggttggcgaggatggcgtgtagctttccggggtgagagagggagctacaaccccgtggtggtgctaccgttattgtcttgggtgtagctttccggggtgagagagggagctacaacctgggaaacgaaattctgctggtcgtcggcagtgtagctttccggggtgagagagggagctacaacttgttcatcgtcgctccggttcatccccgtagtgtagctttccggggtgagagagggagctacaacccggccatgatgccgacgtgccggcggcccagtgtagctttccggggtgagagagggagctacaactcgcggtcggctacagcacagcgccaaccgagtgtagctttccggggtgagagagggagctacaacgatgatgagttcacccaatcaatatagccgagtgtagctttccggggtgagagagggagctacaacccgctgtgagcgtgcgcacgttcggcaacgagtgtagctttccggggtgagagagggagctacaactagcgtgccggaaacgtacagcacgccgtaagtgtagctttccggggtgagagagggagctacaacccagataccgaagtggccgactagatacgtagtgtagctttccggggtgagagagggagctacaacgctcgaccgctccatgcgcgtgccgcgtcgagtgtagctttccggggtgagagagggagctacaacacgactgtcatgttatcgctgccgcacttgagtgtagctttccggggtgagagagggagctacaactcttcggtgaaggcatcgcgctcaacggggagtgtagctttccggggtgagagagggagctacaaccgcggccgttgcgaatgatgccgcgccaggagtgtagctttccggggtgagagagggagctacaactgcgcggcgacgttcttcgggttgacgcgcagtgtagctttccggggtgagagagggagctacaactgtccttgcagcggcccaccgcgctcaaccagtgtagctttccggggtgagagagggagctacaacggcgcgcgcgcaacctgtgaacgatcgacgagtgtagctttccggggtgagagagggagctacaacgcggccttcggatagcagtcgagcgccgagagtgtagctttccggggtgagagagggagctacaaccctcctcgatcatggccttcacggattccaagtgtagctttccggggtgagagagggagctacaactgcgggactacaagggcaaaggccagtattagtgtagctttccggggtgagagagggagctacaacgacgggatcgtaggcgggattcgatacttcagtgtagctttccggggtgagagagggagctacaacgcagatatccgcgtcgcctgcaaacgcaggagtgtagctttccggggtgagagagggagctacaacgaaacgggcacccataaccacccataaaaaagtgtagctttccggggtgagagagggagctacaaccggtttcgccgggccggtcggcaaaggcggagtgtagctttccggggtgagagagggagctacaacccagagtttacagctatctgcggttttccgagtgtagctttccggggtgagagagggagctacaacgcggctgtcgtgggtagccgcataacccgtagtgtagctttccggggtgagagagggagctacaacacgacagcggcagcccgctgaccctcggcgagtgtagctttccggggtgagagagggagctacaacaccaggccgaacaggcgctcgcgatcttcaagtgtagctttccggggtgagagagggagctacaactccggatgcttggcgatgaaaggccgctccagtgtagctttccggggtgagagagggagctacaacccttgtcgggcggcatatccaccttgaaaaagtgtagctttccggggtgagagagggagctacaacaatcagcaaatggccggagtcaagggacgaagtgtagctttccggggtgagagagggagctacaaccagggcctcaccgcattgcagcggcaggggagtgtagctttccggggtgagagagggagctacaacgcacccgaaatcgcacctgcgcggctacagagtgtagctttccggggtgagagagggagctacaactgtccttgcagcggcccaccgcgctcaaccagtgtagctttccggggtgagagagggagctacaacggcgcgcgcgcaacctgtgaacgatcgacgagtgtagctttccggggtgagagagggagctacaactctccatcgtgaactgcggttcgtgcgtgaagtgtagctttccggggtgagagagggagctacaacggaaaaggtcgcggccattcaggcgatggcagtgtagctttccggggtgagagagggagctacaactcggcaggagggatttaccctcctgccgagttgagccacctttcggtggctgccatcaatgattgaacaaaacacgccgaaaccgttgtcgtatctgtcttgaatccgggctcacacctatcgaggcttacccaggcctgtacacatgggatctggtctacgacgatttcatcggctacatggcagaggcactggacacactgacagtcaagtccggtgtcaccctgatgacttgaatttggctcgaccgactcaaatcacgacttcaccgccgcccagtccaatacccaggctggcgactgtggctcgacatggccaggacaatgacagaatcggtttcgatccggtagaccaggtcgtatggaaacccttgcaaagcgggctttcttgcagccttctgagtcgctgtcccaattcggggtactcaagaatcaggtgaagcgcatggttgacagccggatcgagttttctggcaatagcggggctggcttgtgtgaggtagtaatcgacagcgccttcgtaatcgactctggccgatggatgccaacggtgtttcacgctccggcttcacgtagtttcttatcaatttccgcgagaacttcttccccagggatcaattccacgtttccggattcgatttcttcaatacgccgtgcgatttcggcatctcatgcggcttgcacagactcgcgtgatttgacactcacccacagccaatccgcaaggtcggcacgcgcctcggggggggagtttcatggcctccaccttgatttgttcgatggttaaagacatcgctcaatctccttggctccgtatgcttgaaccatgcacgtttgcctgtattttaagcaagtggacgaccctgttcccctcaccgcgctgaatcactgggtttattgcccgtatggtcggatcgtctggggttaatcggcaaatgcgacgcagtcgaattctggccggcttcaacgccgggcgcggatagaaacaaggctttcgttgcccgagcaaacaaaatctgccccgcccaatcttcgcgcatggcctgcgcctggacacgcttcgccgtgactcacgccagcgcgcgcccggcgaacacaacggcgatcgtcaccagtcccaggatcaggttgatgccgatgagccggcggatctggccgagcgcggcgccgccggtcttccagtcctgtccggcgacggcgcgcttgagtttcttgtagggcgcgaagtagacgtaggcgaagatcagcatcatgacgatacccagcaccagcatggtcagcgcgtgatgcggtgcggcaagcccgccgaagaccatgagcatgtgcaggccgctgacgaggatgagcaggaccgagatccacacccagggaaagaacttgtcgaacacgccggcccacagggtcaggcgctgcggcggttcgagcacgctggcggcgacgggccgcagcgccagataggcgaagaacatgccgccgacccagacgacgatgccgaggacgtgcagcagaaacatgagttgcagcatggggcttcctttcagagcaggcggttttgatcgaggacgagtttgaccggcgcgaaactgcgccggtgctgcgggcaggcgccctgggccttgagcgcgtccagatgctgggccgtgccgtagcccatgtgccggtcgaagccgtaggcggggtaggtttcgtgcaggcggcgcatgaaggcgtcgcgcgcggtcttggcgaggatggaggcggcggcgatcgcggcgaccttgtcgtcgcccttgaccacggcctgcgatcgccacggccattcggggcagcggttgccgtcgacccagacgtcgtcgggcgcgcggccgaggccttcgacggcgcgctgcatggcgagcagggtcgcgtgcaggatgttcagccggtcgatctcctcgacgctggcttcggccacgcaccaggcgagcgcttcgccgcgaatggcctccgccagtcgttcgcgcgcggcggccgagagtttcttggaatcgcgcaggccttcgatcggccgcgcggggtcgagcatcaccgccgccgcgacgaccgggccggcgagcgggccgcgcccggcttcgtcgacgccgcacagaccgggcaggccccagtgcaggttcatgcggcgcgttcctccaggtacggcgacacggcttcggcgatgcgggcggcggcgttctgccgcaggctcgcgtgcatcgaccggaagcgttcgacggccgcttcgcgacgcggcgcgtcgtccagccaggcgagcgcgtcggcggccaggttgtcgggggtggcggcttcctgcacgcgctcgggcacgagaaaatcgcgcgcaaggatgttgggcaggccgatccacggctgcagcgccttgcgccgcatgagccaggcggtgagcgcgggcacgcggtaggtgatgaccatcggtttcttgaacagcgcggtttccagcgtggcggtgccggacgcgacgagcgcgacgtcgcaggccgccagcgcgacgtgcgactggccggccagcacggtcaggtccagatcgagccccgcgcgtgcccgctcgatcagttcggcggcggcctcgctcgcggcgggcagcacgaagcgcgcatccgcatggcggcgcgcgatcaggcgcgcggcttccagcatcaggcgggcgtgccgtttcacttcggacagccggctgccgggcagcagcgcgaacacgggcccggcggcgagattaagcgccgtgcgggcggcgtcggcgtcgggttcgagcggaatcacgtcggcgagcggatggccgacgtaggcgacgggaatgccggcgtcgcggtagatcgcttcttcgaaggggaacaccaccagcatgtgcgagacggcctcgcggatcgcgtgtatgcgctcgggccgccaggcccagatcgaggggctgacgaaatgcacggtggggatgccggcggccttgagccggcgctccagcgaaaaattgaaatccggggcgtcgatgccgacgaagacgcgcggccgctgttccaggaaaagcgcggccatgcgtgaacgaatgcgcagcagttccggcaggtggcgcagcacttcgacgtagccgttgaccgccagtttctcgctcgggtagatcgcctcgacgccggcttcggccaggcgcgggccggcgatgccggcggcgcgcagatgcggataccgctgttgcagggcacggatgaaatgcgcgcccaggagatcgccggacgcctcgccggcgaccaggccaacgtccatcagcggatgatgccgcgttcggcgcgcgcgatgaagtcgagcagttgccggacttctggatgcgtcgcggcttccgctgcgagtctggcctgcgcctcggcgacggtgttgccttcgcggtagagcgtccggtacgcgcgcttcagcgcggacagcgattcggcggagaagccgcgccgcttgaggccttcgctgttgaggccgtgcggctcggccgggtggccggaggccatgacgaagggcggaatgtccttgaacaccacggtcgagacggcggtcatgacgtgcgcgccgatcttgcagaactggtgcacgccggtgaagccgccgaggatggcccagtcgccgacttcgacgtggccggcgagcgaggcgttgttggcgaagatggtgtggtcgcccaccacgcagtcgtgcgcgatgtggacgtaggccatgatccagttgtcgctgccgatggtggtggcgccgcggtcctgcacggtgccggtgttgaaggtacagaattcgcggatgacgttgtcgtcgccgatctccaggcgcgtcggctcgccggcgtatttcttgtcctgcggcgactcgcccagcgagacgaaatggaagatccggttgcgcgcgccgatcgtggtgtggccggtgatcacggcgtgcgcgccgaccgtggtgccggcgccgatctcgacgtgttcgccgacgatcgagtaggcgccgatctcgacgtcgtccgcaagctgcgcgccggatgcgacgagcgcggtgggatgtatcctcggcatgctcacttgtcgcgcagggtggccatgagctcggcttcggcgacggtttcgccgtcgacctcggcgcggcccgcgtatttccagatgccgcgcgtctcgcgcaggatgtcgatcttgagcacgagctggtcgcccggcttgaccggcttgcggaagcgcgcgccgtcgatgccggcgaaatagaccacgccgatgttctccggcgcgtagttcttggtcttgaacgagaggatggcggccgcctgcgccatcgcttccaggatgagcacgcccggcatcaccggcgcgcccggaaaatggccgggaaagaagggctcgttgatggtgacgttcttgatcgccgtgatgcgcttgccaagctccatttcgatgacgcggtcgaccagcagaaagggatggcggtgcggcagatactgcgtcacctgttcgatgtccatgatcatttcttttccagttctcccaatttcttttcgagtgccttcacgcgcgcgaccagcttgtcgagattgcgcatgtggacggcgttgcgctgccacacctcgtgctcggaaaacggcagggccgaagtgtaggtgccgggacggggcaacgatttggtgatgagggtgttggtcgagatgcgcgtgccgtcggcgatctcgatgtggccgaagatcatcgctgcgccgccgatggtgcaatggcggccgatcttcgcgctgccggcgatgccggtgcaggcggcgatcgcggtgtgcgcgccgacgacgacgttgtgcgcgatctggatcaggttgtcgagcttcacgccgtcctcgatcaccgtatcctccagcgcgccgcggtcgatggtggtgcaggcaccgacctcgacgtcgtcgccgatgcgcacgcggccgatctgcggaatcttctcccaggccccttcgctgggcgcgaaaccgaagccgtcggcgccgatgacgcagcccgaatgcaggatcgcccgggcgccgatctcgcagcggtggtagaccgtgacgttggcgtgcagcaggcagtcggcgccgatccgcgcatcctcgccgatcacgcagttggcgccgacggcggtgcgcgcgccgatcaccgcgcgcgcgccgatcaccgcgccggggccgatgctggcgtcggccgccacgacggcgtcggccgccaccgtggcggacggatgcacgcccataggcgggcgcggcgcgggattcagcagcgccgacacgcgggcgaaatacagataggggttgggggtgaggatgcgcggccggtcgctcgcgtcgcgggcatccggcggcaggatcagcgcgccggcgcgggtgtccgcaagctgcgcgaggtacttgctctgggcgacgaagccgagttcgtccggacccgcccgttcgagcggcgcgacctgcttcacgcatgccgaaccgtcgccgacgagctcgccgccgaaacgggcaacgagctctgctagcgtcacggacatgcgcgggcgggacgccttacttgccgccgagcgccttcatcacccggtcggtgatgtcgttcctgggatcgacgtagaccgcctgttcgacgatgatgtcgaatttctcggccttggcgatgtcctggatcgccttgcgggcccggtcctggatctggccgagctcctcgttgcggcgcaggttgaggtcttcgcggaattcgcggccctggcgctgcagctcgcgattgaggttgcccaggtcgcgctccttgttcttgcgctcgctctcggacatggtcacgccgtccttgtcgagcagcgtctgcagatcgcgcgcctgcttggccagcttttgcagctcctggtcgcgcgcggcgaactcgcgttcgagttttttctgcgcagagacggacagcggcgcttcgcgcagcaggcgctcggtgttgacgaagccgatcttggcgtcggccgccgcggccggcatcgcgacgaacgcggacgccagggccaggcttacggcaaactgcttgaacatcatgatggtcacactccgttgagctgccctcagaacacgttgccgagggtaaattggaagatttcctccttgtcgcccgatttgctgaccagaggctgcgccaggctgaacttcagaggaccgagcggcgacacccacagcacggccaggccggcggaatagcgcaggtcgccaaacgcgaatttttcgtaacggccctggccgtcgaacggaccgaaagtcgcgcccgcgtcgaagaaggcggacatgcgcagcgactgg

SEQ ID NO: 2880 - DNA, 23323 bp, synthetic construct
  variation 12413..12429: note = note, n is a, c, g, or t
  misc_feature 1..23323: note = Synthetic
  source 1..23323: mol_type = other DNA
  variation 9515..9525: note = note, n is a, c, g, or t
ttgtgataaagattaggagaaagcatgttaggcaataaaacattaaagtcagcattgtttgttagtttgttggcgttgacaggtttaatttcagtaaatgcaagtgcggctgatattacgcttgttgcaactcaagatggttcaccgctcaacattaaaccagagtcattcgatacgccagtggctaaagaatttttagcgacaggaaagaacaattacgttggtaatgaggatgcaatcaaagcaggtaaaaagaaatataatctatattcttgcaatgcctgccatggtggccatggtgaaggtgcaattgcaccaggcctgactggagctacgatgaaatatgctaaaaacctaacaaacaaaggcatgtttgaaacgatttggcacggtacaaacggtggtatgggtgcaaaaggtttgggtttaatggtaccagaagacccgacagaaggtttgaaagtggatgatgtgttaaaagtaattgcttttattcgcagtaactctaagattacaggcaatgagtaaagagtaaacttttaaacaatgcagcattgaaaaacggtcatttatatggccgtttttttattattttgttgtaaaatgttaatcagttacatttttataacaatgaatggaaatgattgatatgaataaatatttacttttagctgtgcttttagcaacattaggcgcatgtggtaaatctggttctgatgcatcctctagtggcactacatcagattcagctgcagttaaagcgatagactttgtaacaacgcaagatggcacaccattaaaaattgatgtggctttatttgccacgcctagtgctaaagaatttctagccacaggtaaaaatccatatattggtaatgatgaggcgattgcgaaaggcaaaaaagtatttcaaatgtattcatgtgttgcttgtcatggcggtcatgctgaaggtgcggtagcgcctggtctaattggacctaactttaagtacgctaaaaatgcaaccaacaaaggtatgtttgaaacgatttggcatggtacaaatggcggtatgggtgcaaaaggtattggcttgatggatcctactgatcctaaaaatggcattaccccagatgaaacattaaagataattgcttggattcgcagtatgggtaccgggattactggtaacgagtagtcattgacctagaaaaatagcgcgcttactgtcatgcagtaggcgcgtttttgtttttaagcaattaccaatcaatactgactttgtgtatatcgccttgcggtgatagagcgtagtctttagactctttttgagccattattgatttataattatcatcaagatggcagataaatgaaaataggcgaggatttttgtgagtatcaatgaacagcaagatttgcatcatgtcgtcattgtgggtggtggtgccggtgggctggagttggctacaaaacttggcgactctttaggccgacaaggcaaagccattattacgctcattgataagtctaaaacccatgtgtggaagccattactgcatgaaattgcagctggcagcatgaaccccgaaaaacatgagttagtgtatcttgcgcaagcacactggcatcatttcaaattccgtttaggtagcatggatagcctggatcgtgccaaacgtgaaatatctattgcgcctaattatgatgaagatggggtagaggtgataccgcgccgcacttttaaatatgacactttaattattgcggttggcagcactaccaatgactttggtgttaagggtgcgcaagagtattctattgcactcgacactcaagatcaggcggagaagtttcatcgacgtttgcataatgctttattgcgagcgcaaacacaaataacgccagtgcaagctggtcagttagaagtagtgattgtaggcgcaggggctacgggtgtagagttatctgccgagttacacaataccacgcgtgaattagcggcctatggcttggataaaattgacccagaccgggacatacaaatttcattgatagaggcaagtgagcgggtgttgcctgcattaccgcccaaactttctaattcggtagatttagagttaagaaaactgcgtgtacatctttatactggtgagcgcgtgacagaagtcactagcaaaggcgtacaaacgcacactgggcgttttatcccatccgcattagtggtgtgggctgcaggtattaaagcgcctgactttctccatgaaatagcgggtttggaaactaatcgtatcaatcagctcgtggttaatcgtaatttgcagactacgctagatgaaaatatttttgcttttggtgattgcgcggcttgcccttggcttggtcatggtgatgaaactgtgccacctcgcgcacaggcggcacatcagcaagcttcaatgttagtaaaaacagtgaagtatcgggtagcaggcaaaaataatttgccggaatttatctatcgtgattatggatcattggtgaatttggggagctataccaccgtgggcaatttgatgggcgcactttctggcggtagtttgttgatagaaggttttattgcacgtactatgtatcaatcgttgtataaattgcacttgatggcgctgcatggtttttggagcatggcattattcacgctgtctcgcatgatttcaagacgcacagaggcgcaggtaaagttacattaacctggagttgtccacgaaatggggttggcaggtatttcaccgaaaggtgaaaattcgcaaaatcacgaaagtcactaacaaattcaaagggttatgtctgctgaaatgaaacccaataggtgagcgcaagaattgatttaagttcttgttttatttgttcatgtaacggtagcgtctgtggatgactgtcatgcatagactgacaaaaagtccaaatgcaatgacgatgagattatttgggatttcagcttttaccataagtagataagcaccaagcagcaacagtatcccgatatgttcgttgaagttctgtactgctattgagtgaccagccccaactaactcatgtcctcggtgttgtaacagtgcattcaggggcacaacgaagaacccggcaagcgcaccgattacaaatagcagcgctgcggccagttgccaatgctgtacaaacgccatggccactacgagtaagcccatgatgatgccagcgggtaacactttagtgcattgttctaacttgatgtagcgcgctgcaacaatcgagccaaccgcaatgccaactgcaagtagtgccatgagttgcgtggcttgttcaagaccgaaattaagtgcactcgctgcccaggcgataacaaccaagcgtaatgtggcacctgccccccaaaataaggttgtcactgccagtgaaacttgcccgcgtgtatccatccataatgctttgaatgaataccaaaaatcgatcaacatgaaaactggatttttcttaggtagcttatgatcaataggtaattttggaatgtatatgttaaatatagcggctaccatatacagcgcggtgatgaacatcatcgccaagtaagggtcattactcgccaatatgccacctacaatcgctcctaaaataatggcaatcactgtagaaccttccatccatccattagcgctaacaagtttttcggggggtaaaagttcagttaagataccgtattttgcaggggaataggctgccgctccaataccaactataccgtaagcatataaaggcggcatgcctaaaatcatagcaagactaccagtaaatttgatggcgttggcgatgaacatcacgcgccctttaggcagcgcatcggcaaatgaccctacaaaaggtgcaagtacgatataggcgatgacgaaaaattgttgcagtaaaggggtatgccagtcaggggagttcatttgcacaagtaatgcaatagcggcaaataataacgcattgtcagccagcgcagatgtgaattgtgctagcagtaatgtgtaaaatcccttacacattttcattgcaagttacctttatcaatatattcttttcttgcattgttgcgtattctacccctagtgcggcgtctcaaattatgcatctttggtcacctataaaatttctgcggcaaagtctgccaagcgcgaacgctcaccacgttgtaaggtgatgtgtccgttatggccccagcctttaaagcgatcaaccacgtaagtaagccccgaactaccttcagttaaatagggggtgtctatttgcgcgatattgcctaaacacactaccttagtgccagggccggcgcgggtaattaacgttttcatttgtttgggtgttaagttttgcgcttcatcaataattaaaaacttatttagaaaagtacggccgcgcataaagttgagtgattttattttaatgcgggtgcgaattaaatcttgcgttgcggcacgcccccagtcacctgcattatcatcacttttattcagcacatctagattatcttcaagcgcgcccatccacggcgtcattttttcttcttcagttcctggtaaaaagccaatatcttcgcctactggcacggtaacgcgcgtcatgataatttcagtgtagatttttttatctaacacttgagtaagcgcagctgccagcgtgagtaatgttttaccagtaccagcttgccctaataaacttacaaagtctatttctggatccattaacaaattgagggcaaaattttgttcacggttacgtgcagtaatgccccacacgttatgtttgggcagtaagtgatctttcaccacctccagcaccgcagtatcgccatctacgctgcgtacaatggcatgaaaaggtttttcaaactcgtaataaacaaattcattgataagaaaagttttacataaggggcccgtgagtcgataaaacatgcggccagattcttgccacgattccatcgctttgctatgttgattccaaaagtcagcaggtagttctgtcatgccgctgtacagaatgtcggtatcttctaaaactttatcgttaaagtagtcctcagccagcacgcccatggcgcgggctttaatacgaacattgatgtctttgcttaccaaaaccacttggcgatcggtgtgttgtttttgtaaacaaatgaccacactaataatttggttatcggctttgctgcccgctaaccctggcagatctatgttgagttgtttggtttgtaaaaacaggcgccctgttgcttgtttgttgccgttaagcgataaagggcagcctaattctaaattggttaaatctgtgcctacaatttcttctagactacggcttacttggcgtgcattacgcgcaacttcagtgagaccttttttattgttatcaagctcttctaaggtgaccataggcaggtaaatgtcatgctcttcaaagcgaaaaagagaagaaggatcatgcattaacacattggtatcaaggacgaataacttggtgctaccgatgggttttttagccatacattactttctatgaaggtgattgaacaaaattaaagtatttgaattaagacgttttgaataaaatttaaagggtttgaataaagtttaaaacttctgcggcatgaccatctactttaacgccgcgccattcttttactagcgttccatttttatcaatgacaaaagtgctacgttcaatgccgcgcacttgtttgccgtacatgtttttcattttaatcacgccaaatagcgtacaggctagctctttagtatcggctagtaattcaaatggaaaggtgaatttagctttaaagttttcatgtgactttaaactatcacgcgacacgccaaaaatctctgtgttgtgttgctgaaattgtgcataggcatctctgaactgaacaccttgcgtggtgcagcctggcgttgagtctttggggtaaaaataaatgacgactgttttgccgagatagtttgaaagctggaaagttttaccgccggttgccggtaactgaaagtctggtgcaggttggtttagcattgcggtatcaatcttctatgtttaaagcctatcatcattgttgataaaaagcgttattaaggcaaggggatatttcatgaaaacgacatttttttagatgaaagacgggtgttagcgctgcttccaaaattgcgggtggttattagtcgggtagatgtaagtttttaggcaacgaaatgatcacgctggtgccgccctcaggccttgctacaaattgtagctggccacccaaagcgtcgcatactttgaaggcgaacggaataccaagccccgtgccaaatcttttagtcgtgggcgcactcatggcgcttgggtccggggtgaatggcatgccgctgccatgatctaataattctagaacaaacgcgctggcagtgattttaagttgtattgctatcgtgccttgattgcttgaagcatcaactgcatttaatagcaggttataaatcacctgttctaatagatgctgatccgtaaaaatgtaatcacttttagctgcgtttgtttttggccagattggtagagtgagccggatggattttttggcaattttttgttgaagtggctccaacgcaccttctacgatatctttgattctggtattgctgggctgaggtttgagtggatgcaaataagcgagcaaggcgccggtccagcgttcaagccgatctacggtgttgataataccttgtaatgactcacgcgtttcaacatcatgttcgggatcatccataacttgagcagtggcgcgaatgctcgctaaagggttgcgaatgttatgcgctagcatgggcaccaacaagccctgcgcggcttgcttttcggtacgcaccaggctttcttggcttgtgagtaacttgtctgccatctcgttaatcgcttttgatagcgaggcgagttcttcaatgccctctgcaggggctttatgggtaaggttgccagcactgatttctgcggtggcttttagcacgccctcaatcggttttacaatcgagcgttttaaaaatacgcgagagaatatcagcaataaaatcgccaaaattaacggtgtaaacaataaaaaagtagatttgcgtttactttcttcgagttgggcatcaagctcaacttgcttttggttgagtagctgttcagtacgcgcgagtaatgtttcgtagcgattaaaaagcccagcctcaatgtcggtattgagtatttttttaaggtcatcactggtgagggttgagtgctggtcaaacagggctgatgtttcacttacaaaagcttgatagccagcatgcagctcattgatggcggttttttcggcatcgccgactgctattttttgcaattggttaaagtggctttcaactgagcgtgtgaaattgttatattcagcacgcgcctcaatgtcatctaaaaagtaagcgtcaaacagctctttcatttggcggtataaatcaccacgcgtttgttgaacttcttgcaccactaaattgatacggttggattcttgactagactgctgctgtaaatgaatgccaatagcgccaacgacggcgactaaaaagatgagcaaaataaaagcgagctcgtgaatgagcaaaaggtcttttagggaatgttttttcttagtcactgcgtatggataggctagcgataaaagtattattcaagcttaaatggcacaggcacagtaattgtgaagttgttaccacgtaaggcttcaggtggcgtggggaaaggctgtgctttttcaaccatttctaacgcctgtttatcaagcacctcgtaaccactggatttgatgattgttttagattttatcttaccaccaccatcaagcagcagctctataatcgcttcgccttgccagccgcgcatctgtgcaattttagggtattttttatgtttgctaatcgcgttccataaagcgttgccgtattttccgcgcgcatcgtctatatctgcctggttaacaggtaacggtggaggctcttgctttactggtgcaggtgttggcacggtatgtacagggggagcagcttcggctttgggtgccacagcgatgatatcggcaggtggcgctattggcattgattgctcaacaataggttcaactttttctactacaggagtaggcagcggttttgtattaggtaaaggttttggctttacggtctccggctgcggctgaattggttcgggctgcactataggtgggggtggaggctctggttttttaactaactcaacttctaagatggcaggcgtttttatttcatcaaactttaagtttggcatcgctaacaccagcaaaccatgcaacaacaatgagccaataattgcccaaatcagtgtgttttcatgcgttgtggattggtgaactgcgatattcaaaagagagaaatgcctgcgtgattaaagttaaaagatgagtagtaataaacaaaacgaaaaattatacaacaaggttaatcactatttgaaaccttaatgcatttggctgaatacagccaaatgcattaagcgttaaacatgagcattaaataatgccatctaacacttgcacctgcaccaacgccccagcctcaaggttgccaacactttcatccaacacaataaaacaattagctaacgacattgagcttaaaagcgcagaaccttgcgcaccggtgggttttacgcgccagttgccatcagtatcagcaaacaaaataccacgctgaaactcagtacgccccgtgagttttttaatggcttgtgtacactctactttaaacactggcagcggcgctgggttgggctgccccattaaccttaacatagcttcacgtacaaattggtaaaacgtcaccatcaccgctaccgggttgcctggtaagccaaagtaatgcgcattcgctactttgccataagcgagcggcctgccaggcttcatggcgactttccaaaacatcacttgcccatgcttggcgagtaaaagcttcatataatcagcctcacccactgaaacaccgccactggtaatcacaacatctgcctgctttgccgcattcaacaaggtggcttcaagtaacgcggggtcatctgcaatcgcgccaaggtcaataatttctacgcctaaacgacttaacatgccataaagcgtgtaacggttgctatcataaacttggccaatttcaagcggcttaccaaggctcactaactcgtcacccgttgaaaaaaacgccacttttaacttgcgatacacttctacatcagcaatgcctagcgatgcaattaaacctaaatccgccgggcgcattaaatgccccgcggcgagtacggtttgaccaatacgcaaatcctcacctgcgtagcgcacattggcacgcggcttgggcgcatcgacaaacataatgtaatcagcctccagcgaaactcgctcttgaaccacaacagtatcagcccccagtggtatggccgcccccgtcataatgcgcgcacactcnnnnnnnnnnnctgcatcaatatcggtagcattaaacgcataaccatccatcgccgaattatcgtaatttggcacattagcaggcgataaaatatccgcagccaacacgcgccccaggcactcacgcaaaggtaaaagtttagtttcgcgtaccgggcttaaaaactgctgaataaataaccgtgctttggctacgggcatcgagtttgggtcgtagtcatctaggcagctagggttgtgggacacgtcagctagtgatattgtggagttcattcatggtactcaataatttaaggcaatgattgattgggagtttctaccttgataatactcttaacagatgtttttaagagtagcactattaaaatagaaagcccagcacgaggctgggcttggatacatgtaatctaataaaagaaaacatttattgtaacaacggctctcaccccggatggctacaacagctcaataataaggaagaataaaatgcaaagcaagcagaattttggcaatcttacatttggatttgatattggcatagcttcggtaggttgggcggtgttaaatgagcgtcggattgtggatttgggggtaaggtgttttgataaagctgaaacggctaaagaaggtgaatctcttaaccttgctaggcgcaatgcacgcttgttacgtcgccgtttgcgccgccgcgcttggcgtttaactaagttagcacgtttgttaaaaaaacaggacttgattgcagatgtcgcaatattcaagcctggaaatccttttgcaacctcattatgggagctgcgtaagcaagggctagatcgcttattaacacatgaggaatgggcgcgagtaatttatcacttatgcaaacatcgtggttttcattgggtgagcaaagccgaagagaaaaaagcagaagaagacatcaagggtgaaggaggtaaagtaaagcaaggcttggctggcacgacaagactcatgaaagaaaagggttatcgcacagcggcagaaatggtgctggcagaattcccgcaagcacagcgcaataagcggggtgaatacagtaaagcattaagtcgtgtgttattgggtgaagagtttgccaagttatttgatattcagcgtgctttaggtaatcctcactccacggctgaattgcaaactaaattattagaccgtaaaacaggtttattttgggcgcaaaagccagcgttggcaggtaaggatttactcaaaatgttgggacattgcacgtttgaaaaaacggaataccgcgcgcctaaagccagcttcactgccgaacgccatgtttggctcacccggctgaataatctacgcattgtgatggatggtattacgcgctcgctgaatgaggatgaacgccgaattgctttgccgctaccatatatgcaagcgagtgacctcagttacaagcaacttaaatcggcactggtaaaagcaggtttgctaccagaagctgtgcgctttacaggcttaaactatccaagtgcggcgcaattagaacgcgacaaagccaaagacccggaagcgaccactttagtcaaaattcctgcttttcatgaaatccgcaaaatattaaaagacgcagggctggaaactgaatggcaaggcttggtgaattcggcttttggaagtgacgcgggcttgttagaccaaatcgcttgggtgttgagtgtttacaaggacgatgaagaagtcgagcacgaacttaatgcgctggcgttgcccaataaagcaaaagtgattgaagccttgcttggtgtgcgttttgataaattcagcaatttgtcacttaaagccctcagaaaaattgtgccacacatggagcaagggctacgctatgacgaggcctgcattgaggcaggttatcatcatagccagttagtaaaatccgatgacgacaaactaaaatacttgccacctttttattcatcacgcgataaaaccggcaaactgatttgtaatgaaaccttggatattccacgcaaccccgtggtaatgcgggcgttaaaccaagcccgaaaagtgatgaatgcgctgattaaacaatacggcgcaccgcatcaagtcaatatagagatggcacgggatttatcacgcccacttgatgaacggcgtgatatagagaagttacaaaacgaattccgtgaacgtaaccaaaaagatcgcgatacttttaatgccgaatacaacagcacaggcacactcaaaggccgtgaatttgaaaaatatcagctttaccgcgagcagcaaggcaaatgtgcttattcgattgaaccattagacttaaatcgcttgtttgaacaaggctatgtagaaattgaccatgccttgccatattcgcgtagttttgatgacagcaaaaacaatcgtgtgttggtgtttagagaagagaatcaaagaaagggtaataaaacaccttatgagtatttagatggtaaaagtaacagcgagcgttggcggcagtttgtggcttttgttgaaggcacgaaaagctatcgattagccaaacgcagccgattactgcgtaaagactttggcgaaaaagagtccgcagaatttcgtgaccgtaatttgaacgacacccgctatatttgtaaattcttcaaaaattacgttgagcaatttttacaactggcagaaaccagtgagtccaaacgttgcgtggtgctcagtggacaaatgacggcgtttttacgtgcgcattggagcttgaccaaagtgcgcgctgatagcgaccgccatcatgcgcttgatgcggctgtagtggcggcttgtagtcatggcatggtgaagcgattgtcagattactcccgccgtaaagagcttgataaagtgcggacaggttttgtggatgtcaccacgggcgagattgccaacnnnnnnnnnnnnnnnnncgtaatttaggcacatattctgaggatgaattagctgaattgaaacccttgtttgtatctcgagcgccacagcgacgcaatagcggcgctgcccataaggaaactatttatgggcagcccgaaagcttaaaagctcaaggtggcgtgacgcaaaaaatcgcagtcacgagtttaaccattaaagacatggaaaaactcatagagccgcatcgtaatgagaagctctacgttgccattgcggaatggttgacgggcaaagatgcacgtgagaaacgtgccaaagagattgaagctagcgcggggcgcggtaaagataaacgcgctttaacggttagtgaaaaaactgaaattgaacgtttacgtgagttgccgcgcaaacccactaatgacggatctccagggccaattgtacgcacggtaacgatggtgatcgataagctatcaggtatttctattcgtggaggtgtggcgaaaaatgacactatgctgcgggtggacgtgtttaccaaggcaggtaagtttcacttggtgccagtgtatgtgcatcatacggttgttaaagaattgcctaatcaggcgattgtgcaagctaaagatgaggctgagtggacgctgatagatgatagttttgcgttttgtttttcactgcatccaaatgatttggtgcgggtggtgcaaaagggtaaagagtcgatattaggttactacagcagttgtcatcgaggcactggtaaccttaatatctgggcgcatgaccgcaataaattagtaggtaaagaaggcattattgaaggcataggagttaaaaccgcactctcattagaaaaattcaatgtcgatgtgttaggcaacatctatcttgcacaaaaagaagagcggcgtggtttggcgtagcgttgttatctcgcaacctgccaagctcaagcgcgagcatttttcgctcgtgattgagcaggcgcaatcggcgcgcgtgccgtttgaagacattgctgtcatcgtgctgaatagccgcgaaatcacgctcacccacccagtgctttctgcttgtgctgagtatggtattgggctttattccacaggtgataaccatcagcccaatggtgtgtttttgccgtttttaagtcatagtcgcgccacgcgcatgatgcgcttgcaactagatattgataaaccgcaaaccaagcgtgcttgggcagaggtggtgaaagtaaaaattagcaatcaatctagatgcttacatttaacccaacgtggcgatatggcgcggttagcttcttacgccagtcgtgtgcgttcaggagatagcgagaatatggaggcgcaagccagcagttattattttccgcagctgtttggcaaaggctttcatcgcgccaaagattgctgggtcaatgccgcgttggattatggttacgccatcacacgaggggcaattacgcgtgcgttggtggcgcatggcttccagcccaacatcggtttgtttcatcgtagcgagcaaaacgcatttaacttggcggatgacttgatagagccttatcgtgctttaattgatttgcatgtgtttcaaaatatcaatcctcatgcctcgacagaggcagagcttactccagccgacaaagtggctttagtagctttgctcaatgtagacatgcaaatgcctcgtggcatgatgagtgtgttatctagcatcgagcaagccacggaatctttagtgcgcctgtatgaaggcggtaatgaagcggtgcttgagctacctgttttaacagggctaggtcagcacttgtttgagatgtagctgatatgggtgcggagacacgacgatatatgcgtctactcgtgttatttgatttacccacagtcaccaaatccgagcgcagagcttatacggtgtttcgccgttttttattgaatgatggttacgacatgattcaattttcagtgtatgggcgcattgttaatgggcgtgatgcagaacaaaaacatatgcaacggttaattgctagcttgccatctgatggttcaatacgcgtgttgagtgtgacagaaaaacaatatgtcagtatgaagttgttagtgggtttgccgctctttcaggaaaaagccattaaagccaaccaaatgctactgttttaatagcttattttaaaaacaaacccgcgctaagctaagcttggcgcgggttctgtgagagcctattataagccatccggggtgagagagggagctacaacgggctcttaaccgatattgcggccttaacgattataagccatccggggtgagagagggagctacaacataagatgaactggtagtgtaagcttcattattataagccatccggggtgagagagggagctacaactaaatccatgttagtgatggaatcaggattattataagccatccggggtgagagagggagctacaactttaacatcgtcattaatcggcttctttgaattataagccatccggggtgagagagggagctacaacttgaatatcaccagtaacaggcataaaactattataagccatccggggtgagagagggagctacaaccgtttgtgcttagttgatacaagcgcccattattttttgagatttatctcgaaaaataatgggcgctcattttgagtgttgcttagttttaggtctaaagctgataaatcttcaaatgtattgaggttgataaaagcatcaacggcatcactaaaatcaacttctgtgtagcattggcttttttgccaagcgcttacgcgacgctctccgcttgctaaatatttggttaggctaggcagcacgctctttttgcataaacaaaataccgggtgtgcattgccttcacttgtggctacggcaatatctgcgttttttttaattaaacctgtcattaaacgttgcgctaaatctggcggtagtaaaggtgaatcacatggtacggtgagtaggtagtcatgtttggcgtgttttaagcctaaattaaaacctgctaacggccctaaaaagtctggggatccattttgagcgtgttcgtcttgtagtacagggtagcccaaggcttggtattgactaatttcacggttggcgttgatgataatttcatccacttgcggttttaatcgtttgatcacatgttggatcagtggcttttgttgcaactgtaccaggcctttatctgcgccgcccatgcgggtggcgcgtccgcctgcaagtatgatggctgaaatagccacggttagccgcctgtatgcgacatgaagcgaatgactgccggttcattacggcgtatatcgaaatcgtgacctttgggtttaattgccatgctcgctagaattgcctcaactaaaggcgcgtcatcattgggatgacttcttaatattggcattaaatcaattttatcttcttgccctaaacacaaataaagctcacctttgcaggtgatgcgtacgcggttgcagctttcacaaaagttgtgtgagtgcggggaaataaagccgattttggtgttggatttaccttcagcatcggccacacgccagtaacgtgcagggccgccggtggtttcgacgctggcgataagtgggtacttactttgcaacaattttaaggtgtctatattgctcataaaggttgattcacgcgtgtggtttacatcgcctaaaggcatttcttcaataaacgaaatatcaatggcttgcccaatggcaaagtcaactaatgacaggacttcgtcgtcattaaagccacgcatcaatatggtgttgagttttatgctgtcaaagtctgcaagtttggcggcttgtatgccgcgcaatactttatctagctcgccggtgcgggtgatggttttgaagcgggttgcatccaggctgtctaaactgatgttaatgcgtttaacgccagcgttttttaaattctgagcttgtttttctaattggctgccgttggtagtaagcactaactcatttaagtttttgagtttgccaatttcttcaaataaccataatgcatttttacgtactaaaggctcaccacctgtgatacgtactttacttacgcctaatctaacaaatacttttactaatcgtgcgcattcttctaagcttaacacttcgtcgcgtggcaaaaaggtcatatcctcagacatgcagtaaacgcagcgaaaatcgcagcggtctgtaatggataggcgaatgtagtcaacttgccgaccaaattgatcgacgagtttatgggggagggcttgcgcagaattaggcactttttcaatcattactggtcagattaaatagcaattagcaactgtattatagtagcattataaaatcgtaataatagtcgttttggagagaatagcttgctagattcacattcaacacaagagatcaacgcaaccatccatgcgttaatcgccgagcatcaacatcggccgggggctttgttgcctttgctgcacgctattcaagatagcataggctttataccagaggcggtttatacgccaatatctaaagccttagcgctatctgtggcagaggtgcatggcgtggtaacattttatcatcatttccgtacacacaaggccggtcagcatgttatgcagatttgccgcgcagaatcttgccaagccatgggttcagaagctttggaagcgcacgccaaaaaatgtttgaatgttgattatcaccaaaccaccacagatgatgcgattactttagagcctgtttactgtttgggtaactgtgcgctgtccccatcggtgatgatggatgatgaaatttatgggcgtgtatctgcagcagatttagatgcgctgattttagaagcacgacgtgcggaggctaaggtttaatggttactaaaatatatatcccccgcgattcaagtgccttggcaatgggtgccgaaaaagtggcggttgcagtggcggctgaggcgaaaaaccgtggtttagcggttgaaataattcgcaatggttctcgtggtctttattggctagaaacaatggtggaagttgcaacctcaagcggtcgtactgcttatggcccagtaaaagtaaaagatgtgccttcactgtttgatgcggactttatcaatggtaagccgcatgctttgagtttgggtgtaactgatgagatcgattggcttaaaaagcaacagcgcttaacttttgcaagggttggcgttacagatccagtttcgctggaggattatttggcgcacgatggttacaatggcctgaaaaacgcccttaaattatcaggtgcggatattgtaaaaatcgtcactgactcaggtttgcgtggtcgcggcggcgcggcttttccaaccggaattaaatggaataccgtactcggctgtgaagctgagcaaaaatacatcgtatgtaatgccgatgaaggtgattcaggcacctattcagatcgcatgattatggaaggtgacccgtttgtactgatagagggcatgacgattgcaggtgtggccgttggtgccacacgaggttacatttatctgcgtagtgaatatccgcatgctttggctgtgctgaatgaggcgatagcagttgctaataaagcaggttatttgggtgacaatgttttaggcagtggcaaagccttttacttggaagtgcgccgtgccgcgggtgcttatgtctgtggcgaagaaacctcattgttagaaagcctggaaggcaagcgcggtttggtgcggtttaaaccaccactgccagccattgaagggttatttggcaagccaacggtggtgaataatgtgatttcgctcgcgacgataccgattgttttagataaaggtgcgcaatattacgccgactacggcatggggcgttcacgcgggactttgccaattcagttggctggtaatatcaagcacggcggcttggtggagttggcgtttggtgcaaccttgcgtgagttgttgtatgattttggcggcggttctttcactggtaagccgattcgtgcggtgcaagtgggcggtccgctgggcgcatatttgccagaaagccaatttgatacgccgctggattatgaagaattcatcaaaatctgggcggtgctaggtcatggcggtattgtggcgtttgacgatagtgtggatatggcaaaaatggcgcgttatgcgtttgagttttgcgcaattgaatcatgtggaaaatgtaccccgtgccgcataggttctacacgtggcgtagaagtgattgataaaatcaccagtggcaaagaccatgcgaagaacattgcactagtgcgcgatttaagtgacactatgcttaatggctcgctatgtgcgctgggtggcatgacgccttatcccgtgttaagtgcgctcaatcacttccctgaagactttggtctttctcaaaaaaattaaagcgggttagttgcaagataaggataacatcatggacgaaattaaatacaacccaaatgtagattacggcacaccaggcagccaatcaacaaaacaaatcacgctgatggttgatgataggcaagtgacggtacctgatggcgtatctattatgcacgcggctgcggtggcaggtgtcatggtgccaaaactttgcgcaaccgatagcctggagccatttggctcgtgccgcttgtgtttggtggagattgaaggccgccgtggttatccagcgtcatgcaccacgcccgtggctgaaggtttaatagtgcatacgcaaacgccaaaattggcagatattcgtcgtggcacgatggagctgtatatttctgaccatccgctggattgcctgacctgcgccactaatggtgattgcgagttgcaagacatggcaggggcagtgggcttgcgtgaagtgcgttacggctatgatggtgaaaatcatctgaaagcagcgaaagatgaaagtaacccttattttacgtttgaccctagcaaatgtattgtttgctcacgttgcgtacgcgcgtgtgaagaaacgcaaggtacgtttgctttaactatttccgggcgcggttttgactcaaaagtatccgcaggtaataaagattttatggattctgaatgtgtatcttgcggtgcgtgcgtacaagcttgcccaacagccacattgatagaaaaaacagtgattgcagctggcacgcctgaacatagcgtgaccacgacctgcgcttattgtggcgtgggttgtagttttgatgcggaaatgaaaggcgaagaagtggtgcgcatgacgccaagcaagcacggcggcgccaatcatggccactcttgcgtgaaaggccgctttgcttggggatatgccacgcataaagaccgtattactacaccaatgatacgtaagagcattaaagacccatggcaacaagtgggttgggatgaagccattaactacgcggcgagtgagcttaaccgaatcaacaccacttatggtaaggatgcaataggcggcatcacttcatcacgttgtaccaatgaagaagtctatgtcacccaaaaattgattcgcgcagtgttcggtgtaaaccatgtggatacctgtgcacgcgtctgtcatagcccgacaggttatggtctaaaacaaactttgggcgagtctgctggcacgcaaacctttgattctgtcatgcaatcagacgtgattttcattatcggcgccaatccaacagatggtcaccccgtgtttgcttcacaaatgaagcgccgtctgcgtgaaggcgcaaaattgattattgccgacccgcgtgaaattgatttagtcgctaattcgccacatatccgcgctgatcatcacttaaaactgcgcccaggcaccaatgtggcgttaatttctgctttggcacacgtcatcgtgaccgaaggtttggtgcaagaggcgtttgttaaagcccgttgcgagtgggattcttttgttgcatggcgtgattttgcggcattgccagaaaattcacctgaagctttatctagcgagctaggcattaaagctgaagatgttcgtgcagcagcaaggctgtatgcaacaggtggcaatgcggcgatttactacgggttaggtgtgactgagcatagtcaaggctctaccatggtaatggggattgcaaacttggcgatggcaaccgccaatattggccgtgaaggcgtgggagtaaacccattgcgtggtcaaaacaatgtgcagggttcatgcgacatgggctctatgccacatgagtttccaggctatcgccacgtggcagatgatgcaacacgtgccttgtttgaatcagcttggggcaggccgttaagcgccgagccaggcttgcgcatccctaacatgttagatcaagccagtgaaggtagctttaaggccttgtattgcgtgggtgaagacattgtacaatctgaccccaatacccagcacgtgacccacgcacttgagcaaatggaatgcgtgattgtgcaagatttattcttgaacgaaaccgccatgtttgcgcacgtgtttttccctggagcgtcattcttggaaaaaaatggcacctttaccaatgctgagcgccgtatttcaccggtacgtcgtgtgatggcgccaaaaaatggcatggaagattggcaggtgactactaagttgtctgaggcgctgggctacccaatgaattacagccacgcttctgaaattatggatgaaattgcgcgtttaacgcctacctttcaaggggttagctttaaaaaattagatgagctgggcagtgtgcaatggccatgtaacgatgagcatccagcaggtacgcctgtgatgcacattgatgaatttgtgcgcggtaaaggtaagttctttattacccaatatgtaccaacgactgaaaaagtaaatgcaaaatttccgctgatattgactactggacgtatcttgtcgcaatacaatgtgggggcacaaacgcgtagaacacaaaatacggcttggcatccagaggatatattagaaattcatccacatgatgcagaagaccgtggtattaaagcagatgactgggtaggtattgttagccgtgcgggcgaaaccgtgttgcgcgctaaaattacagagcgcgtacaagtgggtgtggtttacaccacgttccaccacccagaatcaggcgctaatgtcatcacaacagataactctgactgggcgactaattgtcctgaatttaaagtgactgcggtacaggtggcgcgtgtgagccagttatccgattggcaaaaacattacaaaacttttagcgaggcgcaaattgcctttgcaggcaaaaaagctgaagccgcaaaagttggctagtgtacaagttttagaggtgccgttaagtacatttaccgtgatgcaatggcatgacggtgagttaaaacaaacgcaagattgtttagcagaagaaacgcctgttgcattaatttacaatggtgtttcacacgcggtaatgctcgccaccgcgcaagatttagaagattttgcattgggattttcactgagtgaaggtattgtgcagaatatcaatgagctttatggcattgaagtgcaagtgcaaagcaatggcgtagagttacactgcgacatcgccagtgaacgttttgcgcaactaaaacaacgccgccgcacgctggcgggaaaaacgggttgcggtttatgtggggcagaaaatttagcgcaagcgatgcgttatccagagccgttgccaatgcaagataggtttgaggtaaacagtatcattcaaggtttgcaggcgatacagtcgtggcaaaccttgcaacaaaaaacaggcgcaacgcatgctagtgcttatgtactggcggatggaacggtaagcttggtgcgcgaagacgttgggcggcataatgcactagataagctagttggtgcattagctaaaatcaaacagcgtgaagctggcttcattatcaccaccagtcgcgccagctttgaaatggtgcaaaaaacggctagtgcaggcgtgggcttactggtggcagtttctgcacctactggtttggcagtgcgcgtggcagagcagtgcgggctaaccttagtgggctttgctagaggcgatagatatgtggtgtatagccacagtgaaagaattctgtatcaataaattgatgtaaaattaaaagtgatagaaaaactagggaacaaatggatattcaacgcttaatttcaatggccaaccagattggcgatttttatgaatcatacccagaccaaagtcatgctcaaaaagacattgccgatcatcttaataagttttgggccttgccaatgcgtaagcagattgcgcaatatgtagctgagcaggcgggcactgggttacatgcgcaagtgcaaagtgctattaaaggctatttgaaagtgtaacaggcgatgttattttaatagcatgagtttttttagagaatcactactgcactactgctggcgctgaaataacctaaaattttcttttctatccgcaatccgcttcccttgccagatgagcttccactcatcgctcggtagcatcttccctacacctctagcatcttgtatcaggtaaaggttgcagttgagctgttgtgtagtttcaaatggccgcaagttaatatccgtgtaatagtgcaataacaaacgttgagattgtccaacatttaagctgctcatacagtcaaaatgggcggggagtactttttgcattcccgtgaaaactggctgatagcttttaacagcattaatccatggtagccaaagcgtcatcagcaagccccagccaaacgtcatgccgacagcccagttggtgactgttgacctgttgctttgttttgcacgcaagcaagtaaaaatccaaatcatggtaatgatgaacgcgatagcgaatgcaatccagctgaaatgtgtcgcatttgatc

SEQ ID NO: 2881 - DNA, 23285 bp, synthetic construct
  source 1..23285: mol_type = other DNA
  misc_feature 1..23285: note = Synthetic
tatggggtcgggtttcgattgaatcgattttgatgctgctgtatagcgactcatttcattgattcttaaagcttgtcgctctagtgtgatgaccactttaagcgcgctcatcaagtcacgtgccaccctagcatggtcagctagattgattgcgcgctcaatggcgagtttttgatagatttgccgcgtattttcatcatagtcatcattgaatgccaattcgagcaactctgttaagcttagcgagcagtttggtcgtaattcatgcattagtttgttcaccacttcacgcgctttggcgatgtcttgccgatgggtgcgcattatgttgatgatggtttgacccgatacgcttaaagcgtcttgctcgccatcatcggcacatgtggacgcactatctcctcgcgcgcgtagggtttgcgtcagcaaggactgaacgccgtgattactgaacgcagcaccattgtcttgctgggttttgcgtcgttcacgttctttgtgctcatcaccaatatcaatcaacattgaattttgagccgtcgccaatacgcgcgggacgagattgcgttgccagccttctaaagaagctttgcgccgaacggtgatgtcagcaatatttgcacctgatgcaatcgctcgaatcgacaatattccggcgataaaatcacgctctatcgagttccagtcaattgcatggcctgcacggtcattgcggtagcgttcgctatctggctttgcatttgtgccatgttttactggctgctgactagatttactcgtcatatttatttcctctcgacataaaaaaaccgccgaagtggcggtttgatgttgcgcggttgtttgtgtattctctatgtgttttgttgccaaatgattcaagtcatcgacatggcatgcttgaataaaatcaacctccctatctaactcgcggtcattgagaggtttaagtctatgtttagtgggcaatggcattaaatcgtgatggttaatctttgaacgcccatacaatcgtcgaccatgggtaggtattttggtttctacttttgcgatgtagctcgcatgccactttgcctcctgataaccctctacggtctttaaatcgtgtacttttgttgagcccgcgtccttgctaaggtggaaactatctagccagccagtttttttcaaatcagtgcatatcgcataaaacttagctaacgtatgcacggatttatccaaaatacatatcgcatgataatgctcatagtcacattcaaccccttcataatcgtgcgacctaatctcatggcaccagacatagtgcattctcgcccctttccgtaacatgcgccctgacaaggttttcatgaccttcgatatgctttcattattgagggttgtaaaccgaaccacaatcgcgataggtcgcttagatgttgccaatccttcattgaatacttgctcaatggcttgccagattggtttaaaaacttgtcgaaatttctttgcgctcgacgcgaccgaggtgatttcatttcggactttcatccgtggatttttggggtcgggtgtatcacaagctaaaccagaagctaaaccactaggtttaaacccctttttgctagggctattcaaacccttgcagcgcttgggatgaatagactttacattttgggtttggtgagcaagttgtgtcattcaaatttaccaaaaaaaaatggcaacccaaaggtcgccttagtgctactggttactcgtaattacccgaaaatttaatgactactttggtttccagttagtgctcgtcacagtgaaatacgacgccaaaacgggcttatgttttttccactggtaggccgataatcttgtgatttgctgcaagattttgtcgttattcggaatgccgccattaattcggctggccgttagtagcaagtaataagccccaatctgctcggttgaaagcccccatgtgttaatcagactgtcttgtagcatttccataagttgctcccaaaaaaaagccccaccaagaaagcagggctagaaacgaaaaaacccgcaaaagcgggcttggcggataacgattattatgagttctggatgaggttgatccccaactatagcaaaatcttacatttggcatatcaagctcgtcaacttagttaataaattccgttgtatttttgattaaattttaaccaaaagatattgaagccacgtcttcagcaatcaaaacaaagattgctgtgatgagcgtatggagtgtgaccgaatttgcggtaaggcatgcgtgcgcatcaactcagctgggtaattcttcaaaaacgctttcgccagctcagggtttttgcaatccaaccacgcgtcatagtcggcttcggggatgatgactaggtttcgcttttcatcgtttggcttgtgcattcgcttcatgagcgggtgttcgtcagcgttgatagtgatttgcgtgaacgaatagctgcgtcggccattctcttcttcccatgcgcgccacaatcccgccaccgcaaacggtgcatcattgagcaagctgatttgatgtcttaccgctttgcctgattcatagcacggctcaaaaaagcccagcattggcaccagacaaagctggctgcgttgccatgctgcttgatagcttttgagttggcctatggtttcggcgcgggcgttcatagtgctgtagcgcgcaccttgcggtagtttggctttgggcaaaaaaccgtagttcgcgaccacagcttgtcggccttggcgaccatgcacaatcatcggcgcagcgtagtcttgccacacttcatcgggccagtcggccttgggttcaatcgcggcaaattggctaagcactaaccgtttaggaattggaatgtaatttacgcacatagaaaagaacgttcgttctataatattctgattcagatggtttcaggataactcatgtcattgcatttgcacccgccaatccccgctgcacttgaagcaaagtcactctatttgcccgttatgggtgtttcagtttcggcgggatttccgtcgccagccgaagattgggccgaagagcgcgtcgatttgaatcagcgttatgtgcagcatcccgaggcaaccttttactttacggttgcaggtgacagcatggtcagcagtctggccgagcgctccatccctgatggtgcaacgctgattgttgaccgtgccttgagcgccaagcacgacgatattgttgtggcagtgattgatggcgattttaccgtgaagcgcttgtactgccgtggcgcacgcttggcgttgattgctgaaaatccagtctatccgccgattgtattgggcgaagagcaagagctatcaatttggggcgtagtgacggcgtggatagcgaggccgcgatgattgccttggttgatgtgaataatttctatgtatcgtgccagcgggtatttgagcccaagctgatgggtaagcctgtggtggtgctctcgaataatgatggctgtgtggtggcgcgcagcagcgaagccaaagcactgggcatcaaaatggcagcaccgtggcatcaactgcgtgactttgcgcagcaagaaggcatcatcgcccgtagcagcaattacgcgctgtatgccgatatgagccatcgggtaatgaccatactcagccgctttagcccgaaccaagagatttatagcatcgacgaatgctttttgagttttgacggcttgctgcaagaccataccgagctggcgcaagacattcgccgcaccgtattgcaatggacgggcttacccgtgtgcgttggcattgcgccaaccaaaacgctcgccaaacttgctaatcacatcgccaagaaacaagcgccattcaatggtgtgtgtgcatggcagcaactcaaccccaaccaacaagacgcgcaaatgcaggctttgccagtgggtgatgtatggggtattggccgccgaatatcagagcgcatggcgcaagaagggatacataccatcgcagatttaagggccagcaatgctgaccagatacggcaacgccacagcattgtcgtgcaacgcaccgtacacgaactacgcggcataccgagtattgaactggaagaatcgacgcccgacaaacagcaaatactgtgttcacgtagctttggccaagagatttataccgagcaagaattaggtgaagccatcagcacctacatcgctcgtgccgctgaaaaactacgtcaacaaggctcactcgcaggcagtttggcggtgtttatacgcaccaacccgtttcgccccaaagacccacaatacagtcagcacatcctcgtcccgctcacgcaagccagtgacgatacgctactactgacccgcgccgcgctatgggtgctcaaacgtatttatcgaacgggctttgcctatgccaaagcaggcgtaatgctgtgtgacctgcagccaagaacggcagtccaaggccatctatttctgcaaaccgccgacccaatcaaacgtgcggcactcaataaagtgatggacgacatcaatcgccaatggggaagaggctcaatccgcgttgccagtgcgggatttaatcacggctggaaaatgcggcagaacaccttatcgccgtattggactacacggtgggcggatttgccgattgttagatagagacgaagaatatggagtgccccttcatgcggcctagcgattaaactgaggggctggtcggggatgggtgatgatcgtttgataatgtttcacaaaagagggggactacgttccccatttgcctaaaagagccacaagaccggtgattgaaccaaattagtccactaagagcggtgatataagggatgcgccgtgcctaacgttctgaccgatatttctcctcctcgcgtatggctaaacgaacctttgtctctccggggagttataaaaaaaggtggtgaccgttcaatccacttcgctggtaatcagcggataaaacatggtcctcgaacattaacggggtagaaatgcgaagtttgcgagctcgttccaagatttgtcgcgaatgaaagctggcttcgtcctcttcaagtgacatgtagtcgaactgccaattactgtcttcccaaaggtctgctgcatctccaccatttttgatgatgcgacggcgctctatattaacttcgcgatccatataaatatcgaacaaaaatatcgaacaagtcgtaggcgaacaccttccgatattggtgtacgttgaattagcaggtaaatattcatcttttgccagtgaaagcctgttttgtggtgagtagtaatttagttgattgccgaaaaccctaattatgtcacatgaatgctgaatgtaggatggcccgccttgtaattaatatttcaggatttgtcaggattgatgcggactatttgcacaacttcttttgttagtaagagtgtgtttgtgcttgttaacgtattgtttgtggttgatatattcgtgcttcactattttagtgcgccattctagaggttataaactatatgccattaccactcattctttggggcgctgctgctcttcttgccggtacaggcgttgtaaagggcgttggtgcgatgagtgatttcgatgatgccaaaaatatcggtaaatctgctgaaagtcgttataaagaagccgaatctgatttagatagtcaacgaaaaaaaacaaatgctgcgttcgaaaaattaggccagatcaaactttcagtttttactacccaaattaaacaccttgttcaggcgattaaaaactcagggaaaaacgctcaatccacgttaagccaatttgaccaaagcttttccgttgagagcctaaaagaaatggaagccttagttcttaaatcgttagaaatagaacatggcattgcatcaggagctgtgacaggggttcttgccgggctaggtgcttatagtggcgttggcacgttggcagcagcatcaacaggcgcagctatttcaggtttaagtggagtggctgctactaatgcgacactggcttggttaggtggagggtcacttgcaacaggtggcttcgggatggccggtggtgcactagccttaggtggtattgtgctgggtcctgcactagctatcggtgggtttatgatggcgagtaaggctgaagaagccctaactaaagcaaaaaaatatgaagctgatgtagatattgcaattgaacaaatgaaatcaacggaaattatcttagtggctctaagcgataacgcaaaagaaatggccagtgctttagttgaaacagcgcgaagatttgaatccataaaagtaaataataatcaaaaccctgtggcatttgaacagatgtgtatgctaggaaaggggcttaaggctattgcggatacaccgattatggaaagtgacggcacagccagcaagcacattaaagccaaaattgcagggtttttagttatttaattggagatgtctgagatgcttaagaatttcacaaataagatacctagtgtcgcaaaggcgattccgatcccttcaactgcggccatggatgcctttaataatttagttgatgcgtggaaagattgcaataacactgcggagattgaaaaaactaaacgtgaaaatattaaatcgtggcgtgatactaatatcaaagctattgaagaaaactcagctattttaaagctctacttagaaaaatcctttcaggagcgtgctagtacgatacaagggacgtttgaacgtttagatcaggcgttggttgaaggaaattcagaagtggtcggcttaatgatgaattcaatcgttgcgattgttaaagaatcacccttagctcaagcacgacaagtcattgccgacatgaataatcctaatgtcagcacgattgacatatgaacgatgcattcccatgttcaggctgcggcgcttgttgcaagtctattcggctctctgaattaacagtggagttggaccgaggagatggcgtgtgcaggcatttagattgcgttcaaaatttctgcactatttatgactctcgtcctgatatttgtaatattcaacgcacttatcaacagcattacaaacttaatttaagttggtcaaagtttgtagcattaaatctacttgcttgtgaagagttgcttaaccggcaaatagccatttcttcttttgtaccaaacgtcaattgaatggatttaactgcttaattatcatttgctcaggccatcagttttttctccagagaaagaagatgcaagcgtttgctgtcatcaacgcgatcaagttgaattggtttgattcaaacataattacgcttgcaaaaacaaatacgattcacctttaaatttaataaagacttgattctttgtacatagcatcattgcaaggttgccataattaacgcatgcaaaacctaatagaactaattaaaggggttcagggattacctgccactgtaatgcaagagccaaatttcttttcaattggcggaactggatattttgaaaatccaacttcggatttattagctattttcatgggtgggcagggcgggacgccaacttggctagctaaagctttagtttattgtctcgtagaccaaggtcatttttcacaagacgcttttgacttgtgtgagtggaatgagctttttgtggagcgggaagtttcaattaatgacgaactgactgatacctataaacggttagatttacttgtgacaggtgccgcatttgttcttggtattgaacacaaggtctacgccagtgccgccgcaaatccttttgatgtctacgaccagcttttgcagagtaggtcagagggaaagacgattattaagtgtgtgttacgcccaagtaaatatgctgcagatatacgtggtgactggcctgtggtgagttacgacgaattaattgtaaaagcaaaactgttttatggttcggatattgcctttactccaattagcaaatggcagtttttttatacagaatttttgcagcatctgtatggattagcacacccagaaaatgagaaccctatggataagcagtctttcgactttgtaattcaacattttattacgctgcgtaaaggtcgtaatctgctggatgactttgaaaaacaactgcttcatcagggtagtgctactgtaagtaaagtattgcaagagcttggtgtagaaacaaatattgttacccgctcccatacttggggagaagccaaagcactgcgttttcgaccagagtgctggggcggagagtctgatgtcgttcttgctttttacggcaatgaagatgatgcagaacaacccattaatttttatattcgtgcgtatatcaaaaaagggtctgagaaagtagatttcgatactattagtaaagaactgtcgcataggacggcaaaaaaattggatctgtgggaagatgacaaaaacgtggagtcaaatcattgctggcaagaacgtgatggaaaatatttatgctttggagcttatgctaaagaccgtactttagagggcaccctacaagcattggcatctctgactaaatggctacagctcaatgcatatagcaccgttgagcttgcttaagttggtgactgagactcagcgttaatattttattcagagcttaggcggagtgtctgcaaattagggtatacaaacgcttgttcgtggaacgattagtgtgatacgccaactgcaatttgctgatcttcattagtttaatctgtgagatttattgaccttcttgaattttatccttcacccgcttaatcgttccgcgcccacaccccagtaaatcttgaatcgcactccacgatttcccctctgccagcaggcaagcaattttgcggtgcagctcagcatcttttggacgacctgcgtatagaccttgtgctttagctttggcaactccctcggcttgacggcggcgtcggtcgtcgtaatctttgcgtgcaatcgcggcgagcatgtcgagcagcatattgttaatcgctgccagcatcagcgcggtgaagccatcgccatctttcagcatgctgtgactggtcggcaaatccagcgccacaattcgcacacctttgtcgccaatcatctgccgcagcgtgagccagtctgagtttttcatccgactgaggcggtcgacctgctcaacaagtaatacatcgccgtgacttgcatcattcaagagtcgcattaactcggggcggtcgagtttggtgccgctttcattctctatgtaataactggcaatacgtaaattatgttcagcggcaaacgcatcaagttgctggcgcgcacgactggcatcttgctctttggtactggcacgcaggtaggctcgaacaaacatggtgacaccccatcaaaagttccgtttatgtggtttcaatataggtagtgccgtttgagtggtaaacgactattttggaactggatgataagcggttttgtgtggtttcggtgaggtgtaccttattggcactggtgaattgatgtagtgccgactacaaaatttgtgcgtgtcgggtttaactttaccgttgataagtagggcaggggatgttgtggtagttgcaaaatcttgcctttacagagaaaacaataatacgcgggtgatacatcagcgatgcaattggcgtcgcaactcatccaacaacctataaatgtgtttgataagccacgtgtgatattccaaggtttccccaaccccttaggtacgtaacaaattttatcttcgacacacaacaaaactttcgtttagtaaaacgcacgcaaagaactgtaatttaaaaaaagaacatcaaccaacaacgttcgtaattttaaacgttgaatttgtcagctattactttgaggagtagagtaagtcgaaaacactacaagcacgcccaaccaaacgccacaaagcagaaagcccgcttgcgcgggcttgggtacagataattaaatctttattgtagtaacggctctcaccccggaaaactactacgggatgacaatagcacaaggggtttttatgcagcaagcagtttcatacgatttaggtctagatattgggattgcatcagtaggttggtgtgttttaggcgagcgtcacattattgaccttggcgtgcgtgcatttgataaagcagaaaccccagatggcgaatcgctcaacaccgcccggcgcaccgctcgcctcttacgtcgtagattgcgtcgtcgagcatggcgattactcaagttgtctcgattgctaaagcgtgaaggcttgattaccgatagtcgactttttctacaacaaactccaattacacagtcgttatggaagctacgagctgaagcactagaccgtcagctcaacacagaagaatgggcgcgagttatttatcacatttgcaaacatcggggcttttggtttgctagcaaagcagatgcagaaggttcagagggcggaaaggtaaaacaagggctagaacgcacacgtaatttgatgagggagcatgggtatcgcagcgcggcagaaatgatgctggcacaattccccaataatcaacggaacaaacgcggcgactatggacagtcactaagtagagaactactagctgatgaattgcactctttattcgaaaagcagcgtgaatttggtaacccgcacactaacgatgactttaaagatgcaatattgaatacaaaaacaggtttgttgtggcaacaaaagccagcactctcgggtaaagaaatgctcgaacgtattgggttctgcacttttgaaagaaagaaaagtggaaagaataaagatgagtaccgcgcagcaaaacatacatggtctgcggagcggtttgtttggcttacacgcttaaataatcttcgcattaacatcaatggtgaaagccgtccactgagcgaagttgaacgtaaagccgtaatagacctaccctacgaaaaagcaaaactcactcataagcaactaaaagctcatctaattaaactcggtccctggccagaggccgtacgttttactgggctcaactaccgagataacagcaaagaccctgaagaatctaaactgattgaattaaccggttggcacacacttcgcacaaccttagagaaggcggggttaaaaactgaatggcaaggcattgccactcagcccttacttattaatgcgattacatcaatactcagcatctacaaaacagatgaagaaattcagcgtgaattaaccgcctgcaatttaacgcctgccgttatcaattcactacttgccatcagttttagtgattttattcgcctgtcgttaaaagcgcttgatggcattttgccgggaatggaacgtggccaacgatatgacgaagcctgcttagctgctgggtatcaccatagcgtattagtagaaaattcggctagccgctttttgccagcatttgacgaagacgctccgaacaaccccgttgtgaaacgagcgttaaatcaaactcgaaaagtcgtaaatgccattattcgtcaatatggagcgcctcagagagttcatatcgaaatggcacgtgacttatcacgaccattagatgagcgatataaaatcgaaaaggcgcagagcgaatttgcagaacgaaatgagaaagaccgtgaacgctttagtgaagcttttggtcgacgccctaccgggcgtgaatttgaaaaatggcaactgtatcaagaacaagacggtaaatgtgcttatagtctttctccactcgacctgaatcgcttaattgatgatgccaattacgccgaagttgaccatgcgttaccgtattctcgcagctttgatgatagtaaaaataataaagtactcgccttaacgcgtgaaaatagagacaaagcgaatcgtacgccattcgaatatctagatggtgcaagtgatagtgagcgctggcagcgttatgcagctgctgtgaatagcaataaaaaatatcgccaagcaaaacgtgaccgattattgcgacaacaatttggcaaagatgaagctagcggcttcatcgagcgcaacttaaatgacactcgctacatttgcaaatatttcaaaaactttgtggaacaacacttaaagcttgctagtgatgccaagcgttgtatcgtggtcagcggccagctaaccagcttcctgcgggctcgttggggtttagccaaattacgcgaaggcagtgaccgccatcatgcggtcgatgctgcggtggttgctgcttgcagtgctggtatggtgaaacggttatctgattatgctcgtcgcaaagaaacgctaaatgccaaagatggactgattgacttagaaactggagaggtagccaatttagcaatgtggcgacaacttgagcagcactttccacgtccttgggaacattttgaaatggagctaagccttcgagcaggtttagaccgcagtacgggtaaagtgaataacactctcagtttggaattaactcgagaggccctagccgcattaggctacgacgagacgatgcttagctcgatacgtcccttgtttgtttctcgcgcaccgcaacgacgcaatagtggcgctgcacataaagatacgatatatgcgcagcgccccatgccagcacaaccaaatcgtgtgacacaaaaaattgctctgagtgcattaaaactgagcgatttagacctagaccctgagcgttgtggactcattgagcctcatcgaaatgtcgcgctttataccgctctacgcgaacgactcgaagcttttggtgggaaagccgacaaagcgtttgcaactccgttttacaaaccaacacgcgatggtagccaaggccctatcgttcgaactgtgaccaaggtgattgataacctatctggtatcgcgctgcgcggtggaattgcgaagaatgacagcatgttgcgagtcgatgtatttactaaagcgggcaaatttcatcttgtcccgatatatgttcaacatcgaattatcaaaaatgtaaaagacttacctaatcgtgcaattgtcgctgctaaggaagaaagtgattggacccagattgatgatacgttttcattttgtttttcattacatccaaacgacttggtacgaattcaacttaaaggcaaaccagctattgaaggttattattcgggctgtgaccgtgcaactggcggtgttaatttatgggtgcacgatagaaaccaagcaataggtaaagatgggctgattcggggtgttggcgtaaaagttgcactttcagttgataaatttaacgtaaacgttcttggtcaagtatatctaaatcaagctgggtctcgccgtggcttggcgtagcatactcattagtcagcctgcaagattggcggtaaaaaatcgccaactcttgctggaacaagatatgggactcagcgccactattccgcttgaagatattgcggtcgtagtacttgaaacgccgcaagccaccattactagtgcgctattggcagaactagctgcacatgatgtggcggtgattacgtgtgatgaaactcatcatccgaatggtgtactacttccttacttaccacatagtcgtgcattcaaagtgatgcaacaacaattagcactcacattgccacaaaaaaaacgtgcttggcagggggtgatacagcaaaaaatccgcaaccaagcattctgtcttgatgttttcaaaccgcaggctgggcgctttttacgcgaccaagcagagcgagtgcgttccggtgacccagataatcgcgaggcaagttctgctcgctattattttattgaattatttggcgacgaatttacaagagataagccctgttggcaaaacagcgctcttaattatggatacgccatttttcgcgcagcaatcgctcgtagtctagtttgttatggttttttacccgcctttggtttacagcaccacaaccagctcaacacttttaatttagcagatgattttatcgaaccattacgacccgtcgtcgatgtctgggtacgtcagcaaaatacgacaagcagcgaattgagtagtacagataaagccgcgctaatccaactgctatataccgatgtcaatatgccttatggggcaatgaatgtacttagcgctattgaccacatggcgcaatgttttggccgtttttgcagtactggtgaccttaatgagctcgcttggccaaagctagcttaatgctttcttcatctcgaggtggcatggatgagtcaagttacaaggcgatttatgcgtctactagtattttttgatttgccgaccataaccaaagctgataaacgagcctataccttgtttcgccgctttttattgcaagatggctacgatatgttgcagtggtcagtgtattcgcgcatcgtcaacggagaggatgatgtcaaaaaacaccagcagcgtcttgttgcaaatttaccaaaaaagggttcaatccgctgtatgaaagtaagtgaaaaacaatatgttgcgatggaaattctggttggaacagtcactactcaagaagaaaaagtgagtttgcagcaagttttagtgttttaaatttgctatttttaatccggaatataacaaataaccccataaaatcatggggttatttgttatggattgtagctttccggggtgagagcgggaactacaaccgcgacgacggccgttgccggtgctgctttattgtagctttccggggtgagagcgggaactacaacttcttctgttcattgagtccaacattagccattgtagctttccggggtgagagcgggaactacaacttctctagcagagagcattcaactaaaacgattgtagctttccggggtgagagcgggaactacaaccaaggacgtgtcactaggccagcgtatgcaattgtagctttccggggtgagagcgggaactacaacccgtgagcttggtagggttagcaacaaagtattgtagctttccggggtgagagcgggaactacaacattcaaagagcaagacgctttgctgcaaatattgtcgctttccggggtgagagcgggaactacaacaggtaacgtgccgtataacgcatatctggattgtagctttccggggtgagagcgggaactacaacagggcttgggttgcggcaaagcggtaggtgattgtagctttccggggtgagagcgggaactacaacgaatcgtcacagcttccgtgccaaagcacaattgtagctttccggggtgagagcgggaactacaactccattagggcataagcatctggcgtacttattgtagctttccggggtgagagcgggaactacaaccgcgtttgcacaaagcaaccaattccgaatattgtagctttccggggtgagagcgggaactacaacttggcgaattaaaccaaggcaaacacctgaattgtagctttccggggtgagagcgggaactacaacccggcgcaccgactcctcaatacccgaccaattgtagctttccggggtgagagcgggaactacaactgcttatggtgcggcccgaggccatttggtattgtagctttccggggtgagagcgggaactacaactcatcaatccacacaccggcatgagttagtattgtagctttccggggtgagagcgggaactacaacgggattgccgactgatagcgagcgccccttattgtagctttccggggtgagagcgggaactacaacatggtctgtagtgccgcgactcgcgctattattgtagctttccggggtgagagcgggaactacaacggtgtgggcggtgacgtgttttgggttaaattgtagctttccggggtgagagcgggaactacaacggaccaagccagcacggcgaccgcctctattgtagctttccggggtgagagcgggaactacaacggcagcatattagccccccgagtaagtgaaattgtagctttccggggtgagagcgggaactacaactacgcatgaactcggccagctgctcgtattattgtagctttccggggtgagagcgggaactacaaccaatccgacatgcagcgtggcttgcactttattgtagctttccggggtgagagcgggaactacaactcgtttccagtgcttgccgtgacacccccaattgtagctttccggggtgagagcgggaactacaactgtgtgttgatcggcgtgatcggggctgcgattgtagctttccggggtgagagcgggaactacaacggcggcggtgagtttacccagtgccattttattgtagctttccggggtgagagcgggaactacaacttcgcgtcgggcgatggctggaatcgacaaattgtagctttccggggtgagagcgggaactacaacgtaatgaccggcaccgagcgccacacgtcgattgtagctttccggggtgagagcgggaactacaacgtagtacatttctgtgaccgtacccaatttattgtagctttccggggtgagagcgggaactacaacttgacaatggcgattgaggaaaaaggttttattgtagctttccggggtgagagcgggaactacaacaagtgaagttgaagccttggtgaaatcaaaattgtagctttccggggtgagagcgggaactacaaccaagcggatagcaccagcgcgaatatcacgattgtagctttccggggtgagagcgggaactacaactcgcggcgcgcaattgattcacccgcgcatattgtagctttccggggtgagagcgggaactacaaccagtcatgtgcattcaaaaagtaatcgaccaatgtagctttccggggtgttaaagggttttaagcagcagctttatgggcataaaaggtgtctaaataatcccagtcagctgcaatttatattgttttgttgcatttgtggtcattgctggcaggagaattgggtcaagttatattaaataactggctgcttgggctatgattggggccttaatttgattaaggtttttgcgggttgttgtatttttgttatttggtttttatctagatttgggtggggtttatgcgcgtgtcggggcttttgtcggggcggtggatgctttttttagcataaaacaaaagggctctagctttaacagctacaaccccttgatttgattggtgcgcccgacaggaatcgaacctgtgaccctcagtttcggaaactgatactctatccaactgagctacgggcgctttgattaggggagcgatgataacggctatttgcgttcgcgtctagtcagttggtgaatagtgttttgttgtttcgatgttgtcggtataattgtcagccataaaggcgatacagccaattaatttaacaatttcaagaaagggatgacagcatgagcggttccaacgcatctgcgtctaaaagcgttgtcggaatgattctggcggctttaattggcgtacctctgtttgtttacttggtaatcaagctgtttacttcgggtatgtcgatgaatatggcaagctcaacgatgaccaatgaggccgtcgccgcacgcttacaacctgtcggcgttgtcaagattgtcgatagcacgccgattggttctcgctcaggcaaggctgtttatgaggccgtatgtatttcctgtcatggcgctggcttggctggcgcacctaaatttgctgatgcagcagcttggtctacgcgaattggtcaaggttttgcgactttggtgaagcatgccgtggttgggtttaacgcgatgcctgcgaagggcggtgatccagcgttaacggatgaagaagtggcgcgtgccgtggcctttatgggtaatgcagcgggtgcgaagtttgaagagcctaaagtggctgctggtgctgcggcaacgattgatccaaacgtaaaaggcaaagaaatttacgctagcgtttgtatggcttgccacgacactggtgtggctggtgcgcctaaatttggcgataaagcggcttgggcaccacgtttgaaagacggcgttgataatgcaatcgcaattgcaactaagggtttgaatgcgatgccaccgaagggcggttatagcggttcagatgctgaatttaatgctgctgccttgtatttgattaatgcttcaaaataattaatcaaactctgccgatcaagccacatcttttgatgtggctttttttatgttttgctcaaatgaatcacttgtggtgctggtgtagtaggcgaggagttgtagagcgatggcgtacagcagcgggttaaggtgattgagtttgtatggcatttgaatcgagttgaggccgttaattttggtgagtggggtgtcgcttaaaacaaaaatagcgcagtgatggtggtgaaactgacgtaagtcagccaaattcttttcggccacactatcccaaggcaggcaggcaattagagcaattttttgcgtggcaaggctggcaatgccgtgcttgagttcgccacaagagcaagcctcggccaagcgatgcgccatggctttgaatttgagtgcgccttcgctggcaataggcgtgtaattttgtcgtgcggtgatgaaaattgcggatggttgctgcaggcattgcgcccattgtttgagttgtggcgcgaggcttaaaacttgtgcgattgcgtaaggcagggcggcaagctcggcgtcgatatcgctgggtatggcttggttttgtgattgggcgagggtttgcgtaattaaaaataagcccagcagttgggcgcaaaatgttttggtggcaatgcggctgtgttgctcgccaacctccagcactaattgccattgggcctgctgcatcagcgtgctgtcggcatgatggccgatggcgatcgtcaaagggtagtccagttgttgtgcgtatttgagtgcggctaaggtgtcggcggcttcgcctgattcggcaaggataatcaccagtgtgtgagggcgagagcgtaaatgttgatagcaaaactcgctggctaattcaacttgagtgggaagatttgcaaggctttcaatccaaaagcgagcaacttgtgccgcatgaaagctcgagccactggcgatcagtaacaccgcttgggtgtcggcaaagcgctcgggctgttgtagccaaggcgctagcgtgttggctttggcgtgttcaattagattggcgtatagcgcagcttgatcgttaatggcttgcaatagcccgccgcgctcggctgtgttggaatggggtgaacttaaatcgacgctcgcgatcggcatggttaactttgcggtgtgctgaagtctttatcttagtgaacgcaacgtcaattggcctgtcttattggcgatgtaaattaataagtgcttgggtggtggcagaatctgcggcaaattttcgggcgaataaagccttgctgtctcgaagttggctgatgttttcaggcttgagtaggaggggcgaccatgcgccttcatcccattctaaataacgccgcgcatcgctagatagctgctcggccagtgggctattcattaaaatggtttggaaaaacatctcatcagggatgagggtgtggcggaaaaaatccaccacctgcggctgctttgccacaaagtcgagtacggtttggcaggcggtatggctgagtgtccaccattgcgagccggcatacacttgcgaaattggcgccggcaaagcgcgttcaatgccgacttttcggcttaagcgctgtattttttgcagtgctttattgaggcgcgtgccgttgagggcttcaaagtaccatgcgcgatagcggtaggcaatgtcgaactctggtgctggcttgatgtcaatcaagccaaggtaggggctacgtgctaaggtttcttcgatgtattgattgctatgaattgggtaatcttgcccagagagtaataccccccaatcaaaaccatctttgttagcggctgccatcagccttagactggcatcgaccaatgaaaacccgccccagcggcaggcttggcgttcaataaagtgaatattctctagcgccgaaagttggctttggagtgcagtgaagattgcatcaggtgtattggcgtcgatgtgaatataaaaccgtgaatgcggggtattaagttgctgaaccaagcgtgaaatttgttcgggatgggcgtgggccagaataaagtaagcaatggtggtcattttttacgcaaaaacacggtttaaagtgtctctattctaacagtcttgacttgttgagcggtgctgacgacggttttgcggctttaatgactgttttcagctcgatggcaagggtacaataagccccttgcgcgaatggggcggctgactgcgcttattcgtgtgtttttgtgaaatacttttattttgggctcaaacttatggcaaaagcagcagcgaaatcggcgaatttacccgataactttgaacaaggcttggccgagttagaggctctcattgcccaaatggaagcgggtggacaagcactcgatgcgagtttgttggcatttagccgtggtactgaattattgcgcttttgcgaaagcaaattaagcgcggcagagcagcaagttcgcctcttagaaggtggagagctcaaaccgatgccaaagatggggacagaataatgagcaaaacggtagcgactgattttaaactctggatggaagacgttcaggcgcaaatggagcgcgcgctatcgcgggtattgccatcgagcaatcatttgcccgaacgcttgcacgacgcgatgcgttacagcgtgcttgatggcggcaagcgagtgcggcctttattggtttttgctgccggttcgctggttgatgcgccggctgagcgcttgcagtatgccggctgcgccttggaatttattcatgcttattccttagtgcatgacgatatgccggctatggataacgacgtgttgcgtcgaggtaagccaacagtgcatgtggcttacggtgaggcgactgcgctcttggcgggcgatgctttgcaagcggcggcgtttgaagtgctggccaatcatagcttggccgacaatccggcagatcaattacaaatgattcgtatcttagcgagcgcatcgggtagtttgggtatgtgtggcgggcaaggtattgatttatatagcgttgggcaaacgctgactttgccgcaactcgaaatgatgcatattttgaaaaccggcgccttgattcgtgcggcggtattgttgggttcttactgcggtacgccactcaccagtgagcagcgcgaagcgctcgatcattacgccaaatgcattggtctggcgtttcaagtggttgacgatattttggattgtgaggcggattcggccaccttgggtaaaaccgcaggtaaagatgccgccaataataagcccacctatgtggctttgctggggctaaaaggcgccaaagaaaaagcggccgaactgaaagcctcggccttggcgtcattagcgccctttggggaaagagccaatatattaagtgcccttgctgggtatattgttgatagaaaatactaacagggcttgcagggggataccccggcaaagcaaggtacacatgaattatcctttgcttgataccatagaaatacccgctgatttacgccaacttgaccgcaaagaattgcctgcgctcgctcagcaattacgtagttatttgctggattcggtgagtcataccggtggacattttgcctctaatttaggcgcggtggagttaaccgttgcgctgcattatgtgtttgacaccccgcacgatcgtttggtgtgggacgttggccatcaaagctatccgcataaaatcctgactgggcgcaaaaaccgcatgctgacgatgcggcaaaaaggcggcttggcaggctttcccaagcgcgaagaaagcgaatacgacacgtttggcgttgggcattcttcaacctcgattggtgcggcgttgggcatggccgaagcggcgttgattaaaggcgaaaaacgcaaagcgattgcggtgattggcgacggttcgatgacggctgggcaggcgattgaagccttgtttaatgcgggtcatcgcgacgacgtcgatttattggtgattttaaacgacaacgaaatgtcgatttcacccaatgtcggcgcgtttaataattatttagccaaattattgtcgggtaagttttacaacggtattcgcaatgcgtccggcaaagtgctcgatgcggtgccgccgctgaaagaatttgccaaaaaaggcgaagaaagcgtcaagggctttttaacacccggcactttatttgaggaaattggctttaattatatcggcccaattgatggtcatgatatggaaacgctggttgccaccttatccaacatcaagcagcttaaaggcccgcagtttttgcatgtggtgaccaaaaaaggcaatggttacaagttggcggtggccgatccggtgaagtatcacgccgtagcaccgtttaatcagcaagatggtgtttgtagcagcaaggtgagtaaacccacatttacccaagtgtttggcgactggctgtgcgatatggccgcgcaagacgagcaattggtggggattacaccggcaatgcgtgaaggctcgggcatggtgcgctttcatgcggaatatccaagtcgctattttgatgtgggtattgctgagcaacacgcggttacttttgccgcgggtttagcctgtgagggcttaaagccggtggtagcgatttattcgacctttttgcagcgcgcttatgatcaattgattcatgatgtggcattgcaaaatctagatgttacttttgcgattgatcgcgccggtttagtcggggccgatggaccaacgcatgccggtagttttgatttgtcatttatgcgctgcattccaaatctggcgattttagcgcccggcgatgaaaacgaatgccgacaaatgctctataccgcgtatcaatacgctggcccagccgccgtgcgttatccgcgcggtagtggtttaggggcgacggttgagtctgagatgcatgcattgccttggggcaagggcgaaattcgccgctcgcggcaagacacggcaacaacaacgcgacgcgtggcaattctggcgtttggcgctgtgctggagcctgcgctggctgccgctgaagcattggatgcaacggtggccaatatgcgctttattaaaccgctcgataccgagttggttctggcgctggccgcttcgcatgatctgctggtaacggtggaagacaacgccattatgggtggggcggggagtgcggtattagaatgcttggccgcgcaaggcgtttctcgtgccgtattgcaattgggcttgcccgatagct

SEQ ID NO: 2882 - DNA, 23264 bp, synthetic construct
  source 1..23264: mol_type = other DNA
  variation 14730..14731: note = note, n is a, c, g, or t
  misc_feature 1..23264: note = Synthetic
tacgcccagagacctcgatcaccggcgcgtcgttgaagtgcttggagaagcgctcggcatcgatggtggccgaggtgatcaccacgcgcaggtcgctgcgctgttccaccagcgttttcagatagcccagcaggaaatcgatattgaggctgcgctcgtgcgcctcgtcgatgatgatcgtgtcgtaacggctcaatagcggatcgccctggctttcggccagaaggatgccgtcggtcatcaccttgatcgcggtgtcgtggcgcaccttgtcggtgaagcgcaccttgtagccgacgatgccccccagctcgccgccgagctcctgcgcgatgcgcgccgccaccgaacgcgcggcgatgcggcgcggctgggtacagccgatcagcttccccggacgaacgcctgcttccaggcacatcttgggaatctgcgtggtcttgcccgagccggtctcgccgcacaggatcagcacgcggttgaccttgagcgcggcgagaatgtcgtcgcggcgggcggaaaccggcaggtcgggataatggataaacaagcggttagtcacaattcaaatattcatccgcgaaggacgcgaaggtgcgcgaaggaaaatcgatagggtttacttcgcgtttctttgcgtcctttatgccctttcgggtattcgcggataagggttttatctgttctggatgtacttaacgtcatcaaaggtttccagccactgcggccgatacaccgccatcacggtaatcgccatgccggttgaaaatgcctcggcccagctgatcagcagggtggcatagggcgtgtagtgcgtgagcagatagtcgagcgtatacgcgccggagacagacatcaccgcagtggtggcgagaccgacggccgccaccgacagcgcagcaccgaaaaagccgttacccagcacataaatgaagaagtgattgggcagccgacggtccagcagacgaaaaatgccccaactcacggctgcgggcaacgccgccatcaacagcgcatccacccccagcccgccccagctgccgcgtccgaacgccgcgtttcccagcaggatcagcacgccggcaaaggtggcgcgccagaaaccgaacatcagcgtcagcgccgccatgccataaaaatggaaattcagccccggcttcaccccggtgcggatttgccatagcgcgagcaccgccacggtggcgccgaggaacagattcagccgctgcgggtcagccagcgcacgccagtcgccggacatcagccagcgccaacccaggaaaatcaggcccagccagccgacgagatgaaatgattcgggcagcaccgttgcggataagcccatcgcggtaaaattcatgggcgaattttacgcgaagcgcaggtctgacttacttacattgagcccacgccatgtccgcacccaaatcccccaacgccccgctccgggacgacgagatcgacgaactggccgacctggtcgacctgatcgatgagcacaccgacgtgccgatttcgctggaaggcctcgacggtttcatcacggcgctggtgtgcagcccgcgcgccatcccgcccggcgaatatttcccggtgctgctcgaccgtgccgacgggctggccacgatgttcgaggatgcagccgacgaggcacgcttcctggcactgttcgagcgccgccgcaacgagatcgtccgcgcgctcgccgccccgatcgaaaacctgaccgactccaaggcattgtcgccgctggtcatggactggaacggcctgctggccgaactgccgccggccgaggccaaacgcctgaaagccgccggcattccgccctatgcccagctatgggcaggcggcttcctgctggccgtggaacactgggaagcggactgggcgctgccggccgacagcaaagacgaggctttcgtcgacgaagtgctcgacccgttctatgtgctggcatcgccactcgatgaactgacacccgaggaaaacgcgatccgccgcgaagaccacctcgcgctcgccctctggggcgcctacgaactgcgcgaattctggcttgatcgcggccagggaccgcgcgcgtaactatttgtaacaaccgtcctgtagcgtaaccctgatgaaactcgtcctgttcgatctcgacaacaccctgctcgccggcgactccgactacgaatggggacaattcctcatcgcccggggcgcggttgacggagtccactacgaagccaagaacaaggcgttctacgaagactacaaggccgggcggctcgacatctacgctttcctcgcgtttgccctgcgcccgctcgccacccacacgcgccaacagctcgacgcctggcgcgcagaatacgtggacacgcgcatcaagccgatgatcacccaggccgcgcgcgatctggtcaacaaacacctcaacgaagccgacctggtcgccgtcatcaccgccaccaacagcttcgtcaccgccccgatcgccagggaattcggcattccccacctgatcgccaccgaccccgaggaaatcgacggccatttcactggcgaagtcgccggcaccccctgcttccgcgaaggcaaggtggtgcgtctcgaacatttcctcgaagcccacggcacccggctggactgcctcgacaccagctggttctacagcgattcgcacaacgacctgccactgctggaaaaagtccgccacccggttgccgtcgatcccgaccccaccctgcttgcccaggccgaagcccggggctggccggtgatttccctgcgtcaataaataattgtgcggataatgcaaactgctgttgcccatcaaacgaacatgacgacccccaccacccttgccgaaagtgtcgccaaacaacgcgaagcgctggccaacctgctacgcgaaccgctggcgctggccgcccaggcatgcagccacgcatggcccagccgcgccggcctgaatgcggcgctggcccatgcgctgaccaccatgcctgcatgcaagtatctgtatgcgctggatacccgcgccattcagctttccgacaacatcagccgcgaaggcctgatcgagacggattacgggcgcgaccgctccgatcgtccctatatgcgcgaagccgtgccgaaccaggggtttctgctgacccaggcctacatcagcctgcgcgccaagcggccgtcgctcaccgcgatccagatcgtgcgcgacgacgacggccaggtgctcggtttcgtcggcgccgatttcgacctgcgcgacctgcctctgaccggcaagctgtacgacgaacccacctactggcggcagatcaagggcgaccccgcgattcgcggcgcggtgttccaccagacccgcatcgacagccagatggacctgcatctcgacaccgtcctgggcgtcatggaagaactcatgaccgatcacggcatctttcacggcaagctgcacttttccagcagccgcgccaccatctggctggtcaacgacccctatcgctaccgcctgctggacatcgacgccctgaccgaccccgacacctgcctgatctatcctcacctcgactatccggccaatgccctggtgccgcgcgacaagatacgccccgtgctcgaaggcctgcgcgcgctgcgtttcatggatgaaaccttctatctgcgcgccggttcgctcaacatcttcaacggcatggtcgggctcaccttctcgtgcgacggttcgcactatctgccgtgggacgagttcctctccaagggctacgacttctgggccagcggcaagtcggccggctaaatcccccacccatcaatcgcccgcggctgcgcccccggctccggccaggctcacgccgaccccgggccaccgccgtgcccagattcaccgccaaacgcgcccgttgggctgccgaataaatccggcaccccgcccgcgcaggctctcagggaaagactgtcaaccggttcggtcgtgaaccgactgtcgccccgccccaccggtatatccgcattcatgtgcgccagcgcacagatgagaccggccgccagcaagcaacctgtgacccgtagtctggacaaactcgcggtgtgtactaccgtacagacgagactggccgccaacaagcaacctgtgacccgtagtctggacacacgcctgttgtgtgtattaccgcacagacgagatcgaccgccagcaagcaacatgcagcctggcaaactcactgcaacgcgccccagcgccgaaaggattatattgaaaaccaaacttatcccttatgcgctactggtcctggggcaagctgcctttgcccagcagcagcccgatgccggcagccagatgctgcaaatccagccggccccacgcccgcaaagcatcgagccgataatccgggtcgcaccctccccggtggcgcaaccagccgatgattccggtgcaagaatcatggtcaagaccttgcacgtgaccggtgcacaggtgtattcggaagcccagctgctcgcactcacccgcttcacgccggacagcctgttgtcgctcgccgacctgcgcggcatggcagcgaacatcaccagccattaccgcaacaacggctacttcgttgcccaggcctacctgccggcgcaggacgtccatgacggcaccgtgaccatcgcggtgatcgaaggccactacggcaagatcacgctcaacaaccagaccaacctgtccaacggcctcgcccacagtctgcttggcggcctgaaagagggcgacctggtggcatccgcgccactcgaaaaccggcttctgctgctctccgacgttcctggagtcaaggtcaattcgaccctggtgccgggcgcttcagtcggggactcggacctgatcgtcaacctcacccccgggccccgcgtctccggcgaagtcgatttcgacaacgccggcaaccgctacaccggggtgtaccgagtggggggaacgctcaatctcaacaacccgctgggccgaggcgacgtcgcatcgctgcgcgccatgaccacaggatccgggctgagctatggccgcgcttcatatcagatgatgttcggcaaagccaccatcggcgccgcctacagctaccttgaatacgagctgggtgaggaattcgagagcctgctggcccatggcacggcaaagatcgccagtctttatggcagctatccgctgatccggtcgcgcaacaacaatatgtatgccggcctcacttacgaagacaagacgttccaggacaaggtggactccaccacgccaccgcaggtgaccgacaaagacgcacaggtgctgacaggcagcctgtacggttccaaacgcgaccgcgtcggcggcggcggaatcaacggctatgcgatcaactggtccttcggcaacatcgacatcaataccccggccgcgctggtcattgacagccagacggcagaaaccaacggccacttcagcaagctcggcatcagggcctcgcgcctgcagtacgtgaccgactcggtctcgctgtacggttcgatcaacggccagatcgcatccaagaacctggattcctcggagaagatggagctcggcggcatgtatgccgtgcgcgcctatccggaaggcgaagcctatgccgaccagggcgctgtcgcgaatctggaagcgcgctacctgctgcccaaggcccacaatggctatcccggtcagatgcacctggtcggtttcgtcgatgccggccgcgtgaccatccacaaaaatccatgggcttcggggtcgaacaaccgcattctcagcggagccggcatcggctacacctggcaggaagtcaacaacttctcgctgaagacctattacgccgccaagctgggcaacgaagacgcgatctcagctccggacaagtcgggccgcttctggatccagctcgtgaaatatttctgaatggaatgggaaaatgaaatcaatctaccgatcgacccggaacgataagcctggcaaacaactgccccctgcaaacctgtgcaccgcatgcaatacccgctttgcgctgaaggggctggtggtttccctgatgctggcctttgccctgcccgctcacgccctgcccgagggcggcgtcgtcgctgccggtggcgccagcatcagcagcggtgcaggcggaacctccatcacccagtccacacagaatgtggccatcaactggcaaagcttcaacatcggggtgggcgaagtcgtccagttcgtgcagcccaacagcagctcggtggcacttaaccgtgtgctggggccggatccttcgagcatccttggcaacatgctggccaacggcaaagtgttcctcgtcaatccgaacggcgtcctgttcggtacgggcgcgcagatcaacgtcggcggcctggtcgcctccacgctcaacatcagcgacagcgacttcatggccggccggtacctgttctccggttccggaaacgcagcggtagtcaaccgcggcacaatcaacgccgccgacggcggcttcgtcgcgctgctcggcgccgaggtcagcaacgagggggtcatcgttgcaaggctcggcacggtagcgcttgccgccggcgataccatcaccctcgacgtcgccggagacggcctgctcaatatcacggtggatcagggcgcactcaatgcgctggcccagaacggcggcctgatccaggccgatggcgggcaagtgctgctgaccgcacttgccgccggaaccctcctgcagagcgcggtgaacaacaccggcgtgatccaggcgcaaaccatcgagaatcacaacggcaccatcaggctgatgggcgacatgcgggtcggcacggcaaacgtggccggtacgctggatgcttcagcccccaacggcggcgacggcggcttcatcgaagcctccgctgcgcgtgtttctatcgccaatgacgcccacatcacgaccgccgcacccgcgggagtctatggcatcttcctgatcgacccgcaggacttcaccgttggcagcgcctccggcgacaatatcaccggcgcaacactcggcaccttgctggtcaccaacagcgtcatcatcagcacggacatcggcaccgatgccgtagtcgccggaaccccgccagtgtccagcctgttctctcccctgctcggcaatggcgatattttcataaacgaggcagtgtcttggacaacgggtggaaccccgacaacgctgacattgaacgccgcccgcgacgtcaacatcaacgcggcgatttctgcgaccggcggcaacctggtggtttgttgcggacgtgatatcaacgtagatgcggcgattacgacggcaggggccggcggcagcatcctgttggccgccaacaacgatgtgaacgtggatgcggccatttccctgaccttgggcaacctcacgatatgcgccggcaacgatgtaaacctgatgggctcggcggcggcaattacgctggtcggcatccccgctgtacccgctctgagcctcgatctggaaaacggcctggttctcagtgccggcaacaatggtaccggaccgggggctaacggcggcaccgtgaacttcacagccggcaccccccccattgccatgacggaagcacccgtgaatattttttacaatccggttgcctacacatcgccgacagactattccgggggcaccttcttcacgctggttggcggcctctccacggtgacgcaatacatgctggtatttcccgacggggcggacaagacctgggacggcaccaccgacgccaccttcacgggtttgaaaggcacccctaccggcgtcacgctggcgggtgccggaacggcctatttcgagaccgcggacgtaggcgacgacaagaccgtcaacttcactggcttcaccctcacgcaaggcccgatcctggccggcggcaccgaaatcaactatgccttcgcgaatgcgtgctgcgggccagacgtcggaaaaaccaccgcgaacattctcgcagcggtcgagccgccggtcgaaccgcccgttgaaccgcccgttgaaccgccggtcgagccgcccgttgagccgccgatcatcccgcccgtcatcccgcccgtcatcccgccggtgctgccgaccgaggcattggacatcgcacctgaggaaatgatgggcccagcggcgattctcgccaccataccggcgtggtttcccaccgttgtaagcagcgcgacaccgccgcaacttctgagcatcgcgccgcccccggccccgccgcccgttatcgttcctgaggaagtaccgccgccggccccgccgccgcccgttatcgttcctgaggaagcgccgcctgcgcctccgcctccgcgcaagcaagatcgaaactaacctgagggtggccgactccgccgccaccgattgagatggcacatgcacggcggacccatgcagcagttcacccgatggcggctttctgtcgatccgccatacggccttgcctcgtcctgctgatcgcagccgccggcttacacccggcccttgcgaaagaaggtgccacgccggtgctaaggctggaccaacccgtgacctggctcgatgacctggtcacacccgctgcagcggtccctcccgtgcatgccgcccccccattccgccgcgccaatttctggatcgcacgcgcgtccagggatgcgcgcaccatcgccgactgggtggtcgactcaggtgacagtcgcggcatgccgttcgcgatcgtcgacaagaaagacgcccaggtattcgtattcaatgcagacggacagcttcgtggcgcagcttcggcattgctcggcctggccctgggtgatgaggccgttcccggcatcggccagcgtacgctggcgagcatcaggcctttcgaacgcacgacaccggccggccgctttgtggccgtacttggccacaacctgaaaggcgaggaaatcctctgggtggactatgaaggtgccgtctcgatgcatccggtaatcagttccaaccccaaggaacgccgcctagaacgcctggacagcccgacgccgctcgacaaccggatttcctacggctgcatcaatgtaccggcgacattcttcgcgaacgtggtgcgtccggcattttccaaaacaaatggcatcgtctacgtattgccggaaatcgcaacgtcccagcaagtcttcggctcatatgacgtcgccgaacgggaatggctgcatgccacccggcaacgcctgcttccgctcgccatccagccgatcaattccacggttaccgcaaaataacccccttgcggcaaagcagccgatggatgccggtttccggtcccggcgatcgcccccagcaacccgcgcagatttgtagccagggcacaaagcgccgcatcagcacacgccgagttaccccgctagcccagagccgatccatgcggctactcgacagcctgcacgcctgttcgatcaacatcttcaacggcatggccgaactcaccttctcgtgcggcggttcgcaccacctgccgtgggacgaatgcccgagcaaaggctaagacttctgggccagcagacaatctgccggctgaatcacacacacaaatagccaccatggcttgcatggtctatccgtatgcagcacacttttgaaaacaacaaaaacaatcggcgcaaaaaaacaccaatgaacaagcgaaccggaacctttgagcaaactagacgaactctatcgcctgcaccgtctgctggatggacggcgcaccggcctcccccgcgccgcgctcatcgctgagcacggcttttcgcgctccaccctcacccgccacatcgccgacctgccaatcatgtggcatctgctcgaagatgattcttaatagcgttctagcgggcagaaataataaaaagacccgaggcaagcctcgggtcttggattcggttcatccccgaagggataaccttattgcagcaacggctctcaccccggaaagctacaactagccgaagtctacaccaaaggagacgcaacacgccatggctttaaatccccctctgccttacaccttgggcctcgacatcggcatggcttcagtcggcgcggccctcctcaccgaacaacgcattcttggcctgcatgtacgcgccttcgacaaggccgaaacagccaaggaaggcgatccgctcaacaagacccgtcgggagtcgaggctcacccgccgccgcattcgccgtcgtgcgcaccggctattacggctggcacggctattcaaacgaactgggctcattgcagcggctcacccggaagccttcgccctgcctggcatcagtccgtgggatttgcgtgcggatggactgaaccggctcctcaccccagccgaatgggctgcggtgctctatcacctggtcaagcatcgtggctttcagtccacccgaaagagcgaagccaaggaagacgaaaaagccgggcaaatgctatccggcgtatcagccaatcagcagcgcatgaaggaaaagggctggcgcacggtgggcgaaatggctgcccgcgacgaagcctttgccgaagccaaacgcaacaaggggggtgcatacacccacaccttcgcgcgcaccgatcttgtagccgaactgaagctgctcttcaagcaacaggccggcttcggcaatccacatgtcggcgtcgatttcgaaaacgacgttgaacaacttttactcgcacgccgccccgcactggcgggtgatgcgctcctgaagctagtcggcaaatgtccgtttgagcccaccgaataccgcgcacccaaggccagctacagcgccgagcgttttgtctggcttaccaagctcaacaacctgcgcatttccgaagtcggcgaacagcgcgcgctcaccgcaggcgagcggcaaattctgctcaaccaaccctatctgctcgccaagttcacttacaagcaagcgcggcaaaggctcagcctggccgacaccgccaaattcaccgtgttgacttaccggggcgacaaagacccggaaagcacgaccttctttgaggccaaggcttatcacgaattgcgcaaagcctatgaaaaagccgggctggaaagccgctggcagcgcgatgcgctcgaccctacccggcttgatcgcctggcctgggcgctgacttgctacaaaaccgacgatgatattcgcgcccacctcgccgaacacggtgtagagccggaaattaccgaggcggtattgggcgaatccttcgacaaatttgttgggctgtccctgaaagccttgggcaaaatcctgccgttcatggaacaaggccagcgctatgacgaagccgtgcaaagtgcgggctatgcgcatcacagccagctaaaccgagacaccaccaaaaaccaatacctgccgccgcccgacaaagaccagattcgcaacccggtggtttaccgcgcgcttaatcaggcacgcaaactggtcaatgccatcgtccgcgaatacggatcgcccgccgccatccatattgagctggcgcgggatttgtccaagcccatggacgagcgccgcaagatcgaacgcgagcaaaaggagtttcaggaacgcaaagccaaagatcgcgaagcctttattgagcagttcagtttcgaccccaaaggcttggacttgcagaaataccggctctaccgcgaacagatgagccagtgcgcctacagccaaaaggccatcgacgtaacgcgattatttgaacccggttatgccgagattgaccacgcgttaccctactcgcgcagttacgacgacggccagaacaacaaggtgcttgtgctcactgcagagaatcgcaacaagggtaatcgcaccccttacgagtatctggatggcgcgagcgacagcccgcaatggcagcgattcgaagcctgggtattgcagaacaaggcctaccgtcgtgccaagcgcgaccgcctgctgcgcaaacatttcggtgaggacgaagccgaaggctttcgtgaacgcaacctcatcgacacgcgctacatctgccgcgccttcaaaaccatggtcgaagaccacctgcaatggcatgccgacagcgatgcgaagaaccgctgcgtggtagtggccggacaactcaccagcctgctgcgcgcacgctggggactcatcaaggtgcgcgaaaatggcgacttgcaccacgcgctcgatgccgccgtcatcgccgcagccaaccgcagcctggtcaagcgcatggccgattattccaagcgcaacgagctcgcccaggtgcgcgaccgctacattgaccccgccaccggcgagattctcgacatcgcagctatgcgacaagtcgaagaacacttcccctcgccctggccgcatttccgcagcgaacttttggcctggctgtcacccaatccggcacatggtctggatggcttggcacactacccacccgaagaactggaacacctgcgcccgatgcgcgtatcgcgcgcaccgacgcgccgaggccttggcgcggcacatcaggaaaccatccgctccgttgggcgcgaaggtcggctactagccgacggacaatccgctgtcaaaacgccacttaccgcgatcaagttaaaagacttggaaaacattgttggttacagccattcacacaatcacgccatgattgaagcgattagaaaacggctggaaacgaatgggaacgacggtgccaaagctttcaaaatgccgctgttcaaacccagcgccaccaatgggtacgatgctgacaaaagccatgtgggcgaaaccgatcagcgcgccccgcaaattcgcagcgtcaaactgctggctacacaaaaaagcggtattcctatccgcaaaggcatcgccaacaacggcagcatgttgcgggtggacgtgttcggcaagggtggcaagttctatgccgtgccggtgtatgttgccgacgcagcgcgggcggaattgccgtatcgagcggtggcggcattcaaaccggagaacgaatggccggaaatggatgagaaacaattcatgttcagcttgcaccccaacgattgggtaacggtaaaactcaaagccgaaacaatctctggttattttgctggcatggatcgctcaactggcgcaatctcggtttgggcgcatgaccggaaccaaagcattggcaaggatggtcaatggcgcggtgtgggaatgaaaacagcactcgccgtcgagaaataccacgtcgatctactcggcaacctgcaccgcgtccacaccgaaatgcgtttaccccttcacggcagtaaagccagcaaggactgaacatgggctggcgcagcgtggtgatcggcaacccggcgcaactcgattttcacctgcgcgcgctacgcgtccgacaggatggcaacaccgcgcatgtgccgttggaagatatcagcgtgctgctgatcgagcatccacaagtgacgctgacctcggcgctgctgtccgcgctggccgacgcacaggtcgctgtgctgacggtaggcgccgatcaccaccccaacggcgtgctgctgccctatctgccgcatagccgtgcactcaaagtcatgcgcgcgcaactcgactccagccagcctgctcaaaagcggctgtggaaaaccatcgtccaacaaaaaattcgtaatcaggccgctgtgctggggcgacatgccaatgccgaccgtgacatccggacactgctggcaatggctgacgacgttcgttccggcgacaccgacaatctcgaaggccaggccgcgcaacgttactttcgcaccctgtggggcgataacttcacccgcaaccaaccgcgtttcgtgaatgccgcactcaactacggctatgcggtcattcgtgcggcgattgcccgcagcctcgtcgcctacggtttcttgcccgctttcggcatccaccaccgcagcgagcaaaacgcgttcaacctggctgacgatctgatcgagccttatcgtccgctggtggatgcgcatgtgctgaaaagctggccgctggagcctgaacgcgagctctcgcccaaggacaaacaacacctggtcggcctgctgcaccgcgatgtcaccacaacgactgcacggcaaaccctgcttgcagcggttgactcaagcgtggtcagcctcagtcagtggctggaacacgccagccccgctgtcttcgtcatgcccgtgctgaccggcctgcccattcacccggaggacgcggatggctaaagccactcgccgctatatgcgtctgatcgtcttctttgacttgcccaccgtgaccaaagcggaaaagcgcgcctacaccgtgtttcgccgctttctgctgcaagacggctacgacatgatccagtggtcggtgtatggccgcatggttaacggcttcgacgacgctgagaaacacctgaaacgtctgtcggccagccttccgaaagaaggctcgatacgctgcctgcaagtgagcgaaaagcagttcgccagcatgaaactgcttgtcggccaacgcagttttcaggaaaaaaccgtcaatgctcagcaaatcttgttgttttgaaagtcgaaaaaacgctaccagcccgcataaatccatgatttatgcgggctggcagcgaggttattgtagctttccggggtgagagagggagctacaacaccattgacgcagccgagcaatatatccgtattgtagctttccggggtgagagagggagctacaaccctgtgcggcatgggggaaagctacgcccgattgtagctttccggggtgannggtgagagagggagctacaacttcgccggcagcgtcgtcttcgtgctggccattgtagctttccggggtgagagagggagctacaacagtttcgtatcgaagccggtggcttccgtgattgtagctttccggggtgagagagggagctacaacacatgatcctgcaggcgcgcaagggggcggattgtagctttccggggtgagagagggagctacaacgcaccacggcgacaccttcagcggctacctattgtagctttccggggtgagagagggagctacaacagcaacacgtgggcgatgttcgacgaagtgattgtagctttccggggtgagagagggagctacaaccccattgcggggctgaagccccgcaatggggttgagccgccttcggcggcccgtctataagaaaaagcgtactacgggtaacggcagccgaaccgctcgcgctgttgccagaaaacggcggcggcccggccaaagccttcggctgctactggtgcggcggcttgctatgggcatcgaatagcgcctactatgcactacaagtgcgggctttttcaggagggtcgaccatgcaaactttcaccatccgcgatctgcgcgaccgcaccagcgaactggtgcgggacgccgaggcaggcaaactttccatcgtcaccaagcacgggcagccggtgttcatcgcggtgccgttcgacgagagcctgttgaaaagcggcgtcaataccgcgctggctgttcggctgttcgacgaatcccggatcagtctagggcaggcggtcaaattggctggcttgagccattccggtttcatcgacttgctaggcagtttgcatattcccgtggcgcgaccggagcccggcgaaatcgagcaggaactggccgactttgcgtaagctgatcgtggccgataccgggccattgcttgcgctggcgcgtatcgggcaactgggtttgctgtcagccttgtttcaacaagtattgctgacgccgacggtgctggccgagtgcgaagccaggccggataggggcgaaggccgtgacatccgcgatgcgctggcggcgggctgcttcgagctactggctccgcgtgacgcgctgcccgttctgggcatcgaccccggcgaaaccagcgcgttggccttggcgctagaacacggcgcgggcgtgttgatggacgacaaggccgggcgcgcggtggcccggcaattgggcattgccgttatcggcagcgtgggcgtgctggtcctagccaagcgcaaggggctgctgcccggtgtgcgcccgctgctcgaagccttggtcgagggcggctattttctgggaccggaactcgtcaaagaggccatgcgtcttgccgacgagtagtcgcccatgcctgatccgctcacgcggggataaaccgcacgaggccatcaaatccgccatgactgccaggagaaacaaatgatcgagacggccttcgccactgcgattgtgctggttctgcttgccgcgctagtgttgatgctgttttcgtcaccgtggtgggtgacggtatgggtcgttgccactatcgttttgctgctcgactggctggtcaaccgggctgcctgccctgacaagaagggcgactgatgcgtatcaggcgtttttcttgccgggcctgcgggcattcaggcgatcatcgcgccttcatcgcccggctgacggtatccaccagcaaatcgatttcttcgcgggtgttgtagaaagccagagaggggcgcacggattctttcagcccgtaatgagccagggcgggctgggcgcagtggtgtccagtcctgacggcgatgccttcgcggttgagaatctgaccgaattcggtcggcgtgatcctgtcgctgacgaaggacagcacgcctgccttgtgcggcgcggttccgatcatgcgcaggccggggatggcggccagccgttcctgggcgtagaccagcagttcatcctcgtagcgggcggcattggcgaaaccgatgcggtccagatagtcgatagcggcacccaggccgaccgcgcccgcaagaatgggggttcccgcttcaaacctggccggcacgctgttgtaggtggtgtgctcgaaagtgacgtgctcgatcatgttgccgccgccttgccagggcggcatgtcatcaagcagcgacttcttgccgtagagcacgccgataccggtggggccatacagcttgtggccggacagcacgaagaaatcggcgtccatttcctgcacgttgaccggaaaatggggcgccgattgcgcaccgtcgaccagaaccacggcgccgcggcggtgggcgctggcgatcatgtcgcgcaccggggcgacggtgcccagtacattggaaacgtggccgatggcaaccatgcgggtgcgcggactgaacaggcgctcataggcggcaaggtcgatttcgccgttgtcgaggatgggcgccacacggatgacagcgccggtttcctggcacacgtgctgccacggcacgatgttggcgtggtgctcgtattcgatgaggataatttcgtcgccgcgtcctaggtgctgcttgccataggtctgcgccaccaggttgatggattcggtggtgccgcgagtgaagatgatttcctcgacggcggcggcgccgatgaaacggcgcactttctcgcgcgcatgttcgtaggcgtcggtggcacgcgcggccatctcatgagcggcgcggtgcacgttggagttctcctcctcgtagaaccggctgatgcgatcgatcaccatgcgcggcttttgcgtggtggcggcgttgtccagccacaccagcggcttgccgttgacgcgctgctgcaggatggggaaatccttgcgcacggcgtgcacgtcgaagccgtgcgccggcccgggctggtcatgcgcagaatgagcctggtcgggctgggcgccggcgggcatccagtagggggaggccacggcctggctgccctgcatccagtaaggcacgccgctttccaggtgcggctgttgctgaagcaactcgggcgggggcatgacaaagctgctggccggggaggaaaacgattccatgcgcccgggcaggctggtgggcagcccctgcgacgggtgcgcggatgtgtgctcgacggaaggcgacgcagcaggcgcggtcgggatcggatcgccggcgggtgcggcgtcgccccggtacatttgattcagcatctgctcaagctgatattcgttgagcgaagcgccaccagccgatggcctgcctctccccagcgcaagcggtcgcatgaagcgatcacttgtactcatggtaattgccgatctcgacgttctccaggcaggcaacggcgtcatcggtcagcaccgcgagcgagaagtacatcgtcaccagatattcctcgatggatttctggttgatgcccatcaggcgtaccgacaggctgggctgatattcacatggcaggccggtgcgatgcaggccgatcacgccctgcttaccctcgcccacgcgcaccagcaggatgctggtcttgcccgacgagcgggtcggcttgctcttgccatccactagcagcttgtcgcacgggaaaatggggtagccgcgccaggtgatgaacgaagaaccgaacatctgcacggtgggcggcggcacgcccctgcgcgtgcactcacggccgaaggcggcgatggctttggggtgcgcgaggaaaaacgcaggttccttccacaccatggacaacagctcgtcgagatcgtccggcgtgggcggacctttgcgggtggggatgcgcatggtcgaagcgacgttgtgcaacaggccgaattcgggattgttgatcatctcccattcctggcgctccttcatgtcctcgaccgtcaggcgcaactgctgctgaacctggtcgtgcggggtgttgtagaggtcggcgatacgggtgtggatctgcaccacggtctgcatcgcgtgcaacgagagttcgcgcggctgctcctcgtagtcgatatgcacgccttcgaccacaggctcaccgtcggcggcggtggtgatttgagtcctgctctcgccatattcgttgatcttctggctttcgcgctcgcgctgctccacgctcctttcgatggtgtcgcgcaggcccggcacggaatccagcgcgctgaagaagtcctggcggctaagcgcgaggaatacgcagggcgtcaccgtatccacgttggcggtacggtcgatgccgcgcagcagcgcgatctcgccgatgtagtcgccttcggtcagcatcgacaggcgcaccttgtctccgtggtcgctgacgtcactcacttccaccttgccatcggccaggatgtagaacttgtcggcggcgtcgccgcggctcatcacgcgctgccccatggggaagctttcgctcaggaacttggcggccagctcgtcgaggaaagcctcgtcgcagtgctcgaagaggggaatgctcttcagatgcgcgccgaggatcttgccgctgccgccctcggcgctgatggggaccttgatgaccttgcgcaccaccgtcttgcggcggttgacccggaaaatgcccgcttccagattcacccacggcagcatctgcatgaaccaccgcggcgtggaactctccatctgcggcacgctcttggtggtgttggccagattgcgcgcctgctgggtgttcagactctgtttggaatcgatttcattgctcatgcggtcctctcctgattgtcgtttttgtcaaaccttgtggggccacaatgacgcatccagacttgcttgcaagatgcgtgcgaccgcgccgtttttttgcaaagtttaagtccgccccagcaagaatgaaacccgcacttttggcttaggccgcaacctggcaatcggcggttcggccgctaccggcgatccacccgacccgcagtttcaataccccttgccgcaacaacttgaatcgcacgcctcccacagcggataatgcgatattgcgtcgggctgcctgctttggaaacctacatcctcattctcatttccacggtgttcgtgaacaacatcgtgatggccaagattctcggcctgtgccccttcatgggcgtgtcgaaaaaactggaaacggccatcggcatgggactggcaacgaccttcgttctgacgctggcgtcgggcgcaagctatctcatcaacgaatacctgctcggcaccgagctgttctatctgcgcacgctgtcgttcatcgtggtgatcgccggcatcgtgcagttcaccgagatgttcatccacaagaccagcccgctgctctatcaggtgctgggcatctatctgccgctgatcaccaccaactgcgcggtgctggggattccgctgctcaacgtgcagcaacagcacggcttcgtcgaatcgctgtttttcggtgcgggtggggcgatcggcttcacgctggtgctggtgctgttcgccggcatccgcgaacggctggatacctgcgatgtgccgtcgcccttcaagggcaccagcattgcgatgatcacggccggcctgatgtcgcttgccttcatgggtttttcgggcctcgtcaaataatgctgaccgcaatcggggtgatggtcatcctggccgtggtgatcggcctggtgctcggctggtcggcgattcgcctgaaggtggaaggcaatccgctggcggaaaagatcgatgccatcctgccgcagacgcaatgcgggcagtgcggcttccccggctgccgcccctatgccgaggccatcgccaggggcgaggccgatatcaaccagtgtccgccgggcggcgaggagggaatgaagaaactcgccgaattgctgggggtggaccccaagccgctcgatgaaacccacggcacgccgaaaccgaaatcggtcgccttcatcgacgagcagacctgcatcggctgcacgctgtgcatccaagcctgcccggtcgacgcgatttccggggccgccaagcaaatgcacaccatcattgccgccgaatgcaccggctgtgaattgtgcttgccgccctgcccggtcgactgtatttcgatggtgccgatccccgaagatctgccgcactggaaatggaagcatccggttgtgatgctcaaacaatccccatgagccgcacactccacaccttcaagggcggcgtgcatccgcccgggcacaagacggaatccaacagccggccggttcacgccgcactgctgccgaacaagctcgtcatccccatgcgccagcacatgggcaaccccgccaagcccaccgtcaaggtgggcgaccgggtactgaaaggccagttgatcggcgaagcggacggctatatttccgcagccgtacacgcatcgagttcaggcatcgtcacggcaatcgacctgcagcaggtgccgcatgtttccggcctacccgacctgtgcatcacgatcgagactgacggccgcgacgagtggatcgatcacggcgccctcgactatcaggccatggcgctatccgacctgcgcatgaagctgcgcgacatgggtatcgccggtctcggcggggcggtgttccccagcgcggtgaagctcgatccgggcgcccacgcgatcccgacgctgatcatcaacggcggcgaatgcgagccgtggatcacctgcgacgatgtgctgatgcgcacgcatgccgaagaaatcatgcagggcgtggcggtgatgcgtcacctgctgggcagcaccgagattatcgtcggcatcgaggaaaacaagcccgaggccattgccgccatgaagacggccgccacccggctggactttacggtagaagtcgtcgccgtgccggccatctatcccggcggcggcgccaagcagatgatcgaaacgctcaccggcaagcaggtgccttccggaaagctgtccaccgatatcggcatccaggtattcaacgtcggcacggcccatgccctggcgcgcgcggtacaccacggcgagccgttgatctcccggctggtcaccgtcacgggccacgtgctgcgtccacaaaacatcgtggcgctgatcggcacaccgatacacgcgctgatcgaaattgcgggtgaccgcgatggcgccaccggggtattgatgggcggcccgatgatgggcgtgccgatgcctggccaggatgtgcccgtcatcaaggccacgaactgtctcctggtgaaatcgaaggatctgttcccgccgctgccgcgcgccctgccctgcatccgctgcacccgctgcgccgacgcttgtccggccgagttgcagccgcaggaactgttccgcttcgccaaggcaaacgaattcggacgtgcgcaggaatatcacttgttcgactgcatcgaatgcggctgttgcagctacgtctgccccagtcatatcccgctggtcgatttttatcgttacgccaagagtgaaatctgggcgcgggaaaaggacaagcgcgcctccgatctggcgcgtgagcggcacgagttccgccagttccggctggaacgggagaaaaaggaaaaagccgaaaagctggctgccaaggctcaggccaagcgtgccgagattacagccgatccaaccgcgtcgggcgctccggatgccgacgccaagaaggcgctgattgctgccgccctggcccgcgcgcaggcgaaaaaagccgacatcattcccaggaacaccgatcatctggcgcccgacacccggcacgtgatcgaggaaatcgaggcgcgccgggctaaaatccgcgaactggcgcaccagccgctggaaaccgacgagaaaaaaccctgatgcccgccccattcattcttgaccgcagcagcgtcacccaggtcatggcctgggtgctgatggcactcctgcccggtatttgggtgtatgtctggatattcggtccgggcatcctggtgacgctgtcgctcgccacggccaccgcgctggcggccgaagcggccatgctgaaggcgcgcggctatccggtcaaacccttcctcaccgatctttccgccatcgtcaccgcctggctgctggcactgtcgctgccctcgctggcgccgtggtggctgatcgtcaccggcacgctgttcgccatcgtggtggccaagcatctgtacggcgggctggggcagaacatcttcaatccggccatggtgggctacgcggtgctgatcgtgtcgttcccggtgcagatgacacagtgggcaggcccggttgcgctgacggaaactccgctcacgctggcgcaaagcgcaagcgtgatttttggcttcgacagcacgaaagccacgctcgacgccgtgaccatggcgacgccgctggatgccctgcgaaccggactgctgcagcaactgaccgtcgacgaaatcatgacccactccatcttcggccactacggcgggctgggcttcgagtggctggcggccgcatttctgctgggcgggctgctgctatgggcactgcgcatcatcagctggcaggtcccgctcgcctttctggccggtatctggcttgccgccggcttcctgcatttctt

SEQ ID NO: 2883 - DNA, 23261 bp, synthetic construct
  misc_feature 1..23261: note = Synthetic
  source 1..23261: mol_type = other DNA
  variation 14523..14622: note = note, n is a, c, g, or t
ttattttgttaaacgaatagggcgtaagcaaatgatcgcaagcgatattgtcgatgcatttgaaagaatcgcttgcaagttaaacatagagcgtgatcagaataaaatacgacgagcaagagaaatggctgatagcatgcgttattttactttagaccctgtctctagtcgtttttttaatgttataggtaacccttgggaaatagcagatgtcacaattattgatatcggtttatttgcacgagaaggttatgaagcgcatcgtgcgattgctttttcaagttgcatgaataatattctgtcacttgctgaaaacaatcaggcgggtaaccatgctataaaagtagtttgtgatgaaaatcatatttttacgagcattccattactggctgatattcaaactcgtattgctaaaatgggaagaaaattaggtctttggctttggcttgctactcaaaacatgaaagattttgctgatggtgcacagcgtatgctgtcacaaattgaaacttggctttgtttagcattacctcctgatgaaattcaacaaattgaacgttttaaaacactttctcttgaagagcggctattatttttatcagcacaaaaagaaaaaggtaaatatacagaaggtgtgttacttagtcctaaaataaaaggtttatttcgtaatattccaccgcgtttgtatcttgctatggctgcaaccgatcaagatgaaaaataccttcgtgcccaaattatgaaaacacaccagtgttcagagatagaagcagtaaaaataattgcagaacaaatgatgaataaagaaaatgataccgaaaaaaataattaaaaaaatattatgcagttttattgtttttatttctattaactgctacgcatcaattaattctttcgttattgcacaagatactttagctgctacattaaaaagtgatagctgcttgcattataagccttcgatacaaacttgtctgtggatgtctccaagagtggggcgaaatgtaacgccaatgcttgatcattacttgccagatttggtagtaattgtgtatcgtaatgctggtgacaatccttgggatgaagcgcgtatttttttagactcgccgagtgcgaatgttcagactcgttttattaatgatgtaggaagtggtgatcattcatttgtaaatgagcatgaaaaaaatgttatttttaaagaggctgatgtcattggcaatcctgctcttattatatttaatgagcatgccacgcaacttttattaaaaagcactgcaaaaccactaagcccttattatcaatctatgttggacagtgcgttatggcgtggctttatgccccaatctttactagaagaaacagctgatgtggcattagatatttctcatcacataggcacagaaatgaatgactggggtggtctttatccgcatgaagggacagttatgggaatcgatgatcttaaagcttcaatggtagttgctgagcgtgcaacggatttattaactaatccacaggcttttagtcatatccatcaatctttatccaattcatgcggtaagcactgtcaagcatcgcccataacagaaaatagtaatgacaccttatttcaaatgatttatcccagtttgcaaactgaatgcgtccctttggggagtgacaattcttataaagattcaatgctaaatgaacaaggtgcttacatgtgggtggtctggcgtcattatcaaggctgtcctgatggtgatggacaatttttaggggttatttaatgaaaaaaataattgcaatagcacttttaacaataaatattaatgcattggcttcgaatattattccctcaggaaatgataataatttactttattataaaattggaggtgataaagattttgctctgcctccggtatcaagcatggatacagttcacttaaatactaatacccatttaggcttaggttatagttgtagtgtctttaacccagcgctttcaattaccaattccttaaatgatataaaagacagtattgataatttaactaaagatattattgtaaatgcgacagcaagtttgatcatgatgcctatgtatgaattagccaaaagtaatccaactctatattcattgctaaacaatcaattattatcggcaaatcaacaattagcaatttcgactaaatcatgtgaaacagtcagagaacaaatttctcgaggagaaaatccatatcatgattggggaacaattgctattaatgatcaatggaaagagaaattatcaatggctgcaagcagtgatgcagatatcaatcaggcaaaaaaagagattgatgcacatagtggtgatgatggtgtaacgtgggtgacgggtaatcaaaatagtgatggtagtttacatgctggagggaaaaaccaaccatctataaatgtaatcgcagatacaataactgtaggatataatgcaatcctgaatcgcgatcttttaagtcatgcgcctgctgacactgatactgaattagcacattattttccaactccgcaatctgctattgattggatgacagcagttttaggtgatcaaacaattacaacatgtaatgatgataattgtaaaaataaacaaggaaatgtcgtcggtcatggtttgtttccatgtattagttcatgtcaacaagataaagaaaactgttcggatacgattcgagataatctaaaaaaattaatcacaggcgatgaggctatatccaaagataatctcgaaaatgtttcagcagatggcattgcaatgacactggataccattctttctcttcgtaatatagatgcaactgaacaaaatattttagtaaacaaattagcgcaagaaatatcaatacaacgtgtcattgataaagcattagcggctagaaatatcttagcaaccggagcgcaagtacctattattgcagcgaatgcgccagcgcaaacgatgataagccatgctattagtaatttagacaatgatattcgttctcttgcatttgaaagccaaatacgtagacaaatgatgtcagatactttatcgcaaatattaaattattcgaatcaacaacaaaatcgtgcagtcaatacaaatgttgcgagtaattctcctcttatggaaaacggtgccaaaaaggaaaatgatacatgatgataggcgttcaatcctatcctgaattgtatactattcttttgggatggcagctttatggagaattatgggatttattaacgcaaactggcattgcatatttgccgtttataggagtgatattaaaaaatgtgtcgcagtcttatgttatggaaggacatcatggaaataatttttctttacgcagcatggaaattcattttttaagtatattgttgcttattttttttggagcagcgccttttatcccgcttaatgctcacactgtgtcttatacgccactttgcgaaagtaatacttattatccaggttcaacaggaacgacatatgataatgctttcactattccaacaggcgatattaacgtgcctctttggtggtatgcagtcatgtctgtttctgaagggatcacaagtgctgctaataatttaattggttgtgttcctgacctacgtaaaatggtaactgaagtcaatatgacgcaaatttcagatcctgagcttaaacaagaattacaggactttgagacaatgtgttacaccgtagcgcgagcacaatttttgaaagatgaacaagataatcaaactaatcatcttgatcttattcaagagaatgttaataaatatggggttgaggatacagagtggttaggttcgcacgcattcagtgaagtatattatcacgatttaaaatcaagccgacctgtcacgggtttttcttatgatccatcggacgatttgaattccgatataaaagatattaatcagccagattatggtacaccttcttgttacgattggtggactgatactcaattgggcttagaaaatagattatatcaggagttacccaagtcattttatgatgaatataaagattatctcaatagcgaccaaacacgcgatgatatggttaaaaatattatttcgaagcctcagcataattacagtggctataataatgcgagtgatatgataggtaatgtaggttattcacatcttgctgcatccgttggtatttggtatcaccaattagaagaatatccaaaaatttatgcagctgcagaagcagcgccgattatacaagcgattttattattaatggtatatgtttttttaccatttggcttggtattcagtggtttcagagcaagtgcttttgtaacaggagcggcattaattttttccctcattttttggacatttatttggcatcttgtcagttggacggataaatctttaatggaagcactctactcaaattggtttgcaaaacaaggggcgggtgccactttaactgacatgattattggtgcattaataatagctgctcccttattttggtttttatttatgggggcagtgggtgttgctgttgggcatatggtcggaggtatagcatctagcctttatagagtaggtgataaagcagcaacggatggtgctaaattgactcaaaattttatgagtaacttatgactcacttaacgcttttttttatagtacgattaagtattttgagttttgtaattttctatgttttaagagaacggcgatggcaagaacgacttcgtattactgtatggttattgatatttgaattattaatttgtgaaaatatcattttaaaattaattcactccatatgaattttaaaaaacctttggaagcattgttacgtccgcctatagaatacttaactgtcatttcaatgtggtttatggcactcttatgggttcgattttgcacattatttttattatctaaagttgaggctctaattttttcatgtgggctagtcgggttgagtttctatcgttttaaacaaggttatcgcgtataccgttatcaaaaaaatttaaaaaaaatgcctgtataccaaatgactttagagcaattgccagtgagcaataaaaaattatttttagggagaggatttttatggacggctcaacatactcaacgattacgggatcttgatttagagtataacttgcactataagcaaacgctatctttaaccgcagtaggaggagaagcttgtattcatggtattgcagatcaagaaaacgatatttcaattcatttaagcgaacgagctagtcatttattagtgttgggattgccgggtgtcggtaaaactcgttttgctgaattggttattagtcaagacataaggcgtggtgatgtggttatagtaattgatcctaagggagatgctgatttattacgtcgaatgtattgtgaagcaagaattgcagggcgagaaaaagattttttagtttttcatttaggttttccagaagtctcttgtcgctataatcctattggaaattttaccagagttacagaagtggctaatagaatttcaaatcaattaccaggttcaggggagtcagctgcttttaaagagtttggttggcagtttattaattcaattgcaatggctttagttgagatgggtgagagacctgattatcaaaagataaaattttatattacgaaaatggatttattattagagcgttatttagaattttggttgccaggagtggatatgaatgttaatcaatggattaatagttatattaaattaaaatcaaccaataaaaaagaaatatcaaggtttaaagcgttaattgcgtatgtcgaagaacacgctttaattaaaaatcctgtatttgatgatttatattatgcttgtcgttatgatcaacaatatttcagtaaaatcacagcatcattaggtcctttacttaaaaaattaaccactggtaaatcagcagaactgctttctcccgattatgcagataaaaacgatttaagaccgatattggattggctagaagtcatccggcatagaaagattgtttatgtaggtttagatgctttatctgatccggtggttgctagtgctgtgggaaattcaatgttctctgatttggtttctgtggcgggacgactttataaatttggtttatatgagggttttgatgaacctttaccacgcatatgcctacattcggatgagtttaatgaaattattggggatgaatttattcctcttttaaataaggcgcgtggagcaggattcactgtaaccgcttatacgcaaacttggtctgatgtggaagctaggttgaaatcatccgctaaagcaggacaagtggctggaaatatcggtacaactgtgatgtttagatgtaaggaagctgccactgttgacatgctattaaatcaattacctacggtaccgattttgcgagtgcttcctgcgtctgcatcacaagacactccttttggcactgatggaatttattaccagtcttcaaatgaagaccgatttactcatagtgatcaacgattaattgaacaaaatgatgtgatgaacctgccaaaaggccaagcgttttgcttgctcgagggaggtaaactttacaaattacgtatgccactacctctttcgcaagaaatgaatattccaaaagatattgcggtgcttattgccagaatgagagatttaaaacaaccacaaagtgaggtaactcatgctaatgaaaaagacaagtaacataactcatctacagatggattcaaaaattttattacacacaagattggcacaatcaatgtttaattattcttggcagcatggaaaaatgggtttattacaatttgcaaaatcaacttcgaatttatggaaagcagctcatcaagatgatccttatgctgattggattctattaaagacttatcaagctttaattgatgtgagggaacaattacaggaattagaaaagcagttctcagaacagctaagtacgatacgaggaattgaaacaaccccggccttaaatgcaatgccgatgagttatcctttacagttctcaaactatttgggatacatgggcgcgacgttattagcagatgcagattatgtgcttcgtcaaattttaacattgaagcgcttagggaaaaagcaagatgatatcaactcaattaatcaagtcgtcaaatatttgcaggatgttttctcaattcctcgtcaatggcgtcatactggtgtgactcgcatcgatattaaggaaaatacacaaaaagcccaagaagccattattttattaggcgaaattcctgattctattatgcaacaaaaaatcgattttaattttctatcaaagtaactatgttgataactcacattccattacattgcgtgaatgaagcagcaattagatatcatgttccagctaaactaatcattgctgttttagaaacagagcaaggtaaagttggtggtatcactattaataaaaatggaacttatgatatagggccaatggccattaattctttatggctatcagagcttaaaaaacatgggatttctgagcatgatattcaatttgatccgtgtattaaccttaaagtaggtgcttggattttaagtaagaaaattgcaaatcagaataatgtcttagttggaattggcgactataattcgcataatgcccagttaaatgccatttattataacaaagtgaaaataaattttttcaaaataattatttttttaaatagccgagaaacttatgacaattaagaagcgatctattaatatagcttttataaatatgttaatgttgatgttaaaaactattccaacgaataaaaaaaatacgataaaatttaataattcagttaatgatattatttttagttcttaaagataaaaaaacagatgattttttgagggaatgtttttataatgcttgcgataaataaattataaggaatatagcatgcgtaaatatattatatgtatttttttaacaagtattttgtgccaacaaatttctaatgcagaagaagtttctcagaatactgaccagcggatggcgcaaacctatcaaaaaggtttagaggcagcaaaaaaagctgaacaagatcaaacgttatacgaaaaaaatcaaggcaaccctaaaatggccgaagcttctcaagaaggacttcaagcagcacaagaaaaagcaatagattaataacagaattagtcgctattctgcacgactcaaaatagcagaataaaatcagcatgcgtgttgaaactctgatcgcaattttaaattgtatacgctaatagtttgccgcactatttttttactcacccacggggagaatactttccccaacgggcacgtattttcttcgttttaaattatttaaaggagaaaataacgatgtcatcattaaatcaagttatgttaattggaaacttaggaaaagacccagaaattttacaaatgtcagaatttggcagttttgtaaggttgactcttgctactaacaggaagtttaaaactaaaatgggtgaggtaaaagaggatacgcaatggcataccgtgtatctaaataacatcataggtagagtgtcagcatctattttaaaaaaaggcgcaaaaatttatgtttctggtgaattgcgtactcgtgattggacatcaaaaagcggacaagtacaccgattaagtgcaatttatgcaagggaaataaaattcttatgtgtaaagccacgagatgttgaagctgtgcttgagtcagtggatgaaaacagcgcttatgaaaaagccaagcgggaaattgatcgagttttacgtcgtgcagaagaaaatattctttaattattttttacagaaagatttataagaaggagaaaatgatatgtctaaaattaaatcaattgtttgtcggagatatattcacagtaagaaaggaggtatactataatgcatggtcaaacaaaagatttattccagctacaaaccgaacttgttgatatgaaggtggatatggcagttagtaaagcgattgatcgaattgttgatcagattacaagcttaaagaatgatatgcattctcaaattcatgatctgagaaatgatatgaatagccaattttctgctttggataagcgagtctttgcgcttgagcatcgatttatagctgttgaaaacaaattaggcattacaaatgaaactaggcgtcaaattaaaaatagatttattgactatagtttcaaagcgggatgggtaatgttaggtataattagttctgctttagcttacattggatatcttgttattcagcttcatgctttaatccgatagtcttatattttttaccccgtggggaaatcccacggtgggtttctccatttttattttcaggagaaatcaatgaaattattaacacaagaaattaagcttgctttacccaaaatttatagtactgatgcagtgtcattgaaggataaagttgtcatctgtaaattttttaccccatggtctttttggacgtggtttgtctttgagggagaagctgaaaaatcttttgaagatagtaaagaggatgactatattttttttggcatggtacatggatttgagaaagaaatgggttatttcagattagctgaactggaatccattcgggggccaggtaatctactcatagaaagagacctgagtatttttaaagctacgtatatgaattgttgttagtttgtatgagttagtatgctgcgttttatttcttagaatgcggatttattccaataagttaaatttttcttaatttttgtttaagagaataacccgttttgcaacgggttattcgggttcgatatttcttttaaaaaagaaacacttattgtagtaacggctctcaccccggaacgctacaacggtcgcagtataccataaaataatatatagacaatattaaatatataggacaaaataagggcttttttataagagcataaaaaagtatgagtcattgtgatcaaatattaagtgattacaccttgggtttggatattggtattgcatctgttggagcggcactattaggaaaagataggattattgctttacatgttagaacatttaataaagcggaagatgctgagaatggggagtcgcttaataaaatacgtcgagaagctagacttttgaggcgtcgtttgcatcgccgtgcttgtcgaatgaaagacttatcaagtttgatgaaaactgtgggattaattgataaaccatttgtaaatttgcaagctgaaggagctctagcaaatattcaagcttggcaaatgcgcagcgaaggacttgatcggttattatcacctcttgaatgggcagttgtgctgtaccatatcgtaaaacatcgtggttttcagtctaatcgtaaaagtgaattaaaagcagatgctaaagtcgggaaaatgctcgaagggattaataaaaattatgatttaatgaaagaaaaaaattatagaactgttggagaacttgcttttaaagatgatcgcttctccaaaagaaaacgtaataaacacggagattatagtcatacatttaaacgtaaagaattgctagatgaattaattctattatttgaacgacaacgttattttcataactttcatgctcatgctgtttttgagcaagaagtgattaatctattgatgaagcgcaaagcagctttatcgggcaatgccttattaagtatggtgggtaattgcacattagaacctaatgaaaaacgttgcccaaaaactagtatttatgcagagcgttttgtatggttaagcaagttaaataatttaagtattaatcacgacggtttgcaacgaaaattaaccagtatcgagcatggattattacgcgaattaccattttcaactacttccaaaatcacatataaaactttaagaaaaaaattagatttgttacctaacgaacattttaatggtattcgctcgatagatgatgaaactaaagttttttttgaagcgaagggatttcatgctttgcgtaaatgctatgagcaatccaacttgacggatatatggttaaatgacgttaataatactgagcgattacatcaccttgcttatgcaattacatgttataaagaagatacagaaattaaggaatggcttcttaagcaaggcatagaagagagtgttgcagaggcagtattagatgtttcctttgagcaatttatccgtttatcggcagttgcaattaaaaatttattaccgcacatggaaaaagggttaagatatgatgaagcggtagctgcaacgcctcaatatggtcatcacagtcagctattaaaaaacgttaaacaaaaatatttaccattgtttgatcctgaagaaatacgtaatcctgttgtatatcgtgcgctaaatcaggcgaggaaacttgtaaatgcgattataaaaaaatatggttcgccagcatctgtacatattgaattagcgcgtgatttatcaaaatcttttaaggaacgtaaaagaattgaaggtgagcaaaaagagtttcaagcaaaaaagaaaaaattggaagaggattttgtagaattttttggtaaagaccaattaagaggggagaatttactaagattcagattctataaagaacagggtagtaaatgtgcttatagtttaaatgaaattgatcttaatagactatgtgaagatggctatgttgaaatagatcatatcatcccatattcgcgtagttttgataacagtaccaacaataaagtgttagtattaacaagagaaaatcgtaataaggctaatagaaccccatatgaatatttagatggcgtagatcatgagcgttggcaaaaattttatgattgggtgaaagcaagccgttttactttagccaaacaaaaacgattgttaatgcgagatctcgatgaaaaaacatccgatgaatttagggctcgtaacttgtcagatacacgatatatctgtcggatttttaaaaatcatattgaatcttttctgcaattatcatcgaatgcgcaaggttctcgttgtgttgttctaagtgggcaattaacagcttatttgcgagcacgttggggactatccaaacaacgtgagaatggagatttacaccatgcattggatgctgcggttgttgctgcagccagtcatggaatggtaaagcgtttatcggattactcacgacgtggccagttaagtaaattaagtccatcgagcttaggccagtatattgatcctgaaacaggtgaaattttggatgagaagctgtttaaagaattacaaatcaagcaggaatttccacaaccctggattggatttcgggatgagttattggcccgattatcaacaaacccacaagaaaagctaaaagagcaccctgcgtattcgtcagaaatattgacaacccttcaaccaattcgcgtttcacgtatgcccacgcgacgtaaattaggctctgctcataaggagacagtgcgatctattggaaagcaaagtactttgttgaaacaagaattatcagcggtaaaagtacccctaattaatttaaagttaaaagatttggaaaatattgttggatataaagaccctcgtaatcaaagcttaatattggcactcaaagagcgtttagagcaatatggtggtgatggtaaaaaagctttttcagataagccattttataaaccaggcagtgatccttctatagcgccgtgtgtgcgtgccatcaaactattaagtaaacagaaaaatggtttattagtgcgtgggggtattgcagataattcagatatgatgcgagtggatatttttaaaaagaatggaaaattttatgctgtgccattatatgtgtcagatagttcttctatagcacttcctaatcgcgcagctactaataaaaaacttaaagaacaatgggaaattatggatgattcttatcaattcctatttagtttatataaaaatgattgggttaaagtaaatgataaaaaatctatacgtgaaggatattttgtgagtttagatattgcgacagcagcaattacactgcgagttcatgatagagatattcggattggtaaaaacggtgaaattcgtagcattgggattaaaaccgctaaggcagttgaaaaatatcatgttgatctactaggtaatctttatcaagtaaaaaatgagcaaagaaaaccactcatatcaaaaaaacttactccacttgtgaagagataaaattttatgagttggcgtagtatttttattagcaatcccgcatatcttaatctcaaacaaggttctttgcaaatagcccaagctattgaaactcaatctgtaatagcaaaaatccccttggaagatatttcggttatattaattgaaaatacaggtgttactttaagtgccaagttattatcagcatgtgctgataaacaaattctagttattactgtgggtgaagattatcatcccaatggtatatttttgccgtatttaccgcatagtcgtgctttaaaaatcatgcgagcacagataaaacagtctcttgtaaaaaagaagcaattatggaaaacaattattactcaaaaaattgttaaccaagcggcagtccttacgtcatttggacacaataccgtagcacaacgattaaaaatattagctaccgctgtgcggtctggagatgcaaaaaattctgaagctgtagccagtcaactttatttccgtactctgtgggggcgtgatttttctcgatcaaatactatttcaatagtgaatgctgcattgaattatggttatgcagttattcgtgcagctattgcaagagcgctatgtacttatggttttctgcctgcatttggtatttttcatcataatgagctgaacgcttttaatttagctgatgatttaattgaaccttaccgaccattcgtagatttacatgtcgttgatcaatacacaaaagttagagagaatgaggcgcaattaacaacgcaaaataaagcggctttagttaacttattacatcaagatattcgtttaactcagcatgaaggcaatggtgcgtgtactttactagcgggtatcgaagctactgtgattagtttatcgcaatgggtgttatcctcaaaagttaaaaatgttaggttagtgatgccttgtgtcacgcaagtggttacctacaaacaaactgtccatgagtaaagagaccagacgatttatgcgattactggtattttttgatttacctactaagactaagaacaataaaaaagcgtatattttttttcgacgttttttaattaacgatggctatgatatgcttcaatggtcagtttatagtcgtattgtcaatggcatggatagtgctgaaaaacatcttaagcgtttgatgagcaatgcaccgagagaaggttcggtgcgttatttgcaaatcaccgaaaaacagtttgctagtatgaggttgctagtgggtacccgtaaatttaatgagaaaaagnnnnnnnnnnnnnnnnnnnnnnnnnnnnnnnnnnnnnnnnnnnnnnnnnnnnnnnnnnnnnnnnnnnnnnnnnnnnnnnnnnnnnnnnnnnnnnnnnnnncgagagaaggttcggtgcgttatttgcaaatcaccgaaaaacagtttgctagtatgaggttgctagtgggtacccgtaaatttaatgagaaaaaggtaaatgctagtcaattgctcttgttttaagatgaaaaaacagcgccaaattaagataaaatatattaaaatcattaacttgtcgctagttgattataacgttccggggtgagagagggaactacaacaaggtgttgagtcactagagcaattagaattattataacgttccggggtgagagagggaactacaacagttacagcatcataccattgtgtttctttattataacgttccggggtgagagagggaactacaacaatgcaccgtcttttaatccagtcctatgcattataacgttccggggtgagagagggaactacaactgagtcataggtagaatagatggcgccaagattataacgttccggggtgagagagggaactacaactgcggggaatgttttattgccagttgttagattataacgttccggggtgagagagggaactacaacagacttattacaattagcttcttctactccattataacgttccggggtgagagagggagctacaacccatcctgatctttacgctataattgttttattataacgttccggggtgagagagggaaccgttactcaatcttaatttatatggtatattttttatgctgcaccacatttttaatttatctcaagtaagcaaaaaaataaataataattgacactcgtcacgtaatacgttacatttagctatgattataaattttaagcataagggtttagagcagtttttcttaaaaggaaaatctgccaaaattaaccctaaacatatgacaaagttaaggctgataattgctaaacttaatactagcgttgatatacaagacatggactttccaggctcaaatttacaccccttaaaaggagataaaaaagactactggtctgtcaaagttaatggaaactggcgagtgatatttcgttttaaaaatgagaatgcttacgatgttgattatattgactatcattaaaataaatgtttaacaaaggataaaatatgcatatgtataatccaccacatcctggtgaaatattaaaagagttatatcttgaaccacttgaattaactatttctgatgtagctaaaggaataggggtgtctcgtaaatctctttctgagcttgtgaacgggaagtttggcgttagccctggcatggctattcgacttggtaaagctttttcaactacacctgagagttggcttaatttacaacagcaatatgatctctataaagaagaaaaaaagcgtaagcacgtgaaaattaaagtttttgttcgccatcaagctcaatcatctatttgattttttacaatgttattatttatacagctatccattgctatcataatgctcattatcgaaaataattttttaaacaaaaatatcaaataaaatcaaataattaaaaacttttatatattacataatattctcttaatattatattgttataatttcctgaaactaataagggggaaatttcctatgcaatcatctttccaatatgtaagtaaagacagtcaagattacaaaaagaaaaaagaaaatttaagaatcgatagggattcatcattttatattgatgaatcaaccattagtttgaaaaatgatgatgattatggaagcggagcatgcgggattgttagtcttttcaaaaccataaaagacgtagaaactgctgtaaaaaagatctccgagagtggaagaattctttctcctgaggaaatagcagatattgagcatgaagcggaattaaataaattgtaccttggaataggaaaagttgataaaaatgatcaagcaaatatttatctattaatgaagaaactaccgccaagtttaaataaaacaatcttcgtaagagataacaaacctaagtttgcaaattttaaagaatttttaaaattttatatttctatattaaaagaagcgcagaaattacatgtcaaacacggaattgtacatggggatataaaagacgcaaatttatgcatggataaaaacggaaaaatatttttttgcgatttcggactcgctagaaaattaaaaaataacttaaactcaaaaacggatttgacatcaggaaagtgggcaaaggaatcatggcatttaccaccagaattagcagctaaaattcctgcggatccaagccaagatgtttattccttaggacaacttctgaaattttctcaagattggcttctttattggaaacattttggttcagggtttgatggggacatacttgcagaagatagattagaaagtctttattctcagatgattgatgtcaatcctaaaaaaagaccatcattaaaagaagcaataaaattttgtgttgataaatataataatttagtggctcccagcgaaaaattatcttgcgatgatatagaagagaaatcaaatgtgccaatgtcggtgttaacaaaagcaactttaaataatgccatggatcaatacaaaaatttcaaaaacaatttactaaatattgatattggccactcaagatatagtttttttaaattaaatgtacgttggttgtttactagcaacattacgttaaatactgctcaacaattaaaagaagcatcaaacgatcaaatacgataccaaattgctgaaaaatatattagagataatccaaataaagcatttgctaaagaattaaaaaaatctattaataatattaaataaaaaaagtgttttcgtttacatttattaaatagattacatattatacaataggcactttaacaaaaagaataataaataaattcacgcttattaagtgatcgataatgaacattatagtgcgctgcggattacgagggacaagtattagcagcaggaagctaaactttaagctttatagaagatgaaggcagacccttcgaaatcggctttcaggagcaggtttcaaaccacctcaagcagctgttgttaagagtaatggttgtgagcgttgaggaaaagtcgaaccctatgattcggcaggtaaggactagaaagacgagagaaggttcggtgcgttatttgcaaatcaccgaaaaacagtttgctagtatgaggttgctagtgggtacccgtaaatttaatgagaaaaaggtaaatgctagtcaattgctcttgttttaagatgaaaaaacagcgccaaattaagataaaatatattaaaatcattaacttgtcgctagttgattataacgttccggggtgagagagggaactacaaccagcattaagtagtattttttcttaggtttattataacgttccggggtgagagagggaactacaactagatgcggacacaaagttcacttatataaattataacgttccggggtgagagagggaactacaacaggagcctcagtcacttctccaaccataacattataacgttccggggtgagagagggaactacaaccgtaccactactcacaattttatatgtagcattataacgttccggggtgagagagggaactacaactcactcatcactacggtgtgcgtgcttttaattataacgttccggggtgtacaaccgactactagtttcttctatgtgtttaatgattataacgttcgggggctgatgagagagggaactacaaccctatagagggcatttgactgttgagaattatacagggttccatatgcatttggaagtaatatcttttcgtattttttcatgtaacgaattgaatttttgaataattttttcatttatataattgtaaaattcttgaggctcatcctctattgaagatatttcttttactacataaatatcttcaatcaatttatgcaattcatctaaatcattagttagttttgggaatgaaatagtacataaagcaaaaaaataataaaatttatctagccattcagctgcgaaaaaatcggcaaaatttttatttcttaaattgattaaagaatcagcgttttctaaaggttcaaacccacgtcctgcatattctctttcgcgatattcttcatagtgttcacaaataaatttttgcgtttttaaaaataaattaatttcatttaataactctgagcttaatttatatatatctataatttgtttttttaactctcttttttttgaagaaacatcagtaaggtagataatgaagatcgagggcgctaatcctaggaaaaagcttaaaaaattaaaattattcaaatttttatttccatattaaaataataatattttaatatgatatcagcattattggaagaatattatcagttatattgcaaagctgctccgcgtcactagaagacatcgcagatgtctgtagtgacgcgggtcatggtagcaaaattttcttattaaaaacaataaattttctaaataaacctcacttttttgtcgtgatgactataaaattaaataaaatttttatctaaaaaaccattgtatttcttcaataaattttgtagcattataaatacagtcgagccttaacgacgcaaaccacaggcaaggtctgcatggcatgatgaaactcagatcgctagcaaaatggttcatgcttatattcgcaacattgaatttttaatcgttcaatttaatttaacctgttttttttatttcactttatgcaagaaattctcaatcttaaacctgagttattttgagcaaaatgatatctattattaacctgtttatatggaggaaattatttttattaaaatttaacaaaccctaatatctcgtctctttgcaatatcaattgcgatcttttgtcgcacggcgctaaagattgagacgcttaacacttatcatttgacaagccgtttaagggttaaaattttataaaaagtaacaatgggtatccgtcatgatttacagcgttcaatttatcaaactttaaaacataaccgtgatggttcttatgctactcagcatgatagaaaaaatattttgtataaatttgctgatgatttgataacccaaggatatggtttacgagatatacgagggcttaaagaaaagcatatccttgcaataattaaattttggcaaaaaaaagagttaaaaacttctactattaaaaatagaacttcagtattacggtatttatgcgtgcaaattaataaaaaaaatattgtgccaagtaataaaaaacttaatttgggcagacgtcgctatgtgccaacgaataatcgtgctctctatgatcctgatttttcgaaaatcagtaatatccatgtgcaagtttcattgcaattgcaaagagtatttggcttgcgtcgcgaggaagccttaaaaataaaaccttggcttgcagataaaggtaaatatctagttttagatgactcctggtgtaaaggaggaagaggcaggtatatccccattttaaccgatgaacaacgtttctggttagagcaagcaaaaaaaatattactttctaaaggtttatcactgatccctataaaaaaatcttatattcagcaacgttctatttatgacaaacaagtactccgtgcaggtcttaaaaatcttcatggtcttcgccatgcctatgctcaaaggcgatataaagaattaactggttgggaagcacctattaatggtgggtctaaggcctctcagcttacatctctacaaaaacaaattgattatgaagcgcgtatgactttaaccgaagagcttggtcatagccgagaacaaataactgtgaattatttggggcgataaatttttatatgatgaagcaagataatatatttaataaatgtaatgtccagacattaaataaatattttcaatgtattcttaaaatagaaaaggattatgatacaagattagatcataattcaaaacttaaggttgaaaaccataaattagctattatgcaagcgacactcgctttgcttcagtcaaatgttaaaagtaaaaaacattctaatattaaaaaagaatctaccacaaaaaagatttttgtctacatagcctcacttattaatcctttgattgtagcaacaggcggcttttcattatgcgatactttgttaactcttattccaggcatgttgcatcctgtttcactggtttgcggaatagttagtgctgtaataggaggcgtgttaagtatggtctatgatgttggaagatttaaaaggatgctcgggatatcaacccttaaaatgcaatctattattcagttatatcaacaacagctgggaatattaaaaaaaattaagctgtctgtgttgtctaatcaacattcagatcgttattgtgctaatgattatatttattttcaaagtacaattaatttatttaaccaagatgtcaaaaaaaaacagacaaaattagtgcaatgttataaacaaacttcagtccaaaagggcgtgaagcgggttatgacagggattaatgtagttttgtctgcaggctcaggatttttaatgagtaatagcttgctcatactttttggcggcgctatgcttgttgcaggtccagtggggtggattataggtagtatgtttgctattttttcagttgctgtatttcattatattcaaaaaagagatatttctagcttaatgaatattataacaggacgaccaaaagaattaatatgtaagcaaacgcagtttttacggaatctaaagcaatatgatagtcaattgcaggctcttattcatgggaaaaagaaagccgaatttgaaacaaaacaattaaaacagaaaattgttgatctacagaatcaagttgttgttcctggctttgcgcatcctaatcaacaagatcagaagtatggccttgcttcacaaagtgttttcaaacgaaatagaagtttatctcaatctctcggtttatcccaagatatgcctaataaattaaaatattaaaattaataattaatacatataattataaatagaataatacaaaaagtattgactaatagtatacagatagtatcattcattttcttattgtttaataagaataaaacactaaataacattaaaataattggaaaataaggaagtatgtatgttaattcttaatcggcgtgtcggccaatctatttcaattggcaatgacattaaagtcattgtcctcaatgatgtaaatggaattcgaataggtatcgaagcacctaagcatataaaaatttttcgtgatgaattattaaagcgattacttaaaaatcagcaggtaagctttgatgaaaacactcgatcttaaagaagctgccgcatttttaaaaatgactcccgaagggttacgaagaaaagtaattagtggcgaagttcctggagctaagccgggaaaatgttggtgttttcgagaagatgatcttgctgattatttgcgatcgctttatgctaatgtcgctaaaaagtcacaaggtgtcatagcaaatgataggagaaaaatatggcactgtacaaaagaaaaaatatttggtgggttgatattaaccacagtggaaaaagaatacaacgaagtactgggactagcagcaaattagatgcacaaaaatttcatgacaagataaaggcggagatgtgggaaaaccaatatcttgacgtcaagcctgaaattgtatggatgcaggcagtccttcgttggcttgctgaatcacaacataagcgtagtttagtggatgataagttacatttaaaatggctcgatccgcatttaaaatgttataccttgcgtcaaataacccgtgatgttgttgatcaaatagcagaaaaaaaatcaagggaaggagtcaaaaatgctagtgttaatcgcatgctagaaatagtgagggcgattttacggaaggcagaaagggagtggggttggattgaaaaagcgcctctaatacgtatgcgtaaagaagataccaaaaggataaggtggttgactattgatgaggcagctcgtcttatccaggagcttcctccgcacatttcagctcttgctagattttcattagctacagggcttagaaaatcgaatgttacagatttacaatggtgcgatgttgatttagtaaagaggcatgctttaatccatcctgatcaggcaaaaactaaaaaggcaattcctgttcccttaaatgatgttgcaatagaagtattgcaagagcagaaaggaaagcattcgcaatttgtttttgtctacgggaataaccctatagctgagtgtaatactaaagcttggaaaaaagcactgaagagagcgcatatcgaaaactttcgttggcatgatttgcgccatacatgggcgagttggcacgtgcagaatggaacctctttacaagagcttcagcaattgggtggatggacaagttttgaaatggttctacgttatgcgcatttgagtagtgatcatttaaaagaagcggctgctagagtgaatgtgacgttttccctacactcatcttcagtggcttattaaaacttggattggcttgctataagttattgatttattttacttagttggcgcgcccggagagattcgaactcccgaccacctggttcgaagcca

SEQ ID NO: 2884 - DNA, 23252 bp, synthetic construct
  misc_feature 1..23252: note = Synthetic
  source 1..23252: mol_type = other DNA
cagcgcgatcacggattattggccgcaatggcctcagcctttgccctgcgtggcggttggtcaggccacggcggcggtgctcgaagccgagggcttgcaggtgcatattgccgcgcaagaagacagcgagggtatgcttgcgcttgctgttttacagcaggtagctggtcagcgctggctcgtctgtcggggtgaggatggccgcgaattattgccaactacgctgcgtgcgcgcggcgcaaccgtcgacaccttggcgctttatcggcgatttttgccagatgctgcgcgcggcgcatgggccagctgctatcctcgacccgatgcggtgatattaagcagcgccatgatgtggcaaaactggcagcagattgccggcactgaggccacgcagccttggttgatcacggtcagtgagcgtttggctgatcgcgtgcgtgacgctggtgctgagcgtgtgctctgcgcgggtggtgcgcagccggcgcattggctcgccgcagtgcaagcattggctggcgagtaagcaaagacatcctgtcattgagcataataaggacaatctcatggcgacatcttctagccgtcaacccttggtgacctcggtcgccattaaacggccattaagtatgggttttaagctggtgctgctgtttctgacgctgctcacgattgcggccggcatcatggcgtggcatagcgagcaggagcacaagcgcgcgcgcagtagcttgcgtgcagtcgatgcgtcattggcgcgggtcagtggcgaattagagtcgatgggtttgcgggaatcgctgcgtgacgcgcagcttaagcaacagcaagatattattcagacgttattgctcgatggtccggcgctgcgccaacgctggctcaccgatcgcattgatgccgccgtgacagttgccgagcgcgccttgcaactgcgccatgacgccgtggccgcacgccgtgctttgctcagtgtcgatgccctgcttaatgagcagcgctttgagtcattcgacgcactgcatcgcgccctaaaacaagacatcaagacgctcgcggcacttgagccgatcgataccagcgcgctgtacttgcggttatcggcagtacagcaagacattgccgcgttgaaggtcagcactgtgcgcgcgccgacgcctaagccggcgccgacatcgccccaagaaaactccgccatggctgatttatggcaacaaggcgtggcgaaattccgccagctcattgttgtgcgtcaccacgacgagccattggcgccagtgctcgatgatgcacgcctggatgtattgcgcagccaaattgatagccaggttttgcaggcgcaagtggcgcttttgcagggtgatgcgacggtttaccgggaagcattagccgccgcgatgcgtcgcgtgcaggcacggctagcggcattgccagtggcccaaactgaagcattactcactgagcttgaggatttgcaggcgcaaattattacccgcgatgagccggcgctgattagtcgcgccgcgttaacggcattgcctagtttgggtggggagcgctagccatgcgattactgacgtggttgtgtgtgctggtcgtcgtgctgactctgtcagtcacggcgatgagtcaagacagtggctatgtattgattagctggggtaatacctcgcttgagatgagcttggtgctggcggtgcttattgccgtggtgtgggtgtggttggtggcgcgcttggtgagtttagaattatggttacggcgcgcgacacctgcgctgagcacgcgcttatcgcgcaaaaaagcagcagatgcacgcgtgccagcccccgataatcgaaaaaactggacacctaaggctcgttaggcttgacgctaggccttcgcgcagctttaatacgcccctcgtgtggcccggtagctcagttggtagagcagcggattgaaaatccgcgtgtccccagttcgattctgggccaggccaccatctattgaaactttaaagcctcgatccgtgatcggggcttttttgtggccgatatgttttcgcgcacagtctgtgcggccttctctggcgtaggttagattcatagctaatgcctatcgaaatccagcaaataatcaatttaacattattagcatccttggttactatgctcgggcaggaattccctgatcccactggccagcgcccagaaagcgagcccactggccgagtacgacctaaggagcttttaaatgacgaatttgatcaacaccaaagtacagcccttcaccgccaccgcctatcacgaaggcaaatttgtgccggtcacggaagccacgctgaccggcaaatggtcggtggtatttttctatcctgccgacttcacctttgtttgccccaccgagctgggtgacttggctgacaactacgccgagttccaaaaaatgggcgtggaaatctatggcgtatcgaccgacacgcatttcacccacaaagcttggcacgacacctcagacaccatcaaaaaagtgcaatatccattgatcggtgacccaacaggtcgtatcagccgcaacttccaagtcatgatcgaagaagatggcatggctaaccgcggcaccttcgtgatcaaccccgaaggcgaaatcaagctctgcgaagtgcacgacaacggtattggccgcgatgccggcgagctgctgcgcaaagtcaaagccgcgcaatacattgccgctcaccccggtgaagtctgccccgccaagtggaaagaaggcgcggcaacattgaagccctcgctagacctcgtcggcaaaatctaagccgcgttgcgtaaaacgcttcggggccacaagccccggagtgaccgtaaacctctgtaaccaggcagacccatcatgttagatgctgaactgaaaacccaattagccgcgtacttacaacgtttagtcagccccattgagctggttgccagcctcgatgagcgtgctgagtcgcaagagcttctggccttgctgcacgacattgccgcgctaaacccgcaaatcgctgtgcgcgaagacggcagtgatgcgcgccggccctcgtttgcggtcaataagccgggcgaggaatcgggcgtgtgtttcgccggtattcccttgggccatgagttcacgtcgttggttctggccttgttgcaggtcagcggctacgcgcccaaagtcagcgatgacgtattggcgcaaatccgcgagttacccgccggcctgcacttcgagacattcatctcgctgagctgccacaactgtcccgacgtggtgcaggcattcaacctgatggccgtggttaatcccggcatctcgcataccatgatcgatggcgcgctgtttcaagacgaagttgagcgcaagcaaatcatgtcggtgcccagcgtgcatctcaatggtgaaagcttcggccaaggccgcatgaccttggaagaaattctcgccaaagtcgacatcaatgccggtgcccgcgatgccgaaaagctcaacgcgaaagcaccttacgacgtgctgattgtgggtggtggccccgccggtgctgccgccgctatttatgccgcccgcaaaggcattcgcacgggtgtagtagccgagcgttttggtggccaggtgctcgataccatgggcattgaaaactttatttcggtgagccaaaccgagggtccgaaactggtcgccgcgttggagcagcatgtcaaagactacgacgtcgatgtcatgaacacccaacgcgccacggccctgagcgccggtaagcaagtgagcatcacgctcgccaatggcgcggtgcttgagtcgaagtcagtgattattgccaccggcgcgcgctggcgtgaaatgaatgtgcccggcgagcaagagtaccgtggccgtggcgtggcctattgcccgcattgcgatggcccgctgtttaagggcaagcaagtcggcgtgattggcggcggcaactccggcgtagaggccgcgattgatctcgccggcatcgttgcgcatgtcacgctcattgagttcgataaagagctgcgtgccgatgccgtgctgcagaaaaagctgcgcagcttaagcaacgtcaccatcatcacctcggcgttgaccaccgaagtgttgggcaatggcgacaaaatgaccggcctgacctataaaaatcgcctcgatgacagcgcccacgaacttgcgctcgatggcgtctttgtgcagatcggtctgctgcccaacaccgattggctgaaaggctcggtggccttgagcccgcgcggcgagattgaggtcgatgctaaaggccaaacctccgtgcccggcgtgtttgcggccggcgacgccaccacctcgccctataagcaaatcatcattgccatgggtgaaggctcgaaggcggcgttatcggcgtttgatcatttgattcgcagctcagtgagcgaggatgaggtcgaggccgcttaaaaactaagtcggtgaacccaaaaaggctcgccccagtggcgggccttttttaatcgtcgcgatactgcgtttccggcgtgcggctcaatgcccacagcgataaacctgccgccagcgccatatagccgcccaccgcgctcaaaccgaaatccgtggccagccatgtcgccgcgtacggtgccaatgacgcaccgaagatgcccgccaaattaaaggtgagcgaggcgccggtatagcgcacgcgcgtgggaaatagctcggctaataacgtgcccagcgggccatagcccaagcccatcacgcttaagcctaaaatcagaaataccaagcaggcgatggggtcgttggcgacaaacagcggctcaaaggccagaccgaagagcatggtcagtgcgcccaccaccatgagggtaacgcggcggccgtagcggtcggcaacaatggccgagagtgggatggtggcggcgaaaaacaccatgctgaacatttgcaacttgaggaaggtttcgcggctataaccgagcgctgtggtgccccaactcagtgtgaagacggtcattaggtagaacaccacaaacaccgtgagcgcaatcactgtgccgtgaaatagcgcgctgccatgctcgcgaaatagcgtgaccatgggcacttcggcgcgctcattgcgagcgagggttttcgtaaaggccggcgtttcggtgatgcgcaagcgcacatagaggccaacaaagaccagcaagctgctggcaatgaaggggatgcgccagccccagctcatgaagtcgtcattgctgagaaaatgcgtgagtgctaggaaggtgccgctcgatagcaaaaagcccaagggcgcgccgagctgcggaaacatgccgaaccaggcgcgtttgcccggtggtgcattttcggtggcgagcaagaccgcgccgccccattcgccgcctaaaccaaggccttggccaaagcgacagagcgcgagcaaggccggggccagcacgccgatttgcgcgtaggttggcaaaaagccgatggccaccgtcgataagcccatggtcaagagcgccgccaccagtgtggctttgcggccaatgcgatcgccataatgaccaaacacggccgagcccagaggccgcgcaaaaaacgccacggcaaacgtcgcgagtgattgcaacgtggcggtggtggggtcggcattggggaaaaatagcgtgggaaataccagcaccgccgccgtggcataaatatagaaatcgaaaaattcgatggtggtgccaatcaggctggcaaacagcacgcggcccttggagttaccggaagtcataagttggctcaatagatgcgctaagatgtcgcgcattaaaacgcattttccctaaggagcgcgaccatggcgattgctgcgcagctaaaagccgatgtattgctggtggtggtcacgctgctggcggcggtgagttggatgttctcgaaagaggccatcgcgctgatgccgccgttgttattcatggcctgccgctttctgattgccggcttgctgctggcggccttggggtggcgcgagctacaacgcctgcatcgggcgcaatggcgtcgtggcgcgcgcgtgggtttggtgtttgccgccggcatgagctgctggatcatgggcctcgagtccggcgtgcatgttggcgaaggcgcgtttctgaccagtcttggcgtggtcttggtgccggtcatggcctggctgattttcgacgaggccacgccacgcagtacctgggtggcgctgcccattgccagtaccggtttggcgcttttgtttttgcagcatgagctcagcgtggcgcagggtcagctctggtttattgttgccgcggtgatttttgcgctgttttttattctcaacacgcgcgcctccaataccgtggcatcgaccgagacatcgaaggcgaaagagaaagtgccgccgttggcgctcaccgccatcgtgctgaccacggtgggcgtggtgaccacggggctatcggcgctgactgagccgtggttgccaacctgggaatcgcgttcgggcgccatgattggttgggtattggcgagtgcggtgattggctcatccatgcgttttttggtgcaaacctatgcgcaaagcttgtcgaaccacagccatggcgtggtgattatggtcattgagccagtatggacggcgctgctggcggcggcgtggcttggcgaaaccatgagcggctggcagttggtgggctgcagtttgatcttgatggcgctgctgattagtcgcgccggcccggtcgggcataggctgtggcgggcagtgatacgccccggcacacccgcttaaggtgtgccgagttgccaaggcttaggctttggcgcgtgacttaaaggtggcgtcgcgggtatcgatttcgatcttttcaccggtctcaataaacgccgccacttgcagctcaaagccgttgttgagcttggcggttttcatgaccttgcccgatgtatcgccgcgtgcagcgggctcggtgtaggcaacttcacgcacgatggtggtgggcagctcaacggaaatcgctttctcgttgtagaacaccacgttgcagacatcatccatgccatcttcgatgaagttgatgacatcgcctaagttgtctttttccacctcgtactggttgtactcttcgtccatgaaaatatacatggggtcggcgaagtaagagtaggtggcttttttctggtccaaaatcacttggtcgaacttgtcgtctgctttgtagaccgactcttggccttggccggtgagcaagttcttcattttcattttgcagacggccgagttgcggcctgatttgttgtattccgatttcaagacaatcatcggttggccgttaatgttaatgacattgccggcgcggaattccatcgctgttttcataaagctaatccgggtgggttttctcgggcacagattctacctgatttgcataaaaacgcatcagttgtgtggcgagatcgggctgctccgtcagcgcatcacgccagtgcagcatgacctcgtgtaatggcttgagcactgccaatagcgcgtgcaggtggtcgggcgtgagcgtgccgcgcacccacgcccattgcgcggtttgccagctgcttagcgcacgcgtttgctgcgcagcttttggccgcgtagcagagtgcgtctgtgcctttgcgtgcgtggtcacacgcgccagccaggccgcgagcttggtttcgtgagcgagctcatcttgcggataaatatgccaaagcagcggcttacccgcccactgcgcgcgcacaaacgagtcttctccgcggatgatattgaggtcgcagctggccagcagcgcatcgaaatcatcgtggctgagcatgggcaaggcctgtaatgtgctggcgccatgccgcacgcgctcacccaccccaagcgacacatgagcattgaccacttgcaaggctttgccgctgcaaataagcagttcgcaggggctggtgtgcagtgccgccagcagcgcttgcacagactcggtttcgtagcaaaaaagtgagatgcgtggcggcgagtcgttgcaaaagccatcgtgcgatggcaaacgctgaatgagctcagcctcgcgcaacagtcccccgctgcgcgcgctaaaaccgggaaaccaaaacgtggtgctggcgccctgcgtttgcggcgagctcaggccatggcaatcgtctatccacgcctcagcgcttaaatagtcgaggttgacccacaccgtttgcgcggtgatttgcgcgcgataagtcgctggtagcgtgcaagcaaacccctcaataaccagcgctgccggactcagcgcaagtgctgcatcgcgctgccacgccatgagcgtgaggccgcccagcggttgcaccgatagcgccggatcgatgctcggctcaagcacggcaaatgcgctgaggtcatcaaccaacagcgtgacctcagcgctaaactcggccgccaactgccgcgccaagcgccagcacacgccaaggtcgccgaaattatcgataacgctgcaaaaaatgtgggtggtgggcatgagggactgattggttgatttggtgtttgcggcactataacgttgattaattattacaaaaggatttgtatgcaatgcacaggaaaagtagtgactttggcctagcgctaaactggctgccgcttagcacgagcttttgtcttgaagtcagcgctgtcttgttcagctcgtatcgattgcttatactcgtttgtaacatacccgccaagcctatgactacctcggtagacatgctcaaatcgtgcgggttttttattgttttaaaaaagtcggcgttgacgtgaggtcattcgctaagcccgctatttctattttggagcaggtagatctgctcaaaagtcgcggtctttatattcgtgacgaagcacgtgcagccgattttttgagcgctgtaagtttctttcgtcttacgccttatatgcgtccgtttcaggtggtgagttacgcagatcatgcctttttaccaggcacccgctttcgtcaaataagccagctttatgagttcgatcgtcggctgcgattgctactcatggacgcgattgaacgcacggaggtggcaatcaggtcggcaatctcaaactatatggggcctgcttatggtccacactggtatttgaatcgttcacattttaaagaccgctatgatcacgagagattaattagcaccattgagaacgcgcaacaaaaagcacttcaagactatcgccgagaagtagcgcgtattgatcgcctaactaatgccgacgcgcttcgcaaggaagcgctaaaaaatcggcgtgctcatgaaagctatgcccgacactatgctttaacttatgactctccagagctgatgcccggttgggccatgttggaagagttgaccatcggtgatttatcacacttatatcgtggcttggccaaagataatgaccgcaaatttattggccagcagcttgctgccccttcgccattgctagactcttggctacatacgcttactgtcgtgcgcaatatttgtgctcaccatgcaagaatctggaatcgtgagctcgctattaagcccgtaagacctaagcaggctggcttttcgtggccagattatcttcgcggtgaaaaccagcacactcgtgttgcgatggtgttggcgattctgcagcacttcatgcggcaggtgagtccgcatactcaatggtgcaagtgccttgcggatttattcaatgagtatatagaaattgatttgcaggcaatgggcattcaagacacttggtatagcgaccctttctggcaaaacgatttaatgaccgctaatgaaatatgaaggacaacgtgccaaatgctcaagggattgaaaagtaaagtaaagcgggtataaataaaaagacccagctgaaaccagctgggtcgggttcggtgtaatgccctaaggcatttaccttattgtagtaacggctctcaccccggaaaactacaagattcgaaattaactggaaatggacttcatgacaactacttcttatacccttgggctcgatattggcatggcctctgttggtgctgccctgcttgactccgacagcatcaaagcacttcatgttcgtacattcgataaagctgagacggctaaagaaggcgactcgcttaatttagtgcgtcgagagtcacggcttacgcgacggcgcattcgtcgccgggcgtttcgattattgcggctaagacgtttattaaagcgcgagggcctgttgagcaccaatgaccccatggccctgatttatacgccagccacgccttgggcgcttcgcgcaaaatcattagatgaaaagctcactgggcaagagttggctgtggtcatctaccacatggtcaagcatcgcggctttatgtcgaaccgaaaaagtgagcttaagtctgatgaaaaagcaggccaaatgctcagtggcgtaaaagccaaccaagctttaatgacagaaaaaaactaccgcacggtaggcgaaatggcagcaaaggatgccgcctacgaggaagcgaagcgtaataaaggcggttcctacacgcatacctttgcgcgcgcggaccttgtgtatgagttggcggaggtatttgctgcgcagcagcggcagggtaatgtcttagccacctcgacattgcacgatcgcgtacatgagctgcttttgcagcgtcggcccacgctttcgggtgcaaacctgctcaaaatggttggcaaatgtacttttgagccagcagagtttagagcacccaaagcgagttactcggctcagcgctttatttggttgagcaagcttaataacctaaagatcgtgaccagtggtaagtctgttgagctcagtgcgacacagcgcgaggcgctccaaaatctgccatttacgcaaaagaagctgaccttcaagcaagtgagaaaggttttagatttgccggaacacacgcgctttaacttactcagctatcgctcagcgaacgggaaaaaccccgaagaaacgacttttttcgagagtggctcatttcaccggttagctaaagcgtatgaacgtattggccgcacgtcagactggcaaaaagatgtgtatcacggcgagagactagatcaaattgcttacgcactgacctgctttaaagatgacaaagaatgcaaagcgtggctgctcgaacatcactttgatgacgcattgatcgacagtttgctcgaggaaagcttcgatgactttattcgtttgtcacaaaaagcattagcgaaaattttaccttatttgcagcaagggcagcgttacgatgaagctgtgctcagtgccggctatcaccacagtcaggtacaagtcaccaatgcacgtacgacgtatttgcccgctcccgaccgcgacaaaattatcaatccggttgtttatcgggcgctaaaccaagcccgcaaattggttaatgccattgtccgagagtacggcccgcctgccgctattcatattgaattagccagagatttaagccgcgggccagtcgagcgccggaaaattgagagcgatcaaaagaaatatgaagccgagcgcgctggtgctcgagatatgtatgccgagcagtttggtcgagagcccaatggcttagatatgctcaagtggcgcttgtaccgagagcaaaatggtcagtgtgcatatagtcaaaagccaattgatacggcgcgccttcaagagcctggctatgtggaagttgaccatgtgttgccttactcgcgcagcttcgatgacagcctaagcaataaagtactggtgttaacggcggagaatcgcaacaaaggcaaccgaaccccgtgggagtacttcggctcaagtgacgacagcccacggtggttggcattttcagcatgggtaaaaagcacggcagcttacagagaacccaaaagactaaaactattgcgcaaacactttggcgaagaagaagccgaggagttccgcgaccgtaatctcaacgacacgcgttatatctgccgcgagtttaagcagatgttggagacacacctgacctggcatgaatcagcggcggggcacgagcgctgcgtggtcgtagctggccgactgacgtctctgctgcgggcgcgatggggcattaccaaagtgcgccaaaatggcgatttgcatcatgcacaagatgccgccgtggtggcggcaaccagccgatcttttgttaagcgcatggccgagcacgccaaacgaaaagagctcgcgatggtcaaagagtcctacatagaccctgatacaggcgaaatcctcgatatagacgcatttaggaagcaacaagcgctcaagctcgacgatcgctttccgcaaccctggccatacttccggcaggaattagaggctcgattagcacccaaccccatccgctactttgaagagaagctgcccgatgtgttgcggccaagtgatctaatgccagttcgtgtatcccgcgcaccgcagcgtcgaaatattggccaggcgcacaaagaaacgattcgctctactggcaaagaggctcgactgctggccgataacaaatccagtatcaataccccactgtcggctttgtcgctaaaagatgtagacaaaattgtcggtgccgaagacccccgaaatgcaggcctcattgacgctgtgcgtgagcgcttaaaagcctacggcggcgatggcaaaaaagcctttgggccagatcagccgccccttttgaaaccctctaagccgggcaaggtggcacctgtcattcgctcggtgaagcttttgtccacccaaaaaagtggcatggcggtgcgtcacggtattgccgataacggcgcaatgatacgcgtagacatatttactaaagccggtaagttttatgccgtgccgctttatgtggccgatgctgtggccgacacgctaccgaatagagccgttgtacagtcaaagcctgaaagtgaatggcctgacatggatgagacttatcagtttttatttagtttgtgttcgggcgactgggtgcgagttattttgaaaaaccagcctgctcgcgaggggtattttggaggcttagatcgcgctacggggaatataaatatctggctacatgatagaaatacaaagcttgcaaaggatggactgttacgaagcaatggcataaagacagccttaaaagttgaaaagtgccatgtcgatcttctcggtcgcttatttcttgccaaaccagaagtcaggcagccgttgcgcaaagcgcgccctggcaagccgctaatctgatcatgagctggcgcagcgtggttatcagcaagcccgctgcgctgagcttagggcatgaagcgctgtgcattgcccagtcgggtcaaaaggctcaagtgccgctggaagatatcgcggtgttggtgctggaaagtcagcaaatcaccttaacgggtcagctcctgtctgcgctagcagatgcgcaaatcgtgttgattacattgggtaaaagctttttacccaatgggtgtttgctaccctttctgccccactccagagcgctcaaagtactacgcgcacaaatggcgctgagcgagcctgcagcgaagcgcctacaccaagaaattattcgtcaaaaactcgctaaccaagccggtcttttggctcgcgtgaaagagcatagtggtagtgagtttctgcatcggctgtcgaaagcggtgcgctcaggcgacccagacaacttagaggctcaaggtgcgcaggcctattttaaagtattgcatggcgcggattttacgcgccagcaaactaactggctcaatgccgcctcaaattatggatatgccgtgtttcgtgctgctattgctcgcgccctggtggcctatggctgcttgcctgcactcggtgtgtttcatcgcagtgagcaaaatagctttaatttagccgatgacgtcattgagccttttcggccttttgttgatcaatgcgtgatcaatatgccaaggccatctgacgacatactcacgaccgcgcaaaagacgcagctcattggtctattgcacagcgatgtggcgctcgtctcaggcccgatgggcgagtgttcaatcttggtggcaatagataaagccgtgatgagcttagtcaaagcatttatgcacggcgatggcgctaagtcactgcccgctctggtgttgccaagactagttgggaaggactgctaacttatgagtaagcaaacgaggcgatttatgcgactactggttttttttgatctcccggtgactacgccggcatttaagcgtgcctatgtggtgtttcgtcggtttttgctgaaagacggatacgatatgatccagtggtcggtgtatggccgcgtggtaaacggcaccgatagtgccgaaaaacacctcaaacgattggcaaataacctgcccaaagaaggctcaattcgttatttgcaactcactgagaagcagtttaccagcatgaagctgcttgtgggcacgcgatctatacaggaaaaaaaggttaatgctgatcaaatgctgttgttttagcgcgcctttttactaagtaaaaacccctgtaacgcaagcgctacaagggtttggattgggggtattgtagttttccggggtgagagagggaactacaacattgcgtgaatgcttgtgaactgcgccaccattgtagttttccggggtgagagagggaactacaacccagaatcgacgcgctagaggctgaaaagctcgccgattgtagttttccggggtgagagagggaactacaacagctttgttttggactgtctcgggcttcatattgtagttttccggggtgagagagggaactacaactcttgaggcgttattgaagattagacggctattgtagttttccggggtgagagagggaactacaacaggtgcgagaggctaagccgctcgtatacgattgtagttttccggggtgagagagggaactacaacgcaagatcgacccccgatacttcttgagtcattgtagttttccggggtgagagagggaactacaacgtggagttgtgtggttgtgtgggatgagtgattgtagttttccggggtgagagagggaactacaaccatcattactctggttattcttcaacacagattgtagttttccggggtgagagagggaactacaacatcaagatcagcaaggcacagatcaaagcgattgtagttttccggggtgagagagggaactacaacgcagcgagtcttcaacgctcgaatcttcgaattgtagttttccggggtgagagagggaactacaactcagcgttggcaggatgttttgcctaatgcattgtagttttccggggtgagagagggaactacaacggaactgcataaggtgctgcatctttccttattgtagttttccggggtgagagagggaactacaacagcagcgcatcacagcagcacaaaccaatgattgtagttttccggggtgagagagggaactacaacagatcgctaaagagtgtgggcgcacgcctgattgtagttttccggggtgagagagggaactacaacattcaccggcctgctcggcattaagtcgcattgtagttttccggggtgagagagggaactacaacatgctgactggctagttggccgttcgccacattgtagttttccggggtgagagagggaactacaacaacagttttcgctcctccatgctcaatgctattgtagttttccggggtgagagagggaactacaacctacccactaatgacttggccgtcgttacaattgtagttttccggggtgagagagggaactacaactaatgccggcgccggaactgtacaagtcacattgtagttttccggggtgagagagggaactacaacggggtggctgcaaacaaacccgatgaccaaattgtagttttccggggtgagagagggaactacaaccagaaaataatcagcctgcgcagcgcccttattgtagttttccggggtgagagagggaactacaacgtcaacggtgggcggcatcatttcatcaatattgtagttttccggggtgagagagggaactacaacggcgatgatcggggttcaatcgagctaattattgtagttttccggggtgagagagggaactacaacgtctcttcgcgcatataaaaagcgatgcggattgtagttttccggggtgagagagggaactacaactgaacggctctactgttcagattcattacgattgtagttttccggggtgagagagggaactacaaccaacgcgaggccattcctgcgcaagccgcgattgtagttttccggggtgagagagggaactacaacgcgccggtgtgtgtggctcgttccagccgtattgtagttttccggggtgagagagggaactacaaccagtcagtgattgatggaggcttaatccccattgtagttttccggggtgagagagggaactacaaccggccactcgttcgtgatcgatttcagcggattgtagttttccggggtgagagagggaactacaacatgccgtgcagggcgattgctttggctaagattgtagttttccggggtgagagagggaactacaacctggactgatgaggacttacagcctatgcgattgtagttttccggggtgagagagggaactacaactagacggtggaagtaggtgtaagggatgcaattgtagttttccggggtgagagagggaactacaacttacggtagaggcagcacgcgagtagatggattgtagttttccggggtgagagagggaactttattagcgccaaacgacgccaatgtcgttatgttcgtgctgctgtcgtacaacataaattacatctgcgagcagtcctttgccatcaaatcaccagctcaggtgcaccgcagctcagcgaatctaaggtgacatcgctgcggccaaggtcgacaccgacgatattactaagaatattcgacagtaagctgccgatgccgtttagtaagccgctgagcaggtcgacaatgggcgataaaattgcgcccaataacggcttaatcacgctgccaaataggccgcccagtagcgcgccgaggaagccgggagcggcatcggtttgcaaggaatcgatgagcctgtcacgcacgcagtcggttcgatagcgtaagggaaacaaattatagcagcccgtgtttacgctattacgccattgcgacagcatattgcccgtaaataaaaacgcggggcgatcccagttgataccatcgttgtttaaacggttttgcaatttattcaaatcgccagcatcgtaggcgccaccggagcctgtaggtgcgagctcaggcaagctcaaataggtatcggcaatttgcgtggcgtcgctttcgctcaatggctcgctagcaaaatcactattgcctaaaagatccagcagctcatcgagtaggtcaccgagcagcgtgccaatcgccagtgtgttggccgatgtggatttggtttcaccgacctctagcgtgacaaactccggcgtggcggcgagtaccggcagctccacttgaccgcgcaaaatattgatgccgagcagccgcacaaaggtctcgtcttgcaaggagctcgcgcagacttctttggttgaccacatcgctgacggcgcgattttaccaaggcaagcgttggcgacagcagagtcgacgcgaatagtcgctgtgcgcgggctagcttggcagttaatttccgtcacagtgcccacggcttgaacggtatcgatggtgatcggcaacttaatgctggtgccgagcaactgcaaaatgccggttaagccattgttggtgttgaggtcaatatttaaccgtacttgcgcgttattggcggtcgtgcccacgccgccaacgccaatcgactgtggctcgaccacgcgcaaaccggctttcaggccggtcaaaatattattgccgcctaaatcaagcttgatgccctgctctttggtggcaatgcccagcgccgtcgtgacaagccctaaggcatcaacgccaacatcgagcgccgacgaggctgatgagctcacggtgtcgaccacggcaaataagcccggggtactattgatgctgggatctgtgcccagctgaatttttaaatcatcaatgccgaggtcggcttcaatggcattgaggagctgaacattggcacctaataagccatcttggccagctacggtgaccacggcatcaagcacatcacctacgctcagtgtgttgaccgccagcagttcgttgaggccggccgccgtgatattggccgcgaccggaatgcctaatgcgttaagcaggccagatggtgtgactttaatatttgctaggccgccgtaggaaccgattaaggtatcgtcgagattgaggcccacgagtttgaccagcgacatcagcggtgccgctggattcgtgttgatgagtttggagccaatacgaaacacggtggtgggcgcgctacttagggcggttgcacgcgcactcatgcgaatgcggtcgcgaaatgcgccaccgacaataagactggccggtacgtcgcgactcacttcagcttctacggcctggtcgtcacttgcgctttcagtaaatacgcggagctgattttcaaccgtaatatagccgcagcgcgccgtgatgcgctggctttctgagctgacaaactggttgcgagcagcagattcgacagcaatgtcttgcgcagtatcgagtgcgcagccgccgcgtgaggcaatctcaagggcggcaatgtcggcaatgcgctgtaggttgcgtttttccacatacaagcggccggtgtcgacgactagcgccaaactcaagacagccagcatcatgaacaacaccgtaaaaatcagtgtcgccccgcgctgtcttgggtgctgccagtgcttgtccatgtctgtgactcgtcatgctctcatgatgagtctaattttaggcgagcatgcgtataaaaaacgctcaggtagcatttatcctacaaatacaaggatttgtaatatttgtgttgcacctgtagctattgcgtaagtgcgtcacacaagagcatttgagcgactttatcttcgagtgtgatgggttgtgctaagcccatgcgctcgagcagcggcgctaaacttggttcaatatgtgcgggtttaaagcgcagtagtgccagcaataagcgccatttaggcgtgacgtcggcgcgctttttcatggccttcagcgccgcgccgaggcgcagctcatcgggcgttaggtcgctgccgagcgggaagctcggcaaggcatgcgcgctgagtttggccgtgagtgtggcggggaagttctggcgatacgcctcagcaatagcatagtcggcggcgattttaccgctggctttggcctcggcgagcaggccatcttggaagcgcgagtcactgatattgagcagcgctttgatgacgtcggcgtcggattttgagcgcaaatcggcaatgccgtattcggtgatgacgacgtcgcgcagatgccgcgggatggtgatgtggccgtaattcatgacgatattgctggtcggcgtatcgccttcgcgcacggcgcggaccattagcacgctacggccggtgggcagctgatgcgccatggcgacaaagttgtattggccgccgacgccgctgatcacgcggccatcggcgagaccatcggagaccagtgcgccggagagcgtggccatgatgccggtgttcataaagcgcgcgtggatgcgctgggctttatacaagcgcgggttgaggtcgagctggttgaccttattgacgccagtcatgcaaatgcgcgcgttttcggcagggctcatggcgcggatggcctcgtacatgctgcgcgggccgagaaagaagccgccgtgcagcaccacgccatttttcagcgccgaacctaggcattgcgcagccatcaccgcacgcgcggatggctcggcgacattggcgatcacgcgggtgccatcgggcgcaatgatatagccgttgtcgtagcgagtggcctcattaaaaaagccatgatgctgcaagcgctggaagtcttgcgtgcgaatcacccgcacgccgagcgactccagtgcctctaaggcctcaggctcgatggcttttgggtcgagccgttggtcattgatgagcacttgcagcgcccaaaaatcatagacctcgcgcgttaaaatgccggcatccatgaggtgcaaaaagccatcgacaaacatttcggtggcggcgtataagccctcgacaaagggcgcaacgccgccgacctgctcgatcaattcgccatgctgagtggtggcgcccaagtcgttgagcgcctcacggtagcgggcgttgtgctgatggcgtaattgcgtggcgtagacaatggcgtcgccgagtgcgccgatgccgatttgcagcgtgccaccatctttaatgaggctgctggcgtacaacccgatgcaatagtcgggcgtagtcactggctgtttgggcgtcgaaaatagcgcgctgtaatacgccgcgtcgtcgacgatgatgtcgaaggtggatgccggaacgatggcatcgttgaccataaacggcagctcggtattgaccacgccgagcaccataaagtcgcgatcgctggcttccagtagctccagcaactcagggcccgtgtcggggttgcagcttagcgagtagcgcgcattggcgccttcgccggtttttgcgatggcctgcatgacgacattgcagccgttgttaaagacgtcgcgggcggcgtgcgaataattgctgttgatgtagtgctgctgggcatgggcgtggtttaaaaagctgccaggtttgaagaaaaattccgacaccacgatattggccggcagcgtattttgccgcagtgcgcgcatataagagagctcaggcacgccggcaaacacgcggtttaaaaacggcgccatgaacctagcttccagacctttgcccggcgaagggatctctagcgagagcgcggtgaggatggtcagcgacagcgttgggtcggctttggcgcgctcaaacagcgcattgatgagctcgggcggcttgcccaaaccgagcggcatgccgacgaccaagcgcttgccgactcgcgcaatgatggcatcgacggcggcatcgacatggcttaaaaattcggtatttctgtgcgccatggcggccactcctgttagcaacgatggtccatcaaggcgatgtgttaggcggcgagcacgcgctcatacacgacaaagtcgtagcccatgccgctggtctcgtcgcgacaggcgcgtcgcgacacctcttgccagtcggtagcggcgacctcagggaaaaaagcatcgccggccacctcagcatgcacctcggtgatgtagagccggtcaacttgcggcagcagctgtgcgtagatttcagcaccgccgatcaccacgatttcatcttgatagttactcaccgccacggcttcggccagcgccaacgcggcttccagcgagtgcacgacgcgcgtgccaatcgggccttcccagtgcgcatcgcgagtcatgacgatattggtgcgattgggtagtggccgacctaaggaatcaaacgtggtgcgccccatgatgatggctttgccgctggtgacctgcttgaagtatttcagatcctccggcagcttccacggcagctcgttattaatgccgatgcagcgattgctggccatggcgacaatcagcgagacgcgcacggcatcatcgggcaatgagtcttgcaggtcgtcggggacttccccgcgcagcagttcaggattcatacggctaccttggcggcaatatgcgcttgcgcttcgtagccttcgagcgtgaagtcatcgaagcgaaaggcaaaaagatcggtgatattggggttgatgcgcagtgatggcagtggacctggcgtgcgcgcgagctgcgtatcggcctgttccacgtggttgctgtagagatggcagtcgccgccggtccaaacaaaatcgccggcttgcaggccacagacttgcgcgaccatcagcgtgagtaaggcataggaggcgatgttaaacggcacgcccaaaaagatatcggcgctgcgctgataaagctgacaagacagcttgccatcggccacgtaaaactgaaatagcgcgtggcatggcggtagcgccatgtcatcgacgagcgccggattccatgcggaaacaatcagccggcgcgagtcggggttggtcttgatcatattgaccacgtggctgatttggtcgatgtggcggccatcgggcgctggccacgagcgccattgatagccatagactgggccgagatcgccgttttcatcggcccactcgtcccaaatacgcacgccgttttctttcaaataggcaatattggtgtcgccggccaaaaaccacagcagctcatggatgatggacttcaagtgcaattttttcgtggtcagcactggaaagccatcggctaaattaaagcgcatttgatggccaaacacggagtaggtgccggtgccggtgcgatcgcttttaaacgtgccttgatggcgggcgcgagccagtaagtcgaggtattgctgcatgattagcggctccgtttcgcctgtgctgctcgtgtttgctcagccacgcgcgcgacattgcttttgcgataggaaatggccagcaacaccacgccgagcacgatcatcggcgcggtgagcatttggcccttggtcatccagtcgaatagcacaaagccttggtcgacgtcgggctcgcggtagaactcgatgatgaagcgcgcgaggccgtagccaatcagaaatagcgacgaggcggccatgcgtgggcgcggtttaagcgtgaaaataaagatcaccagaaacagcagcaagccttcaaatagcgcttcataaagctgtgagggatgacgcgcgagcgcatcgacatgcggaaataccatgccccacggtagctcgggattggtcaccggacggccccacagctcaccaccgataaaattgcccaggcggccaaacatcaggccgggtggcacaataacggcaaataaatcggtgatttctagccagggcgtgttgtagcggcgggcgaataaaaagcccgcgaccaagacgcccaagaagccgccgtgaaagctcatgccgccttcccagaggcgaaaggcccagagcggatcgttaatgaaacgatcgaagccgtagaaaaaaacatagcccaagcggccaccaataatcacacccatgg

SEQ ID NO: 2885 - DNA, 23243 bp, synthetic construct
  misc_feature 1..23243: note = Synthetic
  source 1..23243: mol_type = other DNA
gcgcgcagggcgaggctcagcgcttcctggcagccggtggtgacgacgatgtcgtcggccgcgatgcggccgcccgcctcgctcatgcggcgggcgatctgccggcgcagctcgggcgcgccgggcggcatcatgtagcctgccgcgcgcgtgcgctgcaggcgcgctacccgggcgagggcactcgccacggcccgggtgggcaggaagtcgggatccggcacggcggcccccagctggacgatgcccgggtcgctggacgccttgatcagcgccatggccatgtcctgcccgctcaccaggcgcggccgcggggcggcggtcctgcgttcgggttcgatggtgtgcagcggccggcgcgcgcgcacgtagaagccggatcgcgcgcgcgcctcgatctgcccctcgtcctccagcctgcggtaggcggccaccacggtggcgacgctgacgccacgctggcgcgccacgctgcgcacgcccggcagacgcgtgccgggggcgtaatggccttcggtgatgcgttgcgccagctcggcggcgacattctggtagagcgcggtcatggtggatgcctcccgatacagttcggcccgttcggagccagtacagttttcggacaaagaaatctgtactgcgtcaatttagcaattctgaatctgtattgccagcccgacgatgactacagtgggcaccaggaagcgcgcttcccgcgctgttgccccctgtgaggaacgaccatgccgaacccgacacccgacgccgcccgtgcctttgccgaggactggatcgccgcctggaatgcgcgcgatctcgatgcggtgctcgcgcactacagcgacgactgcatcttcgcctcgccgttcgtcgcccgcttcgccggcgagcccggcggcaggctggtcggcaagacgcgcctgcgcgcctactggacggcggcgctggccgccctgcccgccctgcatttcgagctggtcgacatgctgaccggcgtggactgcatcacggttctgtatcgcggccatcgcggcctctcggcggaggtgctcgagctcgctgcggacggcagggcggtgcgcgggaccgcgctttacgcagtggaggatcgatcatgaaatcagcccagaccccgtcgctggggatgccgctcgccggcgacatcctgccggtcctcgttgcctgcgtactgacgccgggccaggacaggcggcggctgtcgtcgtcgggactgagcttcggcctgcgccgcagcgcctggcatctgctcggcctgctgtggggcggctatctcgccatctgcctcgccggcgtagggctcggcgcgctgttcatcgccgtgcccggggtgcagaccctgctccgcgtggccgccggtttctgcatgctgtggctgggctatcgcctctggcacgcccctgcgccgcaggcggcgccgacggtgcgggcgctgcggccgctgcgcttcggcgaggcggtgttgctgcaactgggcaacacccggagctggctggtggccgccgcgctgatcgtcggcttcgtgcccgcgggcgaacgctatctcgaacacatgctggcgacggcactcgtgttctgcctcgccacggcaccgggcctcgtgctctggactacccacggcgcggcgttgcaggcccggatgcgcacgccgtcgcaactgcgccgcctgcagcgcggcatggcgatgatcacggccgcggccgcctggctgttctggctatgagcgcggcagtgcccccgggcgcggagatgccgaagatacggcgcacgccgggcggcatgatcgacttcgaccactacgaaaggcgggcgttacggctgcgacgccgggccgtgcgcgtctggctggccgccttgcgccgacatgtctccgtgctgcgcaagcgcggacggatgaaaaacgaaacaagacatacaccgtgtacgcaatgaacatgctgggcctgatggccgaccacaaccgctggatgaacgagaagctgtatgcggtgtgcgcgcagctgtccgaggccgagcgcaggcgcgatctcggcgcgttcttccgctcggtgcacggcaccctcaaccacctgctgctggtcgaccggctgtggctggggcgcatgcgcaagacgccgttcgcggtgcgttcgctcgaccaggagctctacgccgacttccccacgctcgaacgcgagcgcgaccggaccgacgccgcgctgcaggactacgtcgcgcggctcgatgcgcatcggctggcgcaacctgtcgactacgtgtcgctgctctcgcgccaacccgtgacgcggccgctgggcctggtcctggtgcatctcttccaccaccagacgcaccatcgcgggcagatcaccacgctcgtctcgcagctcggatacgacttcggcgagacagccagtcttccatccgcgccatgctgacgtagaaggtgggcgtgatgtagagcgtgaggaactgcgagaacaccaggccgccgatgaccgcgatgccgagcggacgccgcgcctcgccgccggtgccgaagccgatcgcgatcggcagggtggcgaagatcgcggcgaaggtggtcatcatgatcggccgcagccgcaccaggcacgcctcgacgatggcgtcctcggcgctcatgccggcgcgctgccgggtgagcgcgaagtcgatcatcatgatgccgttcttcttcaccaggccgaccagcaggatgatgccgacgaagctgaagatgttgagctcctcgtcggcgagcagcagcaccagcagcgcgccgaagccggcgagcggcagcgcggtgagtatggtgagcgggtggcccaggtgctcgtacagcacagccagcaccatgtagatgacgatcacggtaaacagcagcaagagcggcagggcgacggtcgattcctggaatttttccgccgacccgctgaactgtgccgtcacatcggccggcagcaccgccaccgccgcactgcgggcggcctccagcgcctcgttgagcgacacaccgggtgccagcgagaacgacagcgtcaccgccgtctgctggccgtagtgctgtaccgagattgggcccacgcccgcctcgacccgggccaccgcatccagccgcgtcagcccgcccgacacggtgcggatcggcagttggccgatcacggccgggtcgagctgggcttcggggagcgccttcacgctcactgtgtactggtcgctggtgccgtagatttcgctgatgcggcggccgcccagcgcatcgtagagcgtctgctgcacctggcgggtgtcgatccccaggcgcgccgcttccagcgggtcgagcaccacgcgcaattcgggattgcgcagttcgagatcgctgttcacgtcgacgatcagcggcacggtctggagcgctttttccacctcggccgaggcgttcttcaaatgctcgaaattgcccgaagtgagcgtgagctggtagtcgctcgacgagctcatcgcgcccaggttgatcgaggcggggttctggaagaacacactcacacctggcaccctgcgcgtgagatcgcgcagttcctcgatgacggtgtcggcgctttcacgcgtatcacgcggggtgaggcggatgaccaggcggccgacgttgccaccggtgacgccgccgccgcgctggccggcggacgacatcagaccttcgaccgctggatggccctggaccagcgcggcgagtttttcctgccgcttcgacagttcctcgaaagggatgccttccggatactgcacgccgccgaaaatcatgccggaatcgacgcgcggaatgaaaccctgtttcacctgcccggccagccagagcatcgcccccagcaccgccaccgacaacagcagcatcgcgccgcgatgccgcatcgacgcgcgcagggtgtcgccgtaccagtcgcggaaggcattgaagccccggtcgaagccgcgtgacagcgggttgttgagcgcttcgtgcttgaggccgcgcgcgcacagcatgggcgtgagcgtgagtgacaccacgcccgacagcagcacggccacgccgatggacacggcaaactcctggaacagccgcccgaggatgccgcccatgaacaggatgggcaggaacacggcggcgagcgaaaccgtcatcgacaccacggtgaagccgatctcccccgcgccatcaatggcggcctgcatccgcgtcttgcccatgtcgaggtgacgcgcgatgttctcgatgacgacgatggcgtcgtcgacgacaaagccgatggccaggatgatcgccatcagcgacaggttgttgaggctgtagcccgccagatgcatgaaggcaaaggtgcccaagagcgagctcggcaacaccagcgcggcgatcagcgtggcgcgcaggttgtgcaggaaggcaaagatgacgaggatcaccagcaccagcgcgagcaccatggtgaagttgacctcgtgcagcgaatcgcgcacgaagcgcgaacggtcggagtgcacctggagcgtcacgccgtcgggcaactcggcctcaattctcggcagcatcgcgcggatgcggtcggcgacttccaccgtgttggcccccggctgccgctgcaccgccagcacgatggcgcgcgtgccgttgtaccaggtgcgcgccttgtcgttctccacgctgtcttcggcgcgaccgagatcgcgcacgcgcaccgccgcgccgtcgcgataggcgacgatgacctcgccgaaatccttgccgttggccagcgccaccggggccttcaccgtgtaggcacgggtcgcgccgtcgagcgtgccggacggcagattggcgttggccgcctgcaccgccgtcaccacatcggcaaacgtcagcccgcgcgccagcaattttgccggatcgagatagagccgcagcgcatatttctgcgagccgaacaccagtacctgcgccacgcccgacaaggtggagagtcgctgcgccaccaccgaatcggcaaccgcatcgagctgggtcagcggcaggcgttcggccgacagcgccagatacaggataggcgaatcagacgggttgatcttcctgagctgcggcgggtccatgccgtcgggcaggttgcgcgcggcctgcgcgatggcggtctgcacgtcctgcgccgccgcgtcgatgtcgcgcgagagttcaaactggagcgtgatattggtcgagccctggctcgaactcgatgacatcgactcgatgccctgtacggtcgacagctggcgctccagcggcgtcgccaccgtgttcgccatggtttccgggttggcacccggcaggctggcagatatgcgcagggtgggaaaatcgacctgcggcaggtcgttgatcggcagctgcttgtaggcgagcgcgccgaacagcgccatcgccagcaccagcatcagggtggcgacgggccgctcgatgaagagacgcgacaggttcatgggcgtgactcgcgcgcgccgccctgcgcacccgcacccgcacctgccgaccgttggccttcgagccgcacggcaccgtctgctttcaggcgctgcggaatctcgatcagcaccggctcgccggccgcaagcctgccttcaaccgccatcatgccgtcgagcgcacgcagcagcatcacgttctgcacggcggccttgccggctcgcaccacatacacataagtcccgtcctgcgcatgttgtagcgccgcttccggcaccacgcgcgcatccttttcgacccccaccgcaagccgcacgcgcacgctctggcccggcagcaaaccgacaggcagcgaggccagacgaaccttgatctgcaccgcgccacttgcggcatcgagctgagtgtcaacgaaatcgagccgcccctgcgcgacgggtgttttccccaggtcggtgtagatctcggcatcgacggagccgcgtgcctgcgcggacgcgagtaccggccagtcctgctgggccacgctcgcacgcacgtcaagctcgcgcgcctgggtgagcgtggtgagcgcggtgccggcctgcaccaggtcgcccggcttcaccgcaatccgcccgacccgaccggcaaacggcgcgcggatcgctgcgtagcccacatcgagacgcgccgcgtcgagtgccgcctctgcggcggccaccttggcgcctgcagcctcgcgcaccagcaccgcatcgtcgatttcctgctggctgatgtagccgggcgacagcagcggttgcaggcgctcgacttttttctgggcatcggccacttccacgcgcgcactggccaggctggcctgattctgcgcaatctgcgtctgggcggcacgggcgtcgagactgaacaggatttgcccggcgcgcaccgtgtcgccttcctgcacctgctgacgcagcaacacgccgccaacctgcgccgacacgaccgcctgctgcgcggcttcaagcgtgccgggcacttcgacaatcaccgggaaatcgcgcaccaccaccggcacggtcttcaccgctagcgccgggccgccgccgggcccgcccgcaccgcgcggcccggcggcctggtcctgctgctggatgcggtaaaccacgccagcgatcagggcgatgacgacgacggcgaccagaatgcggactttcatgcttatctctcggtaagcgcgggcggcagccgccccagcgcgtgattcaaacgggacagcgcggccagccagtcggattcggcctgcgcctgggcctgccgggcgcgcgcccggtcggcctgggcagtgagccattcgagcaggctgccgacgccggcccggtagcgggcctcggccgcgcgcgacgattcatccgaactttcaaactgggaaacgacaccggcacgcgcggtctgcgcgtagcgggcgtccagataggcgttcactacgtcgagcgcgatggtttcgcgctgcgccgcagcctgggcttccgcctgttcggcgctgcgccgggcagcgcgcgcggtgtcggccagccgccccccgtcgaacagcggcacactcagggtcaggcccacgctgttggtggaagacggtgtacgttcgtcctccaggaaaaaggttcggccggcgctggcgttcagcgccaggctcggccagcgcgaagcccgggccgcttcggcctcggcccgggcgcgagccgccgtggcgcgcagggccagcacgtccgggcgctggcgttcggcttcggccagcagatcggcgagcagggtcgtgtcgtccagtccggccgccggcaccgtatcccagtccagcaccagggtctgcgtctgcggaatgccggctgcctgcctcagtgccgcttcggccttggcaaagtcgcggactgcggcgtcgcgggcgagcactgcctcggccagcgcggcgcgcgcgcgcaactggtcggcgcgtgaggccagccccccggcgacgcgtgctgcgaccgcatcgaagctcgtctgcagggccttcacctgttcgtcctgcgcatcgcgtccgccgcgcgctgccacccaggcggcccagccggtttccacttcggtgacgatgtcctgcaggctgcggttgccggccagcaggctggcgatgagctgatagcgctgcgcctcgatgcccgccgcgcgcgcgccgaagtcgtacagcacccaggccagcgacaggctcgggccgtagcgatgcaacaccggcaccgacgcgccggagctcgacagcgactggctgcgggtgaagccgaactgcccggtgagcgtgggccacagatcggcacgactggcgtcgagccgcgccgcttcggcctggatgccgagccagacggcgcgtgattcggcccgctgcgcgagcgcgtggctggtgagtgcggcgaggctgtcgaagcgcagcgtatcagcagcaggggcggcgcgcggggcagcatcgggcagcgcatcgagcttgagccagaactgccccggcgcgggcggcggctcgaccgtcactgcgtgcgccaggctactcgccagcagcaggggaagaacgagggaggttttcaaggtgttgtgattctaatcgtccagtggctcgacccgggtgcggaacccgagttcccttgcccgtatgatgcccggatgcagccacttcatctcaccctcctgcaattctcgctggccgtcggcaccctgtttgccgtgctgctggtgggccacatcctgcgtcagcgacgcaacccggcgtcgacgctggcctggctgctgtttgtcgtcaccctgccgtggctggcggtgcccgcctatctcaccttcggcacgcgcaagctccagccccggctggccgggacaagcttgccgcatcctgcggcccaagccagcggcgcgctggaccgtctgctcgccagcgccgccgtgccgcccctgcgcagcggccacacggtggactggcacgccgacggcgaggcggcgcgaggcgcgctgatgcacacccttgcccaggcgcagcaccagctcgacatcgccctcttcctgctgcgcgacgacgcagccggacgcgcgttgtgcgatgccctcgtcgcccgcgcggcggacggcgtggccatccgcctgctgatcgacggcgtcggttccttcctgttgcgccggcaggtcatcgcccgattgcgggcggcgggcgtggccgtagcctggttcattccgctgctgcaccgccccttccgcgcacgcagcaacctgcgcaaccaccgcaagctggtgctcgccgacggccgcatcgcctggctgggtggccgcaacgtggccgacgaatactttgcccccgatgcacagtgggtcgacctgagcctgagcctgagcggcccggtgatcgccgacctgtcgcagctcttcgacagcgactggggctttgccacgcgcactccgccccgcgccggcaacacgcccccctccgcgatcccggacgcgccggcccgggcccagctgatcgccgccggcccggaccacgcccgcgacctgctgcacgaaagcatcatgcagcgggtgtacaccgcgcagcaccgcatcatcctgaccacgccgtattacatccccgacgacgcgctccagcttggcctgtgtctggccgcacgacgcggcgtcgcggtcacgctcctgctgccggcgcgctccaaccatcgcctcgccgacatcgcgcgcggccgctacctgcgcgaactggcgcgagcaggcgtgcgggtgcgcctgctgcccgaggccatgctgcacgccaaggtctggctcatcgacgacgacgcgtttgtcggttcggctaatctcgacctgcgcagcctgttcctcaatttcgaactcatgctgcgcgtgcaaggcgaggtcgagaccgcctggctgcatgcctggctcgccggcctcgacgtgcgcagccaccccgccccgacggcccccgccagctttgcccacgaactgctcgaaggcgtcgtgctgctcaccgccttccagctctgaccctgccctccacgccgttcccgtgcccgcaccggccggctatcatgccggcatgatgccccgccttgccttccgcgtgctcctcggtgacgacatcgcgctcggccccggcaaggtccgcctgctcgaagccatcatcgaaaccggctccatcgccgccgccggccgcagcatggccatgagctacaagcgcgcctggcatctggtcgacaccatgaaccgctgcttcaacaccccgctggtcgaatccaccaagggcggcgcgcacggcggcggcgcgaccgtcacgccgctaggacatgaggtcatcgcgcgctaccgcgcgctcgaacaccacgcccgcgccgccgcagcgcaagactttgcggcgctcgccaaacatctcgccgaccacaatatccacggcaatgaatcatctgataaaaaataaaaaggcccgagcaagctcgggccttgggttcggttcatcccttgcgggataaccttattgcagcaacggctctcaccccggaaagctacaacgagccaaagtctacaccagaggaggcgcagcacaagatgaacaaaaagaccaatcacgcatacacgcttgggctggacatcggcatggcgtctgtcggtgcagccttgctcggcgcaacctgcattatcggcctgcacgtccgggctttcgacaaagccgaaaccgccaaggaaggcgacccgctcaacaagacccgccgcgaggcccggctgacccgccgccgcattcgtcgccgcacccatcgcttactgcgcttagcacgcctgatgaaacgcgaaggcatgatcggccgcgcgtcacccggtgccttcgctgtcccggacacttcgccgtgggccttgcgtgctgaagggctggaacgtcgtctgacaccggaagaatgggccgccgtgctgtatcacctcatcaagcatcgcggcttccagtccacgcgcaaaagcgaagcgaaagaagacgaaaaggccggacaaatgctgtccggtgtgtccgccaatcagcagcgtatgaaagacggcggctggcgcagcgtcggcgaaatggccgcgcgcgacccggcgttcgccgccgccaaacgcaacaagggcggcgcgtacacacacaccttcgcgcgtggtgatctcaccgacgagctggccctgctcttcaggcagcaacgcgcgcacggcaacccccataccggcgaggatttcgcagctcaggtgcgcgaactgctgttggcgcgccgcccggcgctggccggcgacgcgctgctgaaactggtcggtaaatgcacactggaacccggcgaataccgcgcacccaaggcgagctacagcgccgaacgccacgtctggctaacccggctcaacaatctgcgcatttcggaagtcggcgagcagcgcagcctgacggcgggcgagcggcaaaccctgctcgacgagccctacaaactcgccaagctcacgttcaaacaggcccggcagaaattggggctgaatgacgccgcacgtttcaacagcctcacctaccggggtgacaaggacccggaagctgccacgctattcgaagcgaaggcttaccacacgctgcgcaaagcctacgaagccgccgggctaccgggcaaatggcagcgtgatgcgctcgaccccactcggctcgaccgactggcctatgcgctgacctgctacaaaaccgacgaagacatccgcgcgcacctcgtcgcgcacagcgtggaagccgacatcatcgacgccgtgctcgacgtgtcgttcgacaaattcgtcgcgctctcgctgaaggcgctgggaaaaatcctgccgttcatggcgctgggccagcgttacgacgaggccgtgcaaagcgcgggctacgcgcatcacagccagctgaaccaggacagcgtcaaaacacgctatctgccgccgccggatcgcgaccagatccgcaacccggtcgtctaccgcgcgctcaaccaggcgcgtaagctggtcaacgccatcatccgcgaatacggcccgcccgccgctgtgcacatcgagttggcgcgggatttgtcaaaacccatcgacgaacgtcgccgcatcgaacgcgagcagaaagaattccaggtcaacaaggaaaaagcccgcgccgacttcatcgaccagttccatttcgaacccagggggttggatttgcagaaataccggctgtaccgcgagcaaatgagccagtgtgcctacagccagaaaggcatcgacgtggcgcggttattcgagcccggctacgccgagatcgaccacgccctgccctactcgcgtagcttcgacgacagccagaacaacaaggtgctggtgctgacctttgaaaaccgcaacaaaggcaaccgcacgccttacgaatatctcgacggcgcgagcgacagcccgcagtggcaggcgttcgaagcttgggtgctggcgaacaaggcctaccgccgcgccaagcgcgaccgtctgctgcgcaagcatttcggcgcggacgaagcggcggaattcaaggaacgcaacctcaacgacacgcgttatatctgccgtgcattcaagcgcatggtcgaagaccatcttcaatggcaccccgacagcgacgcgaacaaccactgcgtcgtcgtatccggtcaactcaccagcctgttgcgcgcacgctggggactcatcaaggtgcgcgaaaacggcgacctgcaccacgcgctcgacgctgcggtgatcgccgccgccagccgcgcgctggtcaagcgcatggcggaccattctcgtcgcaacgagcttgcgcaggtgcgcgacccttacatcgacccggaaactggcgaagtgttcgacgtggctgcgctgcgcgccatagaagagcatttccccaaaccctggccgcacttccgcgacgaactgctgtgctggctctcgcccgacccggcactgggactggccgccgtgtcgggctacgacgccgcccggctgggggacatccgcccggtgcgcgtctcacgcgcgccgacccggcgcgggctgggcgcggcgcatcaggaaacgatccgctcgacgggtcgcgaaggccgattgctcagagatggccagtccgccgtcaagacgccgctggcgagcctcaagctcaaggacatcgacaacatcgtcggcgcggaagacccgcgcaacgccgaatggatcgccgccctgcgcgcgcgcctgcaacaattcaacggcgacggcaccaaggcttttgcggcgaaccagccgcccttgctcaaacccagcgcgcccggtaaacaggcacccgccatccgcagcgtcaaactgctcgccacgcagaaaagcggccttcctatccgccacggcatcgccaacaacggcgcgatgctgcgcgtcgacgtgttcggcaagggcggcaagttctacgcggtgccggtatatgtggcggatgcggccaggggggctttgccgaatcgggcggtagtggcttacaaacccgaagaggaatggccggaaatggacgaaagtttcgggtttctgttcagtctgcatccgaatgactgggtgtgtctgcgctacaaaaatgcccccagtcgcgagggatattactcaggcttgaatcgcgcaactggcgctatcgacatctgggtgcatgaccgcaactccgctgtcgttaaaaatggcctgttcgaagggaatggtatgaaaaccgcactcgcggtcgaaaaattccacgtcgatctgctcggccgcctgcaccgcgtccaatcggaaacgcgccaaccgctccaacgcaaaatgccgaagcgcgggagctgaccatgggctggcgcagcgtcgtcatcggcaatccctctgtgctggacttccaccagcgcgccctgcgcattcgtcagggcgacaacaccgcgcaggtaccgctggaagacatcagcgtactgctcgtcgagcatcgcgaagtcacgctgacctccgccttgctctcggcctgcgccgacgcgcaaatcgccgtgttgaccgtcggagaagaccaccaccccaacggcgtgctgctgccctacctgccgcacagccgcgccctcaaggtcatgcgcgcccagctcggcatgagcgagccggcgcaaaaacggctgtggcaaagcatcgttcagcaaaaaatccgcaaccaggccgccgcgctcgcccgccatcgccccgacaccgtcgccgagcaacgcctcttgcaccggctggccgacgaagtgcgcagcggcgacaccggcaaccttgagggccaagccgctcaacgctatttccatgcactctggggcgcagatttcacgcgcaaccagctgcgtttcgctaacgccgcgctcaactacggttacgctgtcgtccgcgctgcgctcgcccgcagcctcgtcgcctatggctttttgcccgcctttggtgtgcatcaccgcaatgaacagaatgccttcaacctggccgacgacctgatcgaaccctatcgtccgctggtcgacgcgcatgtgttgaaaagctggcccagcgagcccgaacgcgagctttccccgcgcgacaagcagcaactcgtcgccctgctgcaccgagacatacacacccaggccgcccgacaaagcctgctcgccgccgtggacgccagcgtgataagcctcggccagtggctggaattcgccagccccgctgtgctcgtcatgcccgtgctgcccatgaccgaggacgcggatggctaacgccacccgtcgctacatgcgcctgatcgttttcttcgacctacccaccgtgaccaaggccgaaaagcgcgcctacacactattccgccgcttcctgctgcaagacggttacgacatgatccagtggtcggtctacggccgcatggtcaacggtttcgacgacgcggagaaacacctcaagcggctttccgccaacctgccgagacaaggctcggtgcgctgcctgcaagtcaccgagaagcagtttgctggcatgaaactgctggtcgggcagttaagctttcaggaaaaaaaggtcaacgcccagcagattctgctgttctgacccacgaaaaaaatgctgccaagccgcatgaatccaagattcatgcggcttggcagcaagggaaagtgtagctttccggggtgagagagggagctacaaccaatcgatcagcccgtacttgttttccagcagtgtagctttccggggtgagagagggagctacaacctttcaggtatcgcgcgtttgcgaaaacatagtgtagctttccggggtgagagagggagctacaaccggacctttacaccttcacgctggtcgacgagtgtagctttccggggtgagagagggagctacaacggcacgtcgagcccacccaccacctggccgagtgtagctttccggggtgagagagggagctacaacagcgccggagtggcatcgtcaatgtgccgcagtgtagctttccggggtgagagagggagctacaacatcaggaagaatccaaggtggtgccgaagcagtgtagctttccggggtgagagagggagctacaactctctttgcgcggcgccaggctgccggccgagtgtagctttccggggtgagagagggagctacaacctgccgcgggccagcatcgacgactgcattagtgtagctttccggggtgagagagggagctacaacctcgcatcaatcactttgtgataaccgtcaagtgtagctttccggggtgagagagggagctacaactcggcgttagtgacgcatccgggacaaataagtgtagctttccggggtgagagagggagctacaacgatcaggcgacacgctccgagctgcgcctgagtgtagctttccggggtgagagagggagctacaactttgagccaaacgcaggcgggcgtttttagagtgtagctttccggggtgagagagggagctacaacattggcaaaaacgggttctccgtgcgcttcagtgtagctttccggggtgagagagggagctacaacccgcgttcgacacggcgatgcacgcgccaaagtgtagctttccggggtgagagagggagctacaactccggattcgccaaggttctggaaaacaaaagtgtagctttccggggtgagagagggagctacaaccttgccgatgatgcactcggcaacgcctttagtgtagctttccggggtgagagagggagctacaaccgacgtagtcgcagtcgccgttggtggtggagtgtagctttccggggtgagagagggagctacaacaaccgggtgacgccgtggccgatgccgccgagtgtagctttccggggtgagagagggagctacaaccaccttgaacgccgtgcgcaccatctcggcagtgtagctttccggggtgagagagggagctacaaccacgatcggccagccagccctgtgtgccgtagtgtagctttccggggtgagagagggagctacaaccgatgccgtgctgctcggcctcggcgcgcgagtgtagctttccggggtgagagagggagctacaacttactttggcgacctgtacgcaaaccacggagtgtagctttccggggtgagagagggagctacaacgatcggcaccacgtggtcaacatggaacggagtgtagctttccggggtgagagagggagctacaacgactttttcttcaagccccatgcgtttcagagtgtagctttccggggtgagagagggagctacaaccggcaagactgctgacacaaacagcccttgagtgtagctttccggggtgagagagggagctacaacaatcgaccggatgctttgagcctttgctcaagtgtagctttccggggtgagagagggagctacaacatcactgccgccggcctccagcaccggaagagtgtagctttccggggtgagagagggagctacaaccctgacccgcttccgtggatcggccccggtagtgtagctttccggggtgagagagggagctacaactggtcggcaagaaaaactggattccgctgaagtgtagctttccggggtgagagagggagctacaacatgcaatacaacggcaagtctaagtacataagtgtagctttccggggtgagagagggagctacaacccgcccaggcgcatacggcggcatcggcctagtgtagctttccggggtgagagagggagctacaacgcctggggtacgtgtgattggcgacgttgtagtgtagctttccggggtgagagagggagctacaacgcggcaataatgcgccgggtagcctgctcaagtgtagctttccggggtgagagagggagctacaaccggcctcccgtagctgggacgccgacgctcagtgtagctttccggggtgagagagggagctacaaccgttggtggtcagctaggagtaatcatggcagtgtagctttccggggtgagagagggagctacaacaaacccgcgtacatgctgtagcaccgatgaagtgtagctttccggggtgagagagggagctacaactccttgagctttccgatgtctgtggatgcgagtgtagctttccggggtgagagagggagctacaaccaagtaagcatggccatacggggagcccagagtgtagctttccggggtgagagagggagctacaacaataccaaaattcctcaacgaaccggcacaagtgtagctttccggggtgagagagggagctacaaccccactacggtagctggtcttggttacatgagtgtagctttccggggtgagagagggagctacaacgcaagatcatcaagcgctcgccggctccgtagtgtagctttccggggtgagagagggagctacaaccaggcgatcagcggcagcgcgggtgtgccgagtgtagctttccggggtgagagagggagctacaacgtcgccgaactgcttgagatcgcgcgccgcagtgtagctttccggggtgagagagggagctacaaccacagtgtacgctgaacggtgtggagggaaagtgtagctttccggggtgagagagggagctacaacaaacggttgagtcggaagcaggacaattttagtgtagctttccggggtgagagagggagctacaaccccccagtacgggggcaagccccgtactggggggttgagccgccttctgcggctggcttctaagtaagtttcaattttgatgtcttcattacatcgctcccaattcaactgaatatacatacggggttattttgagcttgttcgatatttatcgatatgacaccatggctatatcgaatcccgtccggaccctgtcatgctccgccgtctgcctgctgtcttcgccgccctcgggctgggccttgccggcttgtccgcccatgcaggcgaaaccacgattgccgtggccgccaacttcgccgaaccaatcaaggccatcgtcgccgacttcagccgcgccaccggccacacggtgaagatttccactggtgccaccggcaagttctacgcccagatcgtcaacggtgcgcctttcgacgccctgctcgccgccgacgacgaaacccctgccagactcgtcgccgaaaaacacggcgtgccggacagcgtgttctcctacgccgtgggccgcctggtgctgtggtcggccgacgccggcaaggtcgacgcccgcgccagcgcgctcaagtcgggcaatttccgcttcctctcggtggccaaccccaagactgcaccctatggccgcgccgcactggaaacgctggccgcaatgaaggtcgaggtgccggaaagcaagcgcgtggtgggtgaaagcatcgcccaggcctatcaattcgccgccacgggcaacgccgacctggggtttgtcgcgcagtcgcaggtgtggaaggccggcaagctccgttcaggctccgcctggggggtgccggaatcgatgcatcaacccatccggcaggccgccgtgctgctggtgcgcggccgcgataacgctgccgcacgcgcgctcctcgactggctgaaatcgccgtcggcccggaaaatcatcgaatcctacggctacggttcatgaacctcagtcccgatgactggcgtgcgctcgcgctgacggcccagcttgccaccgtggtcacggccatcctgttcgtcgtcggcacaccgctggcctggtggcttgcacgcacccagtcgaggtggcgcggtccggtttctgccgtggtagcgctgcccatcgtgctgccaccgaccgtgatcggcttctatctgctgatcgccctgggccccaacggccccggcggacagctcacgcaggcgatgggactgggtctgctgcccttcacgttctggggactcgtcctggcctcggtgatctattcactccccttcatggtgcagccgctgcaggccgcgtttgaagccatcggccgccggccgctggaagccgcagccacgctgcgcgccgcgccgctggatcgcttcttccatgtggtggtgccgctcgcgcgacccggctttctcaccgcaggggtgctcgccttcgcccatacggtgggcgaattcggcgtggtgctcatgctcggcggcaacctggccggcgaaacacgcgtggcctcggtgcagctctacgactacgtcgaagcctacgactacgcaggcgcgcatcgtctggcagcggtgctcatggtcttcagctttctggtcctgctgacggtgtatgcccgtcgcacgtccgcccgatgagctgcctgcatctgtccgtcgactggtcgcgcggcgcgttcagcctcaagctcgaccttgatctgcccgcacgcggcgttaccgcgctgttcggccattcgggttcgggcaagacgacgctcttgcgactgatcgccggactcgaccgcgcccccgcgcgcatcgccatcggcgacgaggtctggcaggacacgcagcacttcctgccgccgcaccgccggcccatcgggttcgtcttccaggacgccgcgctgtttccgcatctctccgcgcgagccaacatcgacttcggccgtcgccgcacccgcaccggcatgaacgacacggagctcgatcatctggtcgacctgctcggcattgccccactgctggagcgcaaacccgccgccctctccggcggcgaagcccagcgcgtggcgattgcccgcgcgctggcgttaaagccgcgcgtgctgctgatggacgaaccactggccgcgctcgacgaccgccggcgtgcagaaatcctgccctatctggatgccctgcatggtgagctggccatcccgctggtctacgttacgcattccaccgacgaagtcgcgcgcctggccgatcatctggtggtgctcgatgccggccgcgtggtgtggcagggggacgtggcggccgggctggcggcgcacggcgtgcgtcatctgatggcgcgggtagtggcagccgatgctgccggctgccaggtggacgtggctggacaacggctcgacctccccggcgtgcacgccgccgtgggcgagcgctttgcgctcaggctgtcacgcgaggctcagagctcggaaaacaaataagccagcagcgccagtcccagcactactacggaaagattcatcgcgataccgctccaggtgcagtagcgcgcggggatttcgatgggccgcagggtgcgcaaaacgcgacggaactggacgatggaaaagctcatcaccaccagcgccaggacgatgaatgccacgccgatccagaacgacatatcgcgccccgcgccatgcgcgaccgggcgcagcatgtgcaggaacaggccgaagcgctccagcacgaagccgaaggccatgagggtgaggccggtgcggttccacgccatgagcgtgcgttcggcggcaaagaatacgcgggggtcgttcaggtcggacatcaggcaggctccacgccactgggcaaattggatttgagtgtggcggcaagccgctcgaaggtttcgggaaacggcgcgcgcttgcgccagacgaggccgatggtgcgccccggcgcgggcgcgcggaaggggcggatttcgaccgtcttcttgctggcgcgcggcgcggcgtcgaccgcaagcgagggcatcagcgtgatgcccagccccatgccgaccatctgccgcagggtttcgaggctggtggcacgcacttcctcgcgcccggaggcgtgggtgccgcagacatcgagcgcctgatctcgtaagcagtggccttcgtcgagcagcatcagtttttctccgtcaaggtcggagaccttgagcgtgtcgtgtgccgcaagtgcgtggcctgccggcaaggctgcaaaaaacggttcatgaaacagcggttcgatcttgaggttgtcgtccatcaccggcagggcgagcaggccggcgtcaagcttgccgtcgacgaggtgatcgaggatctgcggcgtcatttcctcgcgcagcaagaggcgcaggccggggtattttttctgcaccagggtgagcgcatgcggcaggtaatacgggcccagcgtggggatgacaccgaggtggatcgtgcgcgacatcgggtcctgcgcgtggcgggccacctcgcggatgcgctcggcttcctcgacaatgttgcgcgcggcctggaggatttcgcggccgatgggcgtggggctgacgcgcttcaggctgcggtcgaacagggtcacaccaagaaagtcttccagctttttaatctgcgtggagagcgtggactgggtgatgaagcaggcttcggccgcccggccaaaatggccgtggtcggccagcgcaacgaggtatttcagttcctgtagcgtcatgcagcaccattcgatttcatcaatgggctgattttagactattcattggataaatttttcgtacgggattcaaatacacccatgccaccggatgcctggccccggccggaacacaaaccagaacaggagagaccccatgattgccatgagcctgatgagcacctacgacgaataccgtcgcgaccgcctcgccgccgcaccgatatatgccccgccggcccgctccctgcgcaataccatgctgcacgcgttgagcctcatcggcctcggcgtgggcggcatcgccgcgagcgatgatgacgacacgctgggcataggctgaacggacacgcgcatgaacaccgccaatatccaactccgccgcgccgtggctgccgacatcgatacgctcaacggggtggtcgagcgcgccttcatgacctggaatctgcccgagcgggtgaaacgcctgagcctgccgagctaccgttatcgcgccatcgatctgcaattccagcacctcgtggtggccgagacggcagtgcacggcatcatcggcgtcgccgcgtgggaacccgccgaagcgcgtgatctgccttcgggcctgaccggcctgctgctgcacgggctgtatgtggaaccggcgcacattcatcgcggcatcggcagccggctgctcgacgccgcgctcgacgccgcacgcgcagagggcgtcgatggtctgctggtgaaggcgcaggccgacgcgatcggctttttcgtcgcgcgcgggatgcgcctgctgccggtgcgggatgccgatcgcgattacccgcatcgttactggcaggcggtcgatctcgtggttcccgccgtcaacgccgcgcagtcctgtcacgccgcgagctgatcgaccatggaacttgcccgctcctcgcccaccccaagctggcgcgccacctggctcgccgaggcccagacgcacccttggaccagcgccggactggcgctggcgattgccgtcacggcctggctgctcgtcgcgagcctggcacgcgtggccgccggcgaagccgaagccggcctgcggctgggcctgctgggcggactcgccggtttcgccgcgaccgcgctcggcgcgctgccggcgcttctgttgcgcaatctcagcagccgcaccgaagacaccctgctggggctggccgccggcatgatgctcgccgcgagttcgttttcgctcatcctgccgggtctggccgcaggtgaagagatcagcggcagccgcgccctcggcgcagcggtggtggtggtgggcctggcactcggcgcgctcctgatgctggggctcgaccagttcacgccgcacgagcacacgcacggcggtccctgcggcgcaggctgtgaacgcatcggccgggtgtggctgttcgtgttcgccatcgccctgcacaacctgcccgaaggcatggccatcggcgtggcgttctcgcagggggacatggatgtgggcctgccgctggccagcgcgattgccttgcaggacatccccgaaggcctcgccgtggccatggcgctgaaggctgccgggctgtctcccctgcgcgccgtcggcattgccgccgccagcggcctgatggaacccgtcggcgcgctgctcggcgtgggcctcgccagcggcctggcgctggcctaccccatcggcctcgggctggccgccggcgcaatgatctttgtggtgagccacgaagtcattcccgaaacccaccgcaacggtcaccagacgccggccacgctcggcctgatggcaggctttgcggtgatgatggtgctcgatactgcgctgggctgatgcccgctgcgtcatagtggcggttcctctgccacgatgaccgtgatgcccagcgactgcccgtcgcgcagcacggtcagcgcggcgtcgtgacccggtggcgattcggcgatacgcgacgccagttcagccgcacgcggcatgggcgcaccgtcgagattccgcacctggtcgcccgctcgcacacc

SEQ ID NO: 2886 - DNA, 23240 bp, synthetic construct
  misc_feature 1..23240: note = Synthetic
  source 1..23240: mol_type = other DNA
tgcgattgaatacattcaggtcaacattgcaatgtatgaaatgggttatccatttgatgcgagagaagctcgcattttcgatgagaggaaacaccctgcaaaaaagctggagactcaggagtctcagacaatgacgatgcaatgagtcctgagttgggttttcatcaataataaaatgatataatgtgtagtataaaatacattttggagaattaaatggaaccggtgaacgaacgatcgaatcacgacttgtctatcgttagcgtgacgtcagggaaaagtcttgatgagaaattattcaatgagcaagctgaacgcgctaggctagatcgatttattgaagatcaagatagccagcttcaacttcaatgctcagagagtgctttgcttcattattcagaagggttaatgaatcagcttttatcttcaacaagtattgatcagacttatgcgattgctggcgaattgaatgagctttcttcaagcattcaaagtccagtaatcagaagggccgtagaagagcgtgctgcagtctatattgagcaatctattgagcatgtcgacgagatgtctgatgcggacgttcgcgaccgccacaagccgtttaaagatatgtttgatcattttaaatcagctgacaaagtagctggtaaggcaatggatttaaatgagacggttgagagtcttcaaaaggttcgagagctttcaaggggcgagcttggattgggagatgccggcgatgcggcacttgcctatgttggagaagaattgaaggaggctttgataagcaaggcgtctggcggttttctggataagtctggggctgcgaaaatggctatgggtgccttttaaatatgacgcctttgcaaattaacgaaatggtgtctaaatatatccacttgccacaagggtctggattgtcacagatttttagagaagggatagaattgctttcttatagtgatattgagagcgcatcctgtgtttctggtttgcttgctttgtatggtcgtgaagactctatcgagtttctcgatagaaaaggttttataaaaaactggcatagatcagatatttcagataatgaaggctttagccataatctgattttagcggccagtaatgaaaactttgtatatgttcagcgctaccttgaccgacaccccttaaaggatagtgatatttcaaggcagttaattgttgagatggctaaagatggtggtcttttttcggtcgatatattggattactttaatccagttgacctggctttaattgctgaaccggttatcaaggcctgtcttgacagtgataatcattttatgctgtcaaacttcctatattcggccgatttgagcaagacatcagtattggatattggtcacgattttgattttcacgcgaggtactctcatgatcgttcgatgggatgtttatcctttttgcatttgagaggcaatcttgaaggtcttgagtttgaccagccgcaaatcctaaaggggtttcagtctgttcttgatcgaccgagggacttaaggcttctaaaacgtgtggcaagttattttgacagtgttggaatagatctttccggtggaagtgatttatttataagcttttttggggccttgaagaatgaggctcaaaaggagttatggagtatggctatggtgcaacagattggaagtaaaaatcgtcaatacgagaagaaatcagaatcccatattatccggttgagtggtcgaaatagtgtatcaagtacccaggacatgataaacgcattaaaagattatagctcaatgccagtcgcttcaagtataggctcgaaaggagctcatatcttttgtgagatgcatcaagtgtctgatggccgaaaatactatctttctctttatgataatacaggaaatgatggcgaaagcttctttggtgccagagtttcacttattaatgaagatggactttatgattcatttgaaataagggattgtgatcgtttatttatgatgctagtagagcttgatgggtctggccaggagcttgatgttaaagaaatgtacagagagtcggctaactctttacttgataatgagtacaagtcagatttgactcaagggtacggatcaggattggtgagtagtatttaaaagctgttcttaggtctttttaaatggttgcaagcgaaagagcgatcagatgaataggataaaatccatagaagaaccatttcggcattctatggatttttttattgagtgaaaaaagaatgaccgggaaaaacatggctgaagccataaagataacgaaggtagtgtagtcgttaatctgactggctaaaatcaaaagtattccagctgaaataactccagctcgaattaggcaatccgagaagtctcttatgaaaataagtcccattgttgcgataaaaatggctgtcgtaccataacttgtccagtcttcaaggaagatgctaacgctagcgataagaatggtcattatgaaagataaggggttgtttttggttaggtagtgaaaggctagtacggccaatagtaaagttgtaaagatactcaatttttgtgagagttcaccggttatagaaaacgcagcccattgatgggctatctctgcaattggtagccaaatcagcaaactttttatatagccttttgacttgcttgggtcttcaaatagtcgataaagaataataaataaaaacaatggaaaagcaattcgtccaataagggttggccagacaagtgatctttgaaatacaacccagtcaatatggtcaattaccattgcaattaaagcgacccacttaatccattcaagctgataattattcagggttatggtagctctttccattaaaattctttcttaggcttgagttatattgctataatatacattatataagcactcattagaaataaaaggaaagattagtgagaaattttctatctaaaataggtcgttctctttcagagcctatttcaccgggttattcttccagaaaagaatttattgagatatttgatgacaatgataccttaattgccgagatatcttcatcagttatggctcaaaaaataaagattcagccagatatttttaagatagtagaagatcgtattttatttaaagaattcgcatgtcttgaggatgattatttgcgcttattttttaaagaaaattattcttttaagcctgataattacttgagatacttatttgagatcagtcatagtcagaatgactctttatctccagtcatttagtaaggatgtaaaacatctatgaaaatacagggttatgatttaagttttattgataaatttcttttatcaaaatttatgagtcaaaatcaatttcaatacctgatagaaatggcaagcaagggtgatgaaaaatgcattttaaaacttggttatattcagagcagaattgaaggggttccaattaatttttctcaaactttaccccagaatcctattgctcaccttcgatacaagacagatcattcaacattttttattacagaaaaagatgttgaagagccaaccgagtacaaaagtgaaccgacagatcatcaatgttgtgcatacggcctttcggtttttaataacgactttgacagcgcggtatatggcccgattccgctgggaaacttaattaagaatggggcattgcttgacacttcttttaagcccattaaacttgaagttaagcagtatgggtgatcgctctctggcgccgtcaagttctggtattgatttatcccctggtcagatttattttttaaccggttgtatgaggacttttcagtccagctcttttcatacattttctgaatcaattttagaaagtaacaaggttaagccaactcccataagcgggttctttcatcggttttatactcttatctccctgaatacgggatttacttccgttcgatcagtttttaactccgtatcagagagcattgaaaggcttttaaaaaaggcgatactcaattcgcaactggggtgttttagttttagtatgaaaaacacctttaaggagcttgatagcttgtcttccgtttcatttgactacaagaagcttgattctgatgatcgcttcttggtggaatcatcttatcgccttattgagttcctatcgatagcaaggacgttgagagatatcaagtcaaaagataattccttaacaaaagggtatcgtcgattcataagagatattttttatatttatgagggtgacatggagcatggcagcggacttgtcgagcttttagttgaaggcaggcgaaagcttgccttgacaggtgggtcattagtcatgggcgttaggcatattgacggtttttcagtatctgtatcggcgaccacttcaggatttttgaagggttttaatgaaagcgatgactattataagattgatcgagaagactatagggagataaagattgattttgatcaaaaattattgaacgcacctgtctgctcataaatgacagacattaaaaaaccctgacatgcagggtttttatttgagatattcagtctatttccaagaccaattaagatcttctgattcgggttttttaatggatttcttaacttcatgtgtcacatttttcatagcaacaagatcaacttgatcacctgtaaagactgttttagcatctttgctcaaataaagaacatgtccgtttttagtttgaatttcaaatatttcgttcattccagttagtttatttactttttgaacttgtgcatgaggcaatgctttttgagcttgttcaactgttaaagcgttagctccaacagatagcgatgcgaaagcgacggcgataaatcccagtaatgttttcttcattttgactccttatagtttaagttacttgtaccaatgtactggataaagtatattaaataaacttatgaagagtgtcaatttttttataaggatttttattctgtcacttgtaatcctggctggattggctttaattgctctctgtagtcttgtattttcattccgttctcacttaaatagaccttttctagattctgaagaaagccgagtgaaatgtcataaaacttggatgtcgacatcggcccattggtgacaatagagtttaggcatctctcacagaagtcttttaggtttaatgttgggtcgtctttttgcatgccttttaatatgaatccggaagggcttttgagcatggtttcgtacatggattcagtcatatcaagtttttgacactttctttcttgcattgttactacctttattcgttaatacctatgaaatattatacactaagcctagtgatgaaattttgagtggaaagggtatttttaagcatttgtgccgtaagatcattaaagattgttcactattactgtatttagagataattatgtgtattttaatgattaggtcatacaatttaatttattttaatgctacttgaattttaatctatattttttcatgattttaattttgttttagtcttctgtcatggagtgaattgctgacatgttaaaattataggatcaaatagcttatagggaataaaatcatgtcagagcattcagcgattaatgcttcttttaagttcgataatgaggcatcgtttgatcaagggttttctattctaaagccttggatagatgattcagatgagccattagtttttagaggaatcggtgtcattattattccattggacagttatcgcaatttaacccgggtattggggcaggtttgcgagattgcttctgagttttcattaatggaatattcaacggatggtggcatctttgtaagatgcggtaatcattttgatattgttaatgttgatggggatggtgttgctgatcttctttttaatgaggggaaggatcttgatgcttactgcattctccaatctggttttgattattttgaacaattggtcaaggataatatatttgatgaaacaagtataaatattgacgataaaacgatagagtttttaaggtctttagattctgaaaggctggaagctgtttttggtgagcagtacgcggactccgttaatgatgacatgtttgaatataaggatgaggtattagctgagcttgccttaagcctagttgaaacaccgattctaactctggaagaggcaaaagagttggatatggagagggagcgatcagaaatagacttctatcgtagcgaagttttgagtgagcttgagatttctaatgttattccatgaatcgagccaatcaattttgttcatagagaaacgttatgagtgcgaaaattaacccagaaaataccgaagagctgatttccttaatgaattccactgggatatctaagtggaaagagaggcatgcattgcaagccctggcattaattgaagcgggagcggatgtgaatgcaaagaacagatggggtagcacgggcacttatttggaccgcattttatggtaatcctggtgtctttaatgcgtttctgactaaagagtgcgttgatgtgaacgtacaaaatagattcggcgctaatgcacttatgatagctgtggctcatgatcgcattgacgctgctaaattattgctagaggtagaagagcttaatattaacttgcaggatgaggcggcgagaacggtgctagatataacaagggaggaagcaagcaatgatattgtttaacttattgagcgtaagatcgtagagctcgaagcaaaaaagatgtcggattatgactctgagcttcgagcggacttagcgtcctttaatctaaagtaataaggctgtataaataatgaaagccgttgatgagcagaaaagcaaagagttgattaaattaatgagtgcagttagtccacgggagtgggaaagaaagcactcaaaacaggctttagaacttattgaatccggtgccgatgtgaatgcacaagatgaagatggctcgactgcgttaatgcttgcggtaatgtatggtcatgcgccgattttacaagcattacttgaagcgggctcagatattaatgcacaagacaaatggggtaagacgtcgatcatgagggtggcagaatatgatcgtacagatatcgttgaattgttacttgaagccggtgcggatgtgggtttaaaggataataatggctatacggcgttagaattagctaaagaagcaaggtatgattgccttgtccagttaattaatcagaagattgcagagctcgaagcaaagacgatgttggattatacctctgatcttcgaacggatttaacgccttctatcttaagtcaataagggtttatcatgacctctattttacaacaaagagcgccctctgtaaacatgtctgcttcgtagatcgcaaattcatccccgcgcgcattgcgcgaggctttctttgctattcatggtaaaactgaagcttatggtcgagcctcacttaaggccgaactaagaggttatgagttggaggcttcatttaacattctattaaggcaagatgacgtttttgagtatctcgtggatgctctgagtgacctgtcatttaacataggctctgtgtcagcagattatgatgatcttgatccttttttgagttttcaagtgtatgatgctgatcttagtattggggaaatgttagggcttggaagtattgttaactgggaaacctcaagccagttaagggatagcctggacgctttgatttttgacaagctaaaagcgtccgaggctaaatctctggattcttacagggacgagctgacagaagacttaatcttattctcggtcaattcctctccaatctcatggcgataatttttcaatctaagtgactcgatctcttctatttttttcatcaggtctgcatgctcgaacgtattgaatacggtataaggcctaattttaatatcaaactgctcaattactagatgatctttaccaatgcttgattttaaagtctgatacaagtcattttcatcaagatggtattgcgataaggtttgtcctttgtagctgctttttgattcgtaaatcttaaacattaaatcttcattgtatcccaggtattcaaattcgaaatcttggccattctcatcttttaagaaatcagaatttcgtacggtttcataaatagccgctatctcgggctctccaccaaatatagcaatcaatgtctcaagtcttttcttttctagatcacaaaggagcgcttctgattcaatttcattgtcaatgaattcttgaatatggataatttcttcaggatcaacgttatattgtttggcgtatcgaagaatggttttattgacttctaccggactaggtttgtcctggtttaaatcggcagcctcaatgtctttaatgattttcccattagtaacaacaagggtgccgttctcaaacgggacgatacaaagtgtgtttttttgattcatttcaattagccttttgtgttgtatattgttaattatatcatgttggtttagttaatttccgtagggtttacgaagggtttgaactattgagagtggtataaagatatcgacttaagcttaacagacaatacaggtcgagcagcgctagatatggcttattttaaaaggtcatccgagcctgctgaacttattcaaaaggaattactgagacgcgaggctcaggagatttctgagtatcgagattctgtattggaggaggagaggtgggcttggggtcacgttttgtgacttcaagatagtattttcatgctgtttatgccaaaaagaagctaagctgatcgtatttcttgtaaatcatataattactctctaagagctaaatgttgatgtctattggggttttcgctttgatcagttaccaaatacgtgtgtagagtataaagaaaaagcgcttttctacacgacacggcaagcactccatttgtcatttgatagtctatttctataatctttttttgctcactgtttaattgtggattagggattaggaagaaagttttatatgtattccagtcgttatcgttttcaatatgactaagcgagtttttaattttaactacagatacgcctccttgtatgcgaggtaagttgaaatctttaaatgtagccgatgattcctcccatcctctaatatgccagcgaaatccggagctaatcaagctatgcgggtaaattatccgactgcttggctcgggtgtgtttaatgacaaatagtcgaactcaatagccaattcatttttaatggctttttgaatggcgcggaacttatccatatccatgcccgaatttactgtttccagttgatggctaaagtctgggtgacctacaatgttcaggtagtcagaaaagcgatatttgtttttagttcgataatcttcacttggcacatatccaagactgcgtgggtgataaatgatttgccccggcttcttttcagatatgagggaaaaaattttcgtagccgtagattcttttatatcaaatcgatcaatgaggtctttgcgcgtaacacgcccctcaaagaaagccttatgtaaggcaaaatcaatgtaatctttgttatccataactggcttatttccttgcttacgctatctcactacttattaattatatagggtacaaggcctaaaaagtcacttatatttcaatacctgttgatttttaacacctattgtattttaatgggatgtataggtaaattattttatatatggggatggtggtgagtcattttttaactgtatcccgatacgatattctcacctttagcgggtgagaacgggtgattctacttggatttgattgttagcatgcattcaaaataaaaagcccgctcaaagcgggttttgggttaggaacatttaagtccttattgcagtaacggctctcaccccggaatacgacaataactatattgttacacaggtatatggttattacaattgttttttattttataaggatcataacatgaaataccgcttaggtttagatattggcgtagcatctgtcggtgcggcgcttttaactgatgatagaatccttgcgcttcatgtgcgcacgtttgaaaaagctgaaacggccaaagaaggcgaatcactcaataaaatccgtcgagaagcgcgtttaacccgtcgtcgtattcgtcgtcgtgctttccgtttaacgcgtttaagacgtgctttgcatcaagccaatctaattgacaccccggatgtggaatccctcaatattgtcggcatttcgccttgggatttgcgtgctaaagccttaagtcaaaaacttgcgccgcaagaactggcagcggccttgtatcacatcgttaaacaccgtggttttcagtcaaatcgtaaaagtgaagccaaagaagatgagaaagccggacaaatgctcagtggtgtggctaaaaacaaagcactgttagagcagaaaaactatcaaacgattggcgaaatggtcgctaaagatgaaaattttcaacaggccaaacgcaataaaggcggggattatggtcacacatttgcccgtcaagatttagttaatgaagttgaaaaactctttgcagcacaacaaaatttagccaattcttacgccactgatgatctaaaaaacaaagtcattgaactgcttttagcccgaaaaccggctttgagtggtgaagccttattaaaaatggtgggcaagtgtacgtttgaaaccacagagtatcgggctcccaaagcctgctataccgtagagcgttttgtttggcttaccaaactcaacaacttgcgtttattgtcaaatggtggctcgcgcgccttaaccgaagaagaacgtcaaacgcttattgagctaccgtttaaccaagccaaactcacctataaacaagtccgtaaaaagttagatttagcggatgacattaaatttaacggactgagttattacagtaaaaacggcaaagacccggaagaaacaaacctgtttgaagccaaatattttaaccaactcaaaaaagcctataaagaagccggacttgaaagccaatggctacaagacagccaagatgcacacaaactcgatcatttaacctatgcccaaaccgtgtttaaagacgataaagaaagccaggcctggttgcttgccaaaggaattgaacaaccggtgatagacgcggtattaaacatgtcctttagtgaatttattcggttatcgctcaaagcgctcaataacattttgccgtttatggagcaaggtcagcgttatgatcaagcagtggtttcagccggttatcagcatcatagtgatttaacaacagcgcaaaaaactaactttttaccaccgctggataaagacgattttaccaatccggtggtttaccgggcgattaaccaaacacgtaaattggtgaatgcgattgttaaacaatacggtgcgcctatgtcggtacatattgaattagcgcgtgatctaaataagtcatttaaagaacgcaaagatattgaacgtgagcaaaaagaaaatgaagccaatcgtaatcaagaattagcccaatttatcgagttgtctggcaagcagccaaatggtcatgagttggccaaaatgcgcttatatcgtgagcaagatggacggtgtgcttattctcaagagcggattgaattagagcgcttatgcgaaattggttatgtcgaaatcgaccatgcattgccctattcgcgcagttttgataatagttttggcaataaggtattggttcataccgccgaaaaccgtaacaaaggcaatcgcacgccgtatgaatatttgggtggaaaagacaacaaccaggcctggttgcaatttgaggcttgggttaaatccaccattaaaaacttccgtaaacagcaaaaactcctgcgcaaagattttgacgaaaaacaagccgcagagttccgtgatcgcaatttaaacgacactcgttatgccggacgggtgatgaaaaacctgatcgaaacccatcttcagttgcacgacgaatcaacagcacaaaaatgtgtggtggtatccggccaacttaccgcctttttacgtgggcgctggggtctaaataaagtgcgcgccgatggtgataaacatcacgcattggatgccgctgttgtagcggcctgttcgcatagcatggtcaagcggttatccgactacgcgcgcaaacaagaattagaggcggtcaagcgagactttgttgatccgcaaaccggcgaggtattggatataaacgccttgcgtcaattagaagcccaatttccaacaccttggccgcatttccgtaaagaacttttagcgcgtttatccgatgatccgcaagccgagttagcgaacatttcagaaatggatgccgaatggataacgcaaattcaacccctacgggtatcacggatgccaacgcgccgcagtttgggcgcagcgcatcaagaaaccgtgcgttcggcgaaacagcttgatcaaaatttaagcagtgttaaaacaccgttatcgaaaatcaaacttaaagacttagaacgtattcagggttatgaagacctgcgcaatcaaaccctgattgaggccttgcgcaaacgacttaacacctttagcgataaccctgaaaaagcgtttgctgaacctttttataaacccggcaaagccaatgggtttaatgcagatatttcaaagttagccgattatgccggtcaaccggcgcaccaagtaaaaactttaccgttgctagacacccaaaaaagcggtatgcctttgcgtggtggggtggtgaataacggcgatatgttacgcattgatttattcaccaaaggcggcaaatattttgtggtgccgatttatgtcgccgacgtggttaaggctgaattgccgaatcgagccgtggtcgctggcaagctggaaaatgaatggacagtgatggatgaaaactatgcgtttttatttagcctatatccaaatgattggcttaaagtcagttttaaatccaagccgacaattgagggttattatgccgggctggatcgttcaactggcgccatacatttatgggcgcacgaccggaatcaagccgtcggtaaagacggtttaatccgcagtattggtgttaaatcagcagatagcttgcaaaaataccatattaatattttaggccgcgcttatctcgcgcaacccgaagtgcgtcaatcgctgattaagcctaaaaccaaagaggcttaaatcatgggctggcgcagtgttttgattagtcaaccagcgcatttaagttataaaaacctagccttgcaaattaaacaagaccaaggccaggcacaagtgatgttggaggacattgccgcgattgtgttagacaatctgcaaattaccctcagtgcacagcttttatcggcctgcgcccaatgtaatatcgcggtgattactgtggacgatacccatttacccaatggggtattacatggatttttaccgcattcgcgcgccttaaaagtcatgcaggcgcagcttggaatgagccgcccacaacaaaaacgcttgtggcaaacactgattcaacaaaaaatcattaaccaagccagtgcattaaccgcactaggtcaaacaaccgcttgtcatcaattatacactttcgcccggcaagttaaatccggtgacccagataattacgaggcgcaagcggcgcaattgtattttaaaaccctgtttggtaaagggtttcagcgccgtgatgaaagccttgtgaatgcggcattaaattatagctatagcctagtgcgctctgcgttagcgcgctccttagtcgcctatggttttttaccggcatttggtttacagcaccataatgagcaaaatgcgtttaatttagccgatgatttaatcgagccttatcgacctcatattgattattgggtgattcaagccttagcagacatcgatccgcaaaccagcgacttaaccaccgccataaaagcgcagttggtgaattttctgcatcaagatttaccgcgtatcgaaaacaatcaacctcaaggcaaaagcactttgctggcgttagttgaagccagtgtgattagtttaagtcaaacgattaaccaacaagccgaacaaccaccaggcctggttttgccgggagcaatcgaattatgagtcaactcacgaggcgatttatgcgactaatggtattttttgatttgccgaccatgagtaaggctgataaaaaagcctacaccaccttccgtaagtttttaattaaagatggttacgacatgattcatgtggtcggtttatggccgtattgtcaatggctttgatgatgcgcaaacccatctaaaacgtttaagtgccaatttacccaaagccggatcagttcgttgtttacagattagcgaaaaacaatttactggcatgaaattattgcttggcaccaaaacttatcaagaaaaaaaggttaatgccgaccaattattgttattttaacggcggatttttttcgataaaaaagcccccagctggcgctggagacgggttttaacgcgagatattgtagcattccggggtgagagagggaactacaaccgtcagacctgcataaaatcatccatttaaattgtagcattccggggtgagagagggaactacaaccctgattgaagaattcttcttaattacaatattgtagcattccggggtgagagagggaactacaacttctaagatcatgtgcagcctgtttttctgattgtagcattccggggtgagagagggaactacaacaagccgcttaaacgcggagcaaagccgaagattgtagcattccggggtgagagagggaactacaactgaaaatagctcggaagcgcgcgcgtgtggattgtagcattccggggtgagagagggaactacaactcgcatattttcaattcgcggcttttcttcattgtagcattccggggtgagagagggaactacaacgtcggccatgatgccccctttttcaaacgtattgtagcattccggggtgagagagaaagttatgaaaggtatcacaggttgtgataccaatgccccattatagcattgcggtgaaaggcaggtgttgtgggtacatgccgatcaagacataggtgttaagctgtactcgttatcttcaatttcgtcaatttcacaagggtatacattgtcatcagaatccctaacaaagatcaaccctttttcgtgatcaattttctcgattatcccactaaatgcgttttcatgagctgagtccttgtgtaatggatcagttacgtccacaatatctccaacatcaagattaatcattttttctaagcctcttgtttttattaagttatcataagattggagtttcattatacatcaatagatgctatttttgtagaatgttataatgtatgtaaggatgcaatgatttaagatgctgaagattaaattaggactcaatcatgcctgacaacagaatttcaatagaagataccggtctttcaggtatctcaagtaatatcgaagagcggcttttgggaaatatctcctctcttcctgaggctatcgtaatggcacttattgaagctgagcctaattgcattcgtcattttaaaaatccaagtaagcgacttcagatgctggccgtataccatgagcctcatacacttcgctattttgaggctccggatgaagatgtcatggaaaaggctgttatagctgacccacacgccataaagcatgtaaaaaatccatcagagtctttgcaactaaaggctgtccgggtggatgcttggtcgatattaaagatattaagaccgtctgataaagttattatcgatgctttggagggggaacccggcatcttatcctctttaagatctccgacgattactcactgtttgacatctctatattttggtcgtgaattttttgaaacaaattggctacctaatcatattgccgattcttttgcgaaagaattccagctatctagccttgatatgcaaaagctttattttggaacaaaatatgaaagtggtgaagagacttttgaaaaattaagtcattttttgaaaaaactccatgaatctcgaaatgtatatgactataagaccgatctcgaagaggaacttaataaaggcttggctagcaagaacccattccaccctgaggttctagaagaagattggcgttacgatggtttttaaaaaagggctttagaagcccttttttattgccttgtaagaacacttctcagccacaagccgtgaccggcctaaatatcattccaatccttttctttcttgatattgctctgcaatgcatgatgctacacgcaatacttcttttatatcaatatcctgcaactgttttttaataaagctcttgatatcttcatttggaaaattatagttttctgcatattcagcaatatctttatgtgttagattttgcattttaacaacaggcaggccttttccatccttttctacttcatagtttaaatgaattatgaatcttgagacgggtggtaatagtgaaagcttgaactcctttccagccagactctctcttaaggctttcaggttgtagaccagggcaggagaaactcgactatcgtttaccggaatatgctgttcgatgtagtaacctaggttagatctatctggagagaagtaaagattcaccccaagggttccggccacttttaatgcaaggttaaattcaacggtttccttgccattttcaagctctgagacaaactttcttgacactcccgccagtgtagcaagctctgattgggacatgcctaaagcttgcctttcttctctaacggcctcacctagttcgcctttctggtaaacattcaacataagaatcactccttttttcaatatttagctgactcaatgcaaatattagcatgtaaccgaacggtgtcaacaattatttattaatcatgtaaattaattgaatgatatatatcttgcagtccagtatcgaccatgataggatagaaatctagtgttgctatagatggagtctaagacttaaaatacccaaatataggtctttgttgatgtttacagcggtaaacaaaaacagaccagcactatctcaatgaaaaaaaacttgcattgcaatgttcgatgcgcatataatgaatttgaaattattaatattggaatttttaaaatgaaattgatgctagagattttgggagcggtggcaggtataactggagcgattctcatgttgattgaccccaccgtgttcgcaggtatttctttttcagtttggttggttagttcggttgccttagctgttttggccgtactgatcaagatgtactggcttcttgctcttcagcttactttttcagtaattaatgggctaggtactattaagtttttgctttagaaagaatttaaacgaagcttaagtgggacttttaccaaaatccgccgtaaagcccctgaattttattcatggggatataaggctaaaaacagctttatcctttaaagggaaataacgaaattaaaaaacaaggatcggtctgtgattaaaacgctctccgtgcgcgtgcgtgacaagcatgcaaaacggttaaaccaaatggcttttgaggtcaatcaagtatggaacgccgttaacgccttcacatctgatatgaccgctatccccgtgcccggtgtgggctacgtgtactgccgttggtcagcgtttgatttgcaaaaacagtttaaatctatccgtaaagcgcgtgacttaaatgccacccattctacaacggtgcaagaagttatcgcggagcatgctaaagcgcgtaaacaacataagcgtagcaagttgcgctggcgcgtaagttccggctcaaagcgtagtttaggttgggtgccgtttaaagccggttcagctaaatggaaaaacggtcaggtgtatttcaacgggcattatttcaaagtatgggatagctacggcttaagccagtacgagtttcgtgctggtgagttctcacaagatgcccgtgggcgttggtatctcaatgtagcagttaaggtcgatgaaaaaccaaggtaccaccctgacggtgttaaggcggtaggtattgatttgggcttaaaggatgtagccacttgctctaatggcgaaaaactgcaagccaaacggttctaccgcgaattggagaaaaaactggcggttgcacaacgcgccaacaacaagcgtcaagtgaaaaccattcatgcaaagattaaaaaccgaagaaaggattttcttcataaattcagtaccaaactcactaaggataatggtgcaatatttgtcggtgatgttagcagtcaaaagcttgtaaaaactaaaatggcgaaatccgttttagacgcaggttggggaatgctaaagactcaacttcagtataaagcgatagcgcagggagtttggtttgaagttattgatgaaaggtataccacccaagtttgttcgtgttgcggaagcatttccgacaacagtccgaaaggtagaacaggccttggaataagagaatgggtttgcgtggagtgcggtacacaccacgatagagacattaactctgcaaagaacattcttgcgcttgggcacaagcgtctcgcaggaggagtcccctgtctttagacatggggagggtgtcaaaaggctgtgtagaagatggcgaagcaagaagaaactagaaagtggaactggaaaacggattggtgcaaagagcgcaaattaaatcctttcactttagaaaatcgagagctggccgagaaggcttggattgagagagcgaaggcagataatcgagagcgcggaataaaggtttctagcagatccgctatatccacctcttagttattaaaaaaatgtaagtgaaggatgttgaaaatgttaattgatattgaaaacccagatcagatattgagccatttcctgcttgaagataagcaggcatgcgaagccgttttggaaactgaagagtggcagagtagcagaaagattattcctactgtcttctttaatggcgtagaggtggaggctgaatttcttgaggacgctcttaaaaatcttcttgatcaagtcaaggatagctacgctaagaagtacgatgttaagaatattgacaatatggtagaggagcgagcggagtcgctacttagagagcatgctggcgatgccttgaatgtcataagagatttacagagcaagcttgagaatacggatgacatgctaacgccttactgggaaagagggtaatttagccaggatatcctgttgtttaaataattttaacgaggtacttaatatgatatatcaatccactccaaaactagctggacaggtcgcacactggatgcaggaatgcgataccggccgatcgtcaatgttcatggcttgcatagcattgggttatgaaatgagtagttcaaaaaaacaccatagccacccccgtgatgcaagtgactttggacggtgtattggtttagttgaaagagtaccggatgttaaaagtgcttttagcattatttgtgaagcctcaaaggaatggcggggcattattgatcactggacagagttagttgaacttcatcgtgttcgtaaagatggtcaatctgacgaagtctttggtagtcaatttaatcgtcgatttaaagaggttattgatcctgagggtcataatcaaataatagaacgtcatgaacagtcgaagaaagcattacttcaaaagcttaaggctgaagaaagtcgtccaactcacagcaagctcggcgtgccttacgcaccaagcccaaaacacgacaaggttattcatgaagccgcattaagatatgcttgccccgacctccaggctcgcctagaagcttacataggaagtgatgaagctgaatcggtaagaggtgaaatatttgatacatgcatgcagcagcaagctgatacaaatatgcctggtagttactggtttaaggagttaggttttgatatttcagatcattcggcgccagagattcttgaagcctttaatggttttgctgatacatatagttgccaagttgatcgattgatatttgactgggttaatgaaaacaatataaagcctagtttatctattggccaggccgttaattttaagcacggctttgacagtctttctggcgtaattcatgaaatacagaacaaaaaatactcacccatgtcatatcttataaaggttgaggggaaaaagggaatgccgatcattcgttgggatgacgatagtattgaggtgattgagaatgaaaagcaatagattttacctcgcctgtctgcgcgacacagtcgggacaaacgtgacctttcattgtactaatggcatgggctatcacactgacatcgccaaagcgcaccaatacacactggaagaggcgcagcatgaatgggaaacgggacgcgatttcgacctacccttgtgtgcagataaaattgatgccttgagtaaataccacgttgatagccagttgttgccggtggagaccacgattatagacggctgtgctgcttatgttgcattccaagctaaacggtgggatggcaatgacgtgtactggctacaagataatgggttgccgacaactgattttagtaaagcaaaagtacacagtttgattggtgatcaacaaggcctggtgtggctaccattttctgatgcggacaaagtaaagcgtaaggttttctgcgttaatgatatcgatcgcaggcgcatgataacggttgccggattaattactccagatcatgttaagcgcgctaagaggcgtaaatcaaccggcaaggttcgatggaattgccctgaatgcggaaaactaaactggcagctgaacccgtatgattttgaggggtgctcggatgtttgttgctcagaacacagggcttagtggtctaaaggattaaacatgatttatttaaattgcatgtgctgcaaacaagttgataacggttttggtggtggtgtgactgttgaaaggcttaaatccgtgaaggttgatgcaattcgattaagtgattttcgcagtcacaaatatgaagggagattagtcaatcagtcagactcgccatgcacatggagcgacggaacaacaatatgggttggatttagaaagaaagataatcctggagtcaatctacctgttttacagggcgatagtattgtaaatgtttaacaggtctgaaggtccaaagggttggaaatgtgtgaacttaagccgctagaaattggcgggaaatataactttatagatcagaatgagcgccttgtttatcttggcaaagaaggttcgtggaatcagtttgcattagtggagaagccgttcgagatttgggctgaggtgctggatactgatttatatatgattgaagaatcaaagtaattaggcttcttggtgcctaaaggaattaataaatgaagttttgcatgaatggatggcgaggtaagcgcggatagatcaaatgaggctgtcaatgaattgttgaacacaaagccaggcctggtgcttgcaaataattcgtttgaaaaatatggttgtacctatgcggccgtgcatgtggcattattttatccgttacgggttcaggtaggtcgcgcagatgtagtattgaaaagccctaaagtgacggggtatcgcgagatagttattggtaacagtaaccagaatgatgggggtaaattatgattgacggttcctttgttttcttgaatctgaccctggtatgtattggactgataatgatcgctcgttttcttaaaggtaaaggcggtcttgatatcgggcttgcttttattttcttgtctaccttgatgtctggtatcgaactcgccgcacattcggataacccttgggaatttattttttacagtacgagctttgaggagttttttaatatatttcttgaagctgtggtttatgcgggatttgtgttcctttttattctatttctaacgactcagttaataaagataaccaaacccaatagtttagacagtgaggattaaaattcttgttatccttggcaatgataaatgacccagatctagcctatagaggtgcaagtgaaaacttattctgggcattttgtgcttcagtaatgattcgacacttgaacgtccacctgtctttaaagagttggaagattttagggagtatggcaaggcggcggaacgtgaagaagttgaaaaccgcgtgaaaagtattatctcgtagacatgaggagaatataagcatcagggaaggggtaagttgtgaccgataaagatgcttggctagaaaggcttgagaacgttaatgaatttatcaagtttattcagagcatgcggggctacttattgttgaagaatccttagttattaaaggtcgaggtcgtcgaaaatccattgaccttcaggttaaagaagttaggccttgcgttataaataaagtatgcgtaaagctttcagataaggaagttcttaaagtggcgcacttggggtgcatgaggatcgtttctcttaaagagaaggttcatttagcaagaactgcctaatctttataagggatagataatgcctacaagtttaatattagatggccaggtcttggattggcactttaaaaagaatggtttagatgggtttatccataacttttatacgggcgacctttttcaaggtcaaatctttgatatgggaaagagctggagtgcttcgcctggctctaacacaccggctgagcgcagaatgctcttggatggatttagaactcgtgctgatgcctccagatatatcttagaagcaagatatcatcatgcaaaaaagttagaagaatatcgcctttcccgtgaaggggttcaagcgagtttaaaagacagtattaaatcggagtgaaataggacttggtatgaaatcagttgcagaactgcaaagtcagttggaaaattcagaaagtggcattactcgatttgagatattgaaaatcatggcctctcgagctgtcgatcttgagagagaaaatgccacactaaaggatagtagtatatcaaaagatagaatcgctgagattcttgaagaatctgaaagttatgagaagcttaaatatgagcttttcctgcttttttcagatagtttttgatgtatttttctaatgcatcatccagtaaaaaacaacttgattaaaacataggaagtttgacg

SEQ ID NO: 2887 - DNA, 23207 bp, synthetic construct
  misc_feature 1..23207: note = Synthetic
  source 1..23207: mol_type = other DNA
cgcctttgttcgggtgcgccgttccggtccgccactatactgacttgccatgatttcccgacccttgttatctctattgcgctcaaagatggcttaagataaacaccatttaagagaacaggcaagtatctctattctattgaaaattcttatagaatcctccagtacgaccggcctgttccagaacgacgtaaaaaaaggggtccaaggtgagtaaaaaacggctgttcagactgctgcttgtgctgacactaattccgctgcaaagcgctgccctggagtatcccaatcgctacaacagcatggcagaaaccctgttcgacatgatggacgccttctctaacgcctaccagagaagactgcacgagcggtcgcgggattactctggcttccagggcggctatccaccatacccgcctcccggttacggtcagcccctgccgccggcaaaccggtcgatactggaaggcagctggcagggtgagagtggcgaggtactggtgatccgcaacgggctgttcaggatctatctggatcgggacaatttccgcgagggacgcctgaagcaggtacaaccccaggtgatcctgcttcaggatctgcaaagtggtcagctgcgcacctacgcattcgccgaatccgaaggacgcctgctgttgcaggatccgaccggtaatctgctgcgttatctccgcatcggctggtaagtggcttccgcctccgccgcctcaagcagttgttgcaggcgcgcctcccgttccgccagcgggagctcacccagcgcccgactggcggtatagaacgcaggcagatccccgccgttctgtttcagcaattgcctgaacgccggcacccgggcctcgtaggtggcgatggaagccaggtgtgcgttgttcagcttctgttcaaaccagccatcaaaaccggcatatccctgccactgctgcttcagcccggcatagcgatcccggagctgctgaaacagcatcgccttgcgccgggccatctgtttccgatccagtggctgctggtagagcgctgctaacgccccccttgtctccagcaacagatcgacaaactggcgctcccggcgctgcgattcccgccagcgggaaagatcctggccgggctgatcctgtaaccagcgcgtcaccccttcctgctccaccagactggcgaatgcctcgttgaacgcgctgtcatcttttacatagagctgctggtgcgccagctcgtggaaaatcagaccggcgattctggcctcgggccagttgatcacggtactgggcagcggatcatcaaaccagcccagggtcgaataggccggtaccggcaacagcgccacatccatacccgtggcctgcagttcatccgccacctgctgcgcacggctccgggagaagtaaccgcggtagctggtacaaccgacaaacaggtggcaccactgcttcggttccatcgaataggcgggcgtcgctaccacactccagaccaccgcctcccgctccagtgccgcataactgcgatagctgtcattatcgggtagccccagttggctggttgcaaaggtgcgcatcgcctcgatctgttgtagcttctgtttcaatcccggtggcgtttgcggatcccgcaccagttgcgcaatcggttgccgctgccccatcaactgcagatgaccactgaccgactggctataatagcccaggctgctgcagccctgaagaagagccagcagaaggagcagcagcaggccgagtggtcgaaaaggagcccggccaatcatcggaacaagagaggtttcagcatagtcacatggatgattctaacagcttcagcagtcacacctacctggttggcggcgccgtgcgtgatcaactgctcgggctaccgatcagcgaccgggactggctggtcaccggcgtcaccgccgagcagctggcggcccggggctttcaccaggtgggcagggatttcccggtatttctccatccccggagcaaggaggagtacgccctgccccggggtgacatccacggcaaaaccgagcaggaacaggtgtgtgatgacctgatgcagcgggatctgaccatcaacgccatcgcccgcgcgccggacggccactatattgatccgttgaacggccagcaggacctgcaggcacgccgcctgcgtcacacgcccactttccgacaggacccgatccgggtcctgcggctggcgcggctcgccgcccggctgcatccactggggttccgggtggcgcaacagacccggcaactggtggctcagatgatccgccagggcgaactggatcaactggtgccggagcgggtctgggccgagatcctgcgcgccctgcaggacagggatccggtggtttttttccagaccctgcatgagctgggtgcacttcgggtgatcctccctgagctggatcgcctgttcggcgtcccgcaaccggaacggcaccacccggagattgataccggcctgcactgcctgatggttctgcgccaggcatgcgcactcagcacagagccggagacccggctggccgccctgctgcatgacctggggaaaggcaccacgcgcccggcggagtggcccagtcaccacggccatgaacagcgcggcgcaaaactggtggaacagctgtgcgaccggctacggattcccaaccgtttccgtgacctgagccggcgggtggcggaattccatacccacagccatcgggccttcgatctgaagccgtccacactgctgcgtaccctgctgaagatcgacggactgcgccggcccgagcaactggagcagtttctgatcgcctgtgaagccgatgcacgggggcgcaagggttttgaacagcaaccttacccccaggccgactggttcagggcggcacgtaacgctgccgcagccgtcgataccggggcgctggcggcttcagcaaccgacccgcaggtaattccggagctgatttttcaggccaggagtcgcgccatcggccaagccagaaaggagtggcagacacaacaggaaggggtaattaagtgaagcagtactcaatttcccccattcacggacgatacccccaagcaagggggtaacctctttccgagcagatgactggccagatcgccaggcgtcagaccagttccgacaggaccagtaatgaaccatagcctgcagatcaaagtccccggctatcgtatcgagcgtattctcggcaggggtggtatggcgaccgtctacctggccacccagatgtcgcttggcagaccggtggccctgaaggtcctgcatgatccggacactccacagttttttgagcgttttttcaacgaaggacgctatatcgcccggctgaaccacagcaacctgatcgccattttcgacatcggacagggtgacggcttctactatatcgccatggagtacctgccaggcggtgacctgaaagcccgcataatgcagggactgaaaccgtcccaggcactgaagatattgagccggctggccagttgccttgcctatgtgcatggggagggtgtgatacaccgggatatcaaaccgtccaacatcctgttccgcaacgacggcactccggtgctgaccgattttggcatcgccaagctgatccagaccgacaatgatctcaccgtcaccggcaccgtgatgggcagcccgcactatctcagccctgagctggcccagggcatccgccgggtggatggccgttccgatctctacagcctgggcattatcctttacgagatgcttaccggtcggaaaccctataccgcagacagttttgccgccaccctgatggcccatattcagcacccgattccgaaactgccggagcagttcgccgaactgcaaccactactggagaagttgctggccaagaagccggaagatcgcttccagaacggcgtcgaactgctgatgaatctgcaggctgtgcgcagtcggttaaaggcggaaaaagccaactctgccgaaccggcgcagccccggacaccatccccccagactacccggcgccgccggttgaacggactggcctatggcggcctggccggactgaccctgctggccggactgggactggtgctgggccagcgcaccgctgagacaccggcagcccccccggaaaccgtgctggaagtgcctgccacagctatgcaaccggtcgcggtggtagcccccgccgacatccaggcagagcctcccgactcaggggaatccccgaccgaaagcgaggaacaggcagagcagctatcggagctggcgaccccggtagaacctgaaccgcagccggaacctgaaccgcagccggtcgatcctgagatcaaacagttactggagaaggccgggcaacggctggcatcggatcgtctcagctatcccgaggggaacagtgcccgtttctactacaatgcggtgctgaaaaaggacccggacaacgctgaggcgcgccgggggatggtgaaaattgccaaccgttatgccgatctggcccaggccaatattaaccggggacgcaccctggcagcccggcgtcaaatctcccagggactctcggtacagccccggcacgaacggctgatcagaatgctcaaccagctcaaccgtccgacccccacccgttccatcgagaccatcttcgaccggttaaatccgcagaatcaacgttagccgggaatcggaagtcaggcaaactggccggcggtatagccggaagaccaggcccattggaaattgaacccacccagatgcccggtcacatccaccacttcaccgataaagaagagcccgggctggtgtctgcacgccatggtttttgaagagagctcatcggtatccacaccccccagggtcacctccgccgtccggtaaccttcagtaccggccggtttcagtttccagccgttcaactgctcaccgatctgacccagcacccgatccgggatctccgccataggtcgttcctcccactcaggccactccaaacggatccattctattaccagttttttggccagccgctttgccagcagatttttcagcaatcccctgggatgggcctttttcagctccagcaaccagtgatcagccgtcagatcggggagcagatccagccttatcggctcccctgcctgccagtagttggagagttgcagggcaaccgggccactcaggccccggtgggtgaacagcagctgctcggtaaaggagcgatcagcagtgctcatgctcaccggcagggagatcccggccaggcgttcggtcaagaccttcatacggtcactgaaagtgaacggcaccaggccggcccgctgcggcaacacattcagaccgaactggcgggcaatggcataaccgaacccactcgatcccatggtgggaatggagagtccaccggtcgccaccaccagggatggagaacagaactcaccctcactggtggtcaggtggtactgctcatcgtaactgatcgagagcacctcgcaaccggcacgcagggtaacaccggcctggttacactccgccagcagcatgttgagaatctgccgggaagagtcgtcacaaaacagctggccatgatcccgttcgtgataggcgatcccgtaccgctccaccagggctatgaaatcccactgggtgtaacggctgagtgccgacttgcagaaatggggattgtggcagacgtagttatccggccccacatagagattggtgaagttgcagcgcccgccaccggacatgagtatcttcttgcccactttgcggctgttgtccagcagcagcacatcacggccccgttgcgccgccgtggccgcgcacatcaggccggcggcaccggctccgataattgttacatcgtattgcttcaccacgtcatcccggctggaaaagagctcaccactgactgtcagcggcggattatcgcatacaactgccgggcggcgagcgacgtgatttataccactattccggcggcaatggattacaatagtgggcagttttgttctctcgctaccaaggtgattccgttgttatccagtttcccactccatccccgactgctccagacgctcgacgacctgggactgaaccaggccaccccgatccagcagcaggcgataccggtggcactggaacggcaggatctgatcgccagcgccgaaaccggcagcggcaagaccttcgccttcctgctgccgaccctgcaccatctgctgaacacctcggcaccggagagtggcacccgggtgctcatactggtaccgacccgggaactgggtcaccagatcctcaagcagggccagaaactgatcaagggtacccgcctgcagatcggactgatcaccggcggagagtcattcaagtaccagcgcgccctgtttcgcaagaacccggagatgatagtggccacaccgggccgcttgctggagcatctggaacagggcacccccgatttccgcgacctggaggtactgatcctggatgaggcggaccgcatgctggacatgggattcagcgaggatgtgctcaacattaccagccaatgtaatccggcccgccagaccctgctgttctccgccaccctgagtcaccgcggtctgaaagcgatcaccgacacactgctgcgtgatccggtcagcatcagtctgaataccgtgcgcgaccggcatcagaacatcacccagcagatcatcccgtccgatgacaagctgcacaaacagcggcaactcgcctggctgctgctgcatgagacgtttgacaaggcgctggtgtttaccaacacccggctgcaggccgacgccctgggcccggaactgcgcaaacagggggtgcgggccggggttctccacggtgacatggggcaggatgagcgtaatcagatcatggccctgctgcgacagggaaccatcaaggtgctggtggccaccgacgtggccgcccggggcctggacatcaagggtgtggatctggttatcaacttcgatatggcccgcagcggcaaggattatgtgcaccggatcgggcgcaccggtcgggccggacaaccgggactggcgatctccctggtcagccatcaggagtggaacctgatgagcggtatcgagcgctacctgaagcatgagttcgaacggcgcctgatcaaggagattgccggaaagtaccggggcccgaaaagactcaagacatcgggcaaggccgccggcggcaaaaagaaaacggcaaccgacaagccggcaaagagcggcgccagaaaacccaagcagcggctgcgggatcggaaaaatatcggcaaacgccgtaaaccgagcagtaatcccggtgacagcagcccccgtgaagcgggccacaaacccctgacccgaaaaaagtagtcttgtccggatcagaccatcacgactcctcccccaccatgttcgacaagcagcagctcgtcaaactggccaagctgaagatgccgtttggcaagtaccagggaaccgccctgatcgacctgccggaggcctatctgatctggtttgccaatcggggctttccggaaggggagctggggcagctgatggccctcaccctggagatcaagatcaacggtctggagagcctgatagaaccactcaaacgtatccccaccgtgcactgaggaagtgcatcagacgatgtggagatgattctcccgcaacagctggttggtgagattgatatcgaacaattcaggggagaactcgccaccgatccagcgcaccatgtaatcatgctcgggatgggagcggtccacaatggcttccagaaactcgtcgtaaccgggcgggccacccacatcctcaggcgggcaggcccgcgcgccccccgagcaggtcggcaggcgctgggacaggtcgtagggcagtacctcctccagcacgacccggtgctcccaggcatcgccgaaatcatagatatagagcaggctgtcacctggctttttcagtacctggcgcaaacggacctgctgttcattatgggtatcatcgggaaactggtcgtccgggacgccgtacttctcctgccccttgataaacatgtgcatatgaatattggtccagcccatggcgacctgcagggtctcatgcagggaagcgagcgtatcactatcggcaacccgcacctgccgccacacctccggcaccactcccaggagactgatattcagttggtagaccttgcgtagataatccataatcgaagtgtagtttcttctcgccgcggctattcatagtaacaatccatcgacagagtaaaacccctacctgtaaaaatcatgacctcgctcaatagcacccggcgaaaggatcgccttactaccaccttgattataaggctgtttatctacgttgatgggtaacggacgcagactcaggaccttattcagccccccaataaggtgtgctgagcgcctcgcccaggtccgcctccaccaggcggcggcgcacttccagcaaacgctcgatcaactgcggctctttcgcttcataggcttcggcatcgggaacccgtctcaccaccacacccagtagctcggtaatggcattaccgatcgagttctggctgatggtgacgatcagacgaccactgtcatcccggtagagcagctgtttaaaggccggctgccagcggatggcattggcatacttggcatcctgtacacactggtcccgcactttcttggcaactctgagaaagtcgttgttatacagcagggtattctcgatctgctcagggaagtaagcgtccttgggaatcggcgcattacgcgtcgagacctgagtaaagaaggtgcggtaaaaatcgataaagcccatcagaatggcatcatactcgcgccagaagcggatgcttttcaggatctccacacccccctgcacctcccaactgggcaggccctggggatagccggtcaactcaagccggcagctgccatccgtgaccgggcggaggatatgcagatccagctgggagaaaaactcccggtagacatcattcatataggcctggaacaggctgtgctgaccgccatcagtcaggttcgggttgtccggatcggccatgggcgcctggcgcaactgccgtttgtcgaacacgatgaagtggttgtgcagcatgcggatgctgggcacgccgggcgaggtaaggggccaggtggcgtccaggctcgcctctcccgccaggatcagcgcctcgtccggatcggggtactgctccagcatgtaggcaatcaccacctggttcatccggttccagacatgcttcacccggtccggcacctgggtgcggcgcaccggccgccccagcggatcgagaatcaaattggaggtgttgtagatgatcgacgcatcaaattcgttactgtgacccagcgccttgcggtagagcagcaggttctccggattcaccagcaggccgttgttgtgcaccaagtcgttgaggttttcggtgctgttgaaaaattcgttcggcttcatcccctccggtacttccagcggaatggggcggaacggggtttcgatctcgcgcggacctgactgcataacctgaacctcagatgcaatattctatttatacctatataagttattgaaataattaactatttatagagtctagacacatcatagaggaactaaagagataagcaagtagccaggggaaaagacggaacaaacagaggatggcttaaggagtattaaaatcgcaacctggactaggcgttttaatcttaattgaagtttagtactctcattaatgaaccagcccaccggacgataaagggctatggaaaacacactaatttccagaatataaaaacccgacatgcaagcagcagaggtcgggtcgggttcggttctatttaaagaccttattgtagtaacggctctcaccccggataaccacaacgccataaagaatacacaataataagccgagaaggaagaccatgcctaaatccgccaagccacaacaagcctataccctcggtctcgatattggaattgcatccgttggagccgccctgttagggcaacagcatattattgggctccatgtgcgcacatttgaccgggctgaaacagcaaaagagggcgagccactcaacaagatacgcagggatgctcgtctcaccagacggcggctgcaacggcgagcccatcgtctactgcgcttgcgtcggttattcaagcgccacaacctgattccggacaccgacacatccacttttatcagtggccagtccccctgggaactacgcgcccaagggctagatcgacaacttacatccgccgagtggaccacagttctataccatatcgtcaaacatcgcggcttccattcaaatcgaaaaagtgaggtgaaaactgacgaaaaagcgggccaaatgcttagcggagtcaaccagaaccaggcgttactgaaacagtcggggttacgcaccatgggtgagttagccgcccgtcatgaggctttcagagaggcaaagcggaacaaaaaaggtgcgtacaaccatactttctcgcgccacgatcttgaagatgagcttcacttacttttttcccgtcaacgggaactcggcaacccctatgccacaccggaactggaagatgctgttcacacgctgttgatgcagagacgccccgcactatcgggaacaaacctgttaaaaatggtggggcattgtactttagaaccggatgagttcagggctccaaaggcaagttacactgcagaacgttttatctggctgacgaaactgaacaacttacgcgtaagcggatcgggggaaacacgccccctgaacgaatccgaacgccaggcactcctatcaaagccatttagccagagtaaactgacctacaagcaggttcgtaaaatcctggaacttcccgacaacatacgattcgtcggtctgcattatcaccccgcccaggacaatggaaaaagtccggaaaatagagtcttcttcgaggccaaagcattccacgcactgcgtaatgtctataaaaaagcggggttaaatctggagtggcagcgtgacagccagaacccggaaaaactggacaacattacctacgccttgactgtatttaaagaggataaagaggcaaaacagtggctcatcgagaaaggcgttgaggcctccgttatagaagctgtactgaatgagtcttttagtgaatttgtccgactatccatcaaggcattacgcaaaatcataccccatatggagatcggccaccggtatgacgaagcggtaaagctggcaggttattcccatcacagccacttaccacaaccaagcaaaacgccctatatcccccgctttagcaaacagtcaattgccaacccggtggtctccagggcccttaaccaagcgagaaaactggtcaatgctattgtccgggaatacggtccacctgacgcggtgcatattgagctggctcgcgatctgaacaaaccatttgacgaacgacgcaaaatagagaaagaccaggagaaatatcagaaagacaaggccagggacattgaaactttccaggaaaactttggctttaccccaaaaggtttacaacttaccaagtggcgcctttaccgcgaacagagtggaaaatgcgcatacagtctgaagccgttagacatcaatcgtctttttgaagatggctacgtagagattgatcacgcactgccctactcgcgtagttttaatgacggcatgaacaataaagtgttaacgctcactaccgagaaccgaaacaaaggaaaccagacaccctatgaatatctcgacggggcgagtaacagcgcacagtggcgaaattttgtggcatgggttaacagcaacaagagctatcgagcaagcaaacaacgtaacctgttgcgcaaagattttgctgcacaggctgctactgaattccgcgagcggcatcttaccgacacccgttacatcgcccgtgaattcaaacgcatggtcgaaacccacttaaagctgaacaaaccgaatcagcgttgcgttgtagtatcaggccagttaactgcctatctacgtgctcgatggggcttgatcaaagttcgtgaaaatggcgatctacaccatgcccttgatgcagctgttgtggcagcctgtagtcacgccatggtgaaacggctggcagactactcccgcagaggggaattacagtacgcacggggccatcattttgatccggaaactggggaaataatcgatataaacgcccttcgcaaactcgacgatcactttcctcaaccctggaccgactttcgccgtgaactgctggcctggttatcacctgacccggcccaacaactgaaaaacctcgcctactacacggatgagaggctgaaacaagtaaaaccgatacgggtctcacgagccccgactcggcgcgggcttggtgcagcacaccaagagaccatccgatctgcaaagtatcttggcgagaatagaagtaccgtcaagacacccttggaaaaactgaaactgaaagatatacccaacatcgtgggttatgaggatccgcgtaaccaccagctgatccaagccatttcacagcgtttaaccgaacatggtgatgatggcaaaaaagctttcaaggaaccgctgtataaacccggtaataataaatccaccgcacctgtagtccgcagtgtcaaactattcacagtacaaaaaagtggcattccggttcgcggcgggattgccaataacggcaatatggtgcgagtcgatatttttactaaaaaagagcggtattttgccgtacctgtttacgtctcagacgcggcaagaaatgaactaccaaataaggccgttgcacggggaaaagatggatggatagatattgatgatagtttcagctttttattcagtctctatcccaacgactgggtatcggtggtagttaaaccacacgaggcgccatgcgaaggttattatgccggcctcgatatatccaccggcgccatccatatttgggcgcatgatcgcaaccgttcggttggcaaaaacggcctgatgcgcagtatcgggataaaaaccgcccacagtgtggagaaatatcacgtggacttactaggtaacttgtaccgggtagtccacgaaacccggaaacctttacgggccggaaagtagcagaatggcctggcgaagcgtgatgatcagccgcccatcctaccttaagctcaggcatggggcgttgaaggtggtgcaggatgatggtgaggtcagcatcccgctggaagatattgcggttcttcttatcgattgcccacaaatcaccctgagtgcgcaactgctctcggcatgcgctgaaaggcagatcgccgtcataaccgtcggcttaaaccaccacccaaatggggttttaattccctatctgccacacagtcgcgcactgaaggccatgaagatgcaactggccatgagtttgccccaacggaaacagttgtggcgttcaattgtaaagcaaaagatcaggaaccaggcattggtcctacaacacatgggcaggaccaaggaagggagcaagctgctcgcgctgataaaggaagtcaagtcgggtgacagtggcaatgccgaggcgcaggcaagccagctctattttccggcgttatttggcggtggttttacgcgaaaacagattcgctttcacaacgcggctctcaactacggctacgccataatccgcgcggcactggcacgtaacctggtttgctacggcttcattgccgcttttggtctgcatcatcgcaacgagcaaaatagttttaacctggccgatgaccttatagagccctttcgtccattacttgatgcctacctgctcaagcatttcccccatgaagaggatgaccagctgttaccgagtcacaaatcgacccttgtcaacatactgaaccaggacatacccatgattgatgtggacggagtaatgacgcgaagtaccgtgcttaacgccactgagagcatggtggtcagtctaacccaacgactccatgatggcggccacaagctccacctcccgctattcgaatcgacacagatgtagatccccatgagccaagagacccgaagatttatgcgactactggtattcttcgacctccccactattacccgtgaagacaagcgggcctataccctgttccgtcgtttcctccttaaagacggatacgacatgattcaatggtcggtttacggcagggtaataaatggcttcgacaatatggaaacccacttgaaaaggctctccgccaacctgccaccagagggctccgtgcggtgtttgcaggtaagtgaaaagcagtttgtacagatgaaactgctggtaggcgaacccaaaaagcaagaaaaaactgtctcatcagcccaattggtcttgctctaaacgcaaaaaaatcaccctggaaccccctgttctccagtactggcgggggttccagggcagggtattgtagtcatccggggtgagagagggaactacaactggatcgcgagaagcagttaagcgctgtttattgtagtcatccggggtgagagagggaactacaacacgatctcgacaccgggcagacgaacaacaattgtagtcatccggggtgagagagggaactacaacttggggacctggggtatttaacctagatcaattgtagtcatccggggtgagagagggaactacaactccattgggttctcctgtgtggattgagcgattgtagtcatccggggtgagagagggaactacaacagtccaggtgcattaagtaatctataccaaattgtagtcatccggggtgagagagggaactacaacgattagcctgagagaacgccaccaacgcatattgtagtcatccggggtgagagagggaactacaaccagccgctgcaccagggcgtcacgccgttcattgtagtcatccggggtgagagagggaactacaaccatgcccatccaggcatagtgcgcacacctattgtagtcatccggggtgagagagggaactacaactttattgcgcatcaggtagtcacagagcttattgtagtcatccggggtgagagagggaactacaactcctccggcaatcaccacctcttcatcagtattgtagtcatccggggtgagagagggaactacaacaattcagctcggcaatcggaccgtcggcgattgtagtcatccggggtgagagagggaactacaacgcggtacagcgccgccaacacatcccactcattgtagtcatccggggtgagagagggaactacaacttccattaccgatacgtttgaggcggtcatattgtagtcatccggggtgagagagggaactacaaccacaaacgtggtgtagccgtccaacggtgcattgtagtcatccggggtgagagagggaactacaactcggtggcatccggatccgggccagctttcattgtagtcatccggggtgagagagggaactacaactcgtgccaacgaccgaccggacgtatattaattgtagtcatccggggggagagagggaactacaacggatctctttctgtgggtcgcggtcgttgaattgtagtcatccggggtgagagagggaactacaactgatccgctggtggcgctgccagttggcgaattgtagtcatccggggtgagagagggaactacaactgtcttatactcactcgctaggtattttaaattgtagtcatccggggtgagagagggaactacaaccagggcatcgtcgtgattgacgaggccgcaattgtagtcatccggggtgagagagggaactacaacctgctggtctgtcacggccctctggctcctattgtagtcatccggggtgagagagggaactacaaccatgattgttgaagccatccactacgaggtattgtagtcatccggggtgagagagggaactacaacagtcagcgtcatgctggcctgtagcactggattgtagtcatccggggtgagagagggaactacaactcgacatcgacatccatgcccagagcaatgattgtagtcatccggggtgagagagggaactacaaccgaaatgcggcaggcgagctatcagcacgaattgtagtcatccggggtgagagagggaactacaaccttcggacggatgcgcagatcctcgacaccattgtagtcatccggggtgagagagggagctacaacaaatgcaggcacgcgaatctcgccccagctattgtagtcatccggggtgagagagggatcgccaccataaaaagcatttcacattagcgagctcgaaagccattcgtaaaaccaataaaaacctcttctaaatataacactccgggttcagtagttgacgttaatggcggtacagagataacccatcagggcatcggcgcagcgaaagtcctgcaacaccgaccggcacagatcggccgaatggatggcctccgccgggatcggcttgaaggcgatgaaatcctttcttttcagatcctcgatcagcgggtgatcggcagcatatccccggggtggccgcttcagggtgtcaccatccaggctgaactgcccggcaaaacccggcgactgcagggcctttttccaggccgccgggttgtcatccatgaagctgcggatctggttaagggtctttccatcgggacgccagatgccggccccgacaaagcaattttccggttcgatatgcaggtaaaagccgggggcgtgcacatccttgcccagctcatggcggaactggatgccgatattggttttgtaaggggtcttgtcccgggcgaagcgggtatcccgatagacccgcatcagcgagccccccaccttcttcggaatggcacggaaatggggcgagatctccgccagtccgggggccagagattctataaaagcgagcgccggctccctgaccagggcctcgtaacgggccttgttgtcatggaaccaggctttgttgttattcgccttcagttcgctgaggaaccgcagagtgtcctgggggaaaccgtcaaacggggccatcatcgtctcctggcgtgagttgtctgaaggggttctgggtaatccgggcaggcggtcgaaactaaccgtacatgggcgcgtcccggtgcccgttctataccgacagccagatcatcaccggcagggtcactaccgccatcaccacctgtacggtaatcaggttggccatcagcggtgcatccccccccatctgccgggccagtatatagcaactggatccggtcggtacggcagcggcgattaccgcgaccgttctcggcaccccgtcaataccaaacatccaggccccgagaaacatcagcagcggcatccccagcagccggatcgcgacaccgaaaccgaccaccaggcgatgatccagcaccaggccgaaatgcagtcctgcacccactgtgagcagccccagccccagggcaccaccccccagaatatccagcagggagaagagctgggcgggcaacccgataccggtgagattgagggtcgcgccaatcacactgccgatgatgaaggggttcttcaacaatttgcgggtcacatcagccaggccactgctaccctcggcatagcgagccagcaccagcacgttgatgatgttcagggggggtatgatcaccgccatgataatcgccatataggccaccccctcgtcgccatagagcagacccacgatggacagggcgataaagccgtgccaacgggtcgctccctggaacaggctggtaaatgccgggccgtcgatacccagcaagcgccgcatcaacggttggaacagcagcaacagcaggctcatggcaagaatggagaacagcgccaggctggaaaacaggagcagctcaccggaagcgatcctggcgctggccagcgtcttgaccagcagcgccggaaacagcacgaaatagcagagattttccatgccgagccagctctcgtcgttaaacagggtggttcggcgcaacagcatgcccagcaggataatagccacaaccggcagcagcgcattgaatacatcgatcatctgacggggaggttcctcaaaaacggagcagccctgccacgcaaggcgggcgaagggataatgttaagccaaacaacgatcgctacgaaagcgccgctgccccaggccagccccctcccaccgggggccaatcagccggggcgaattcagatcggcataaagaccgccgaggcaaccgactggataatggtcttgatgcgtcgattggtactctgggcgatcacccgggccatgccgtcctgcagggcgatcagcttgccgaacagacgctcgtaactgagattgatgaccgggccttcggtctggttgctgaccaggaacaggcgaccggcgctgtcccgggtatggctcagtttccaggcggcaatctccagattgcgggccgcattgtagagcttctggggatccagttcatcggtcagatagaaactctgcttgccgttgtgcgcctccaggatcataccccgcaacccttcgacaaaggccagtacccggtccccctgataggcctcgtcaaaggccagcatcactgcgtcggtgccccgcttctgctgcagttcgggaaactgatccgttcggccattgccgaaaacccgctcaaccgcctgctccaggctctcggcaccaccggcgcgccactcccggggattgcgccggtagagcttctccatcagctcctgcagatactccatggtgaaccgaagctggctctccgccaccatatccacgtcgctccgggcgatatcatccacctggaactggcgcgtcttgatcggcgagtcccgatccggtgccgagccgcagcctgacagcagcagcgacaagatcaacaacatccatctagagccggtcacgcatatccctcagagcaaagccgtttaacgggccatcccagcccctggtcaaccccagcaccttgaaacgctcccccatctcggtgggcagggtcagttgtttgaccccctgcaccagatccaggtgggccgcgacatcgttcggatccgatgcggcaaccagctcatccaatccgctccccatcaggaagaaggcctgggtggtataaccaaccacgttgaatccgctcgccactgccgcctcggcaatggcactgaaatccacatgggcggtgatatcctgcagccccggatagaccagcgggtcactgtgggcccggtgccggtaatggcacatcagggtgccccggttacgggccggatggtaatactcggcaccgctgtgtccataatcgatcagcagtgcggcaccccgttccaggcagccggccagggcggccagccagggtccggcccgcaggttgatctccgattcaaactcatccacccccgccagtcgggccaggggggcggccaactgccgggcaaaatcggccgacgccggtgcgtcccagaccagctggaactgctccccgttccagctcacgtactgctcctgcaggacctggtcggcatacctgaaacggtgcaccggcatggcgtccagcagttcattggcaatcaccacgccggacaagcaggtatccggaaaagcggtcagccagtcgacccgctccaccagatgggcggcccgctgttccagggtctcgcgctggcgctggcgcagatcggggctcaggtccagaatcagataacgctccggcagacagttgagccgctccagctccagcagcagctcggccgccagaacgccggaaccggcccccacctccaggatcaccccgccgcccagatcctccagcacctgccgacactgccgggccaggcaacgggcgaacaggggcgagatctccggtgcggtgacaaagtcccccgccccgccgaacttacgcgacccggcggtgtagtaaccgaggccgggcgcatacagcgccagctccatgtagcggtcaaagggaatcctgccgccggctgcgacgatctcatctcggatcagcgacaccagttgcagactgtgagcacgggcttccgcatcgggctccggcatccgggccacttcggcctcgactgcccgggggttgatccgttcaatcatgaatttcgtaaactcgtcggttcggtataaagtgaccgcttatctgtcgcggcctgttcccggctagtttagcaagaccggggaaggagcagaaatcgagggagtagccaacgtgagtcaagaccatccacccgtcgccctgattaccggcgcagcccagcggatcggcgccacaatcgcccgccacctgcaccagcgcggcctggctattgccctgcactatcaccgctcccaggcacctgccgccgcccttaaagaggaactggaacaggcgcggccggactccgtgcaactgattcaggccgacctgaacgagtcccggcagctggcgcgcatcattcagcaggtcgaacagtggcgcggccggctcgatctgctggtcaacaacgcctccagcttctacccaacgcccttgtcacaactgaccggcgagcagtgggatgacctgatgggaaccaacctgaaggcgcccttttttctcgccatcgaagccgcgcccctgctccgggcaagccggggagcaatcatcaacctggtggatatccatgccgagcggccgctgaaaaaccatccggtctacagcatggccaaggcgggcaacgccatgatggtgaaatccctggcccgggaactgggcccggagattcgggtcaacggtgtggccccgggcgccatactctggccggaacaggcgatgagcgacccggtcaaacaggagattctcgctcgaaccgccctggagcggaccggcacgccggcggatatcgccggagcggtctgttttctggcgctggaggccccctacgtcaccggacagattcttgcggtggatggtggacgcaccgttcagcagtgaatgcctgttacaaatccggagtcagtccggtgtcaaacggcactggccagagtcgctgggagtcccgatcgaacccttgccagatctcattgtaggtctgccccagttccgggtggcgactgtcaccggccagctcggtcaacggcaacagtacaaaggcgtagcgggtgatctcgtcccgcggcaggtgcatgccatccagatcgacaatccggtcaccataggtcagcagatcgatatccagggtacgcggcgcaaaactgcccccctcccgggttctgccatgggtcgattcaatggtccggaacagctgtaccagctcggctaccggcagttcggtatcggcgcccaccaccaggttatagaaggcgtcgccgctaaatcccaccgcctcactctcgtagacccgggagatcagcaggtgaccgaactgagcctgcagatcccgcagcgcggcgcggatattgcgctcccggtcgatattgctgccaagactgatccagaccctggccatatcagaaccgttcgccccgttcgataatcacccccacgtcggtggcggcactgacggcaccgatcttgttcacggtcaggcgcacccaacgcacatcgaactcctgacgaataatctccgcacagcgttccgccagggtctccaccagctggaaccggctctcctgcacaaaactgatcagccgcttcgaaacggccttgtaatccaccgcatcggcaatatcttcggaagcagcagcccgtttcacatcggtactcatatcaatatcgagcaccacggtctgtttgatctcccgctcccagtcatagatgccgatcaccgtatcgatcctgagatcgcgtaaaaaaactatatccatggtcattccaatttcctgtcgcaatagcggaccatggtaaaacagccacgccgcagaacaaatacccttgaccctgaacccccactgccgggaaaatcccgcagacccgctgggcaccggctcaccgtacaggatttgccatgatcaatgccttactcattattgcagcctatctattgggctccctctccagcgccatcattgtctgccgactgatggggctgcccgacccgcgcacccagggctccaacaatccgggagccaccaacgtgttgcgcctgggtggaaaaagagcggccgccatcaccctgcttggggacagtctgaaaggcttcctgccggtgttggccgccaagctgatcggggtcccgccactggtgctggcggcggtcgccatggcggcctttctggggcatctctatccgctgtttttccgcttccagggtggtaagggcgtggccaccgcactgggagttcaatttggcatccactggcagatcggtggtttggtggccctgatctggctgctgatggcgaaggggctgaatatctcgtccctggcggccctggtctcaatggcgctggcgcccctggtggtctggttgatctggccggtaccagcactgatcggtatgcagatagtgatgagcctgatcctgttctggcgccaccgcagcaacatccgtaacctgctggcggggtcagagggcaagatcaaacagtaacagccgcccgtcccggcctggcggcgatgccgggatcagtagccggccagggaatccatcggccagcgggcacggactccgaaccccagatcctcatgggcaccctggcgcagccgctgccagccggcataggcgatcatcgccccgttatcggtgcagaactcggttcgtggatagaacacccgggcaccctctttgcccatcgctacctgcatccgctcgcgcaactgccggttggcactgacgccaccggccagcaccagggtggcggcaccgctgtcgcgcacggctcggcggcacttgatcaccagggtatccaccaccgcctcctcgaaggcccgggcgatatccgcccgggtctgctgtttggtcgcttcgctgtcctgtggagtaatctcccgctgcagggtattcagggcaaaagtcttcaggccactgaagctgaaatccaggccgggtcgatcggtcatggggcgggggaaacggaaccgctttggatctcccgataacgccaacgccgccagctccggaccgccgggatagggaagccccatcatcttggcggttttgtcga

SEQ ID NO: 2888 - DNA, 23189 bp, synthetic construct
  source 1..23189: mol_type = other DNA
  misc_feature 1..23189: note = Synthetic
cgtttgctggcggcccagcggctgcgccagcagctcatgcgcgagctcacggcgcgcggggagcatctcgatggcagccgccatatcgccggcgcgctgctctatccgccgcaggaagcggccctggccggcgccgcccgctaccggcaggtggtggccacccagcgctataccctgggcaaggacgtcttcgcggccacgccgttcacctatcgctactaccgcccggcgcgctacgcctacacccatgccgatggcaggccctatgcccagggcgagatcatcaccgaccggccggtggatgccggcggcgccggccaggtgcccaccttgattgctctggcgacggaggcggaaggcggtaccttcaataccgactaccagcctttcctggcctatccgagccggttcgaaccgtagcaggcatcgccaaggcggctggggcacccagccgcgaaaacactggatcggagcggcggcttgcggaccgggcagggccgacgatcgcatcgcgagccagctcgctcctgcatccaagcgtcgcgccgtgctgcgcggcacaacgccgcggcggccgccatgtttcccgcctgccgaaacgagctggctcgcgatcccggtgagtgggatcggcatccatgcgtcggggcgcgcggatcaggcgtagcgaggaaatggatttccggcaggaccacggggcgccgcagtcaacctgcatgcatgcgccccgttatttgactcacaactgataatgcttatcattcatttaaggagatcgccatgcacgctgtccttgtcggcgccgaccagctcggcaacatcccgaaggtgctgcagcgcttcggcattcgcatcgaggcgcacatcagcggccgcgacccggcgcatcagcgcaagctgccggggctgccgcgccgcgccaacctggtggtactctttaccgactttctgggccataatgtgatgcgccattaccggcagctggcccagcgcgcgggcgtgccggtgctggcctgccggcgctcggccgcctgcctggagcaggagctgcaatgcgccctgggccgcgtgccgcgcgcccgctccgacaacgcgaacggaaaccaagatctgccatgcgcccattgcccgcatcgtacccgctgatcctgctgcttttgctgggccttctggccgccctgccggcccgggccggcagccaggtgtatctcagccccgagcagttcctgagcgagaccttcggcggcagcgtgccgaagcccgccgtgctgtggatcacccggcccatgcaggcggagctcgccggcatcctgggccatccgcccagccagttgcgccagcgctactggagcgacggtcaaaagaccgcctggatcctggaggagatcggcaaggaggagcccatcaccgccggcttcgtggtggggccggatgggcgcatcacgaccagccgcgtgctcatctatcgggaatcgcgcggcatggaagtgcgctatcccgcctttcttcgccagttcaacggcgccggcctgaaggcggatcggcacctggaccgccaagtggacggcatcagcggcgccaccctgtcggtctgggccatggagcgcatggcgcgcgccgcgctctatctgactcagcaaacccgcgccaaatgaatgcccgcttcaagtggctgcgcctgacccgccactggcatgcccgcctgggcgtgctggcggccgtgttctttctgatcctcgtgatcacgggcgtggccctgaatcacaccgagacgctccagctcgaccagcggcgggtgcaggccgcctggctgctggactggtacggcctgcaggcgcagacgccgcagcagggcttcgttttcagcgacggctacttcgcctggcaggcgggcacctgggtgctggatggccgcgtgttgggccgcgatctgcccgcgccggtgggggcggtgcaggcggacggcatccgctaccttgccgacgcccacggcctgagcctctatcagcgcgacggccagcgggtggaccgcctggacgccaccacgctgccggccaccccgatccaggccctgggcctcggcggcacggcagtgatcatccgcacgccgcggggcgatttcgccagcagcaatggcggcctcgactggaccgcttggcgggacgggacggtgcagtggagccgcccggcgcccctgccggccggccagcgcgcgcaagtgcggcaactgctggcgcccagcctgccgctggagcaggtgctgctggacctgcacagcggccgccttttcggccgcttcggcccctacctgatggatctcgccgcgctcgtcctgctggggctgagcctgagcggcgcctggatctactggcaaagcatccgccgcccgtgagcgaagcgaccgtttcccgccgccaccgtctggaagcggggctggcccggctggtgctggccgtatccgcgcgcctgcccgccgccctgcgcagccgcctgggccgcggcctcggccatctggtgcgcgtgaccctgcgccgcccgcgccggatcgccgcgcgcaacctggcgctgtgctttccggcgctagacggcgcagcgcgcgctgcgttgctgcgcgagcacttctgccaattgggcgaggcggccctggagctgggtttcctgtggcgcggcgcacgcgatgacttcgaaaggcgggtgcaggtggagggcatggagcactggcacgccgcccgcgcgcaaggcaagggggtgatctttctgagcgcccatctcggcagctgggaaagctgcgtgctctacggcagcctgctgggccgtttctccgccctgtacatgccggtccacaatccggccttcaaccgcttgatggtgcagggccgcgaacgcttcggcacgcagttgatccccaaggaccgcggcctgcgtccgctcctgtccgccctcaagcgcggcgaaacggtcggcatgctggccgatcagaacgtggaccccagcgaaggcgtcttcgcgccgctcttcggcatcccggccagcaccagctacacggtcgcccgcctcagccggcgcaccggcgcgccggtgatcaacgccttctgctaccggctgccccatggccggggcttccgcctggtcttccggcccatgccgacggactaccccagcggcgacgacgtccgcgacgccgccaccatgaacgccatcctggaagcggccatccgcgaggcgccggcgcagtactggtgggtgcaccggcgcttcaaggatcagccggcgggccagccggatctgtatgcggattgagctcggacgctgtccatagccgcagcacagttgatcgcgggcaagcccgcgcctacgggcaggcgcgggcttgccgcgccggccgtcagccggccggcgcggcgctggcctgggtatgctcgaaccacccgccgcccagggctttgtaaaggttgacctggcccaccagctggttcaagcggacgttgagcaggccctgctgcgcgttgtacagggagcgctgcgcgtcgagcaccgtgagataattgtcgacgccctgccgatagcgcagctgcgccagccggtagtaatcctggctgctcttgaccagatcctcctgcgcctgcagctggctggcgtaggtcgcgcgggcggccaagccgtcggccacctcgcggaaggccgcctggatcgcccgctcgtagcggaccacgttgatgtccttctgaatgcgggcgacgtccaggctggcgcgcaggctgccggcggtgaagatgggcaggctgatgcgcggcgcgaaggtccagtagccggaattgtcgccaaagagaccggacagctcgcggctggcggtgccggcgctggcggtgaggctgatgcgcgggaaaaaggccgcgcgcgccgcgccgatgttggcgttggccgctttcaaggcgtactccgcctgcaggatgtcaggccgctgctgcagcacctcggccggcaatccggccggcaagggacgcagcaggccatcctgggcgagatcgcgcccgggcggcagatcggccggcaacggcgcgccgagcagcagggtcagcgcgttctcgtcctcggccacctggcgggtgtactgcgccaggtttgcccgcgcggcctccagcgccgtctgcgactggcgcacgtccaggccggaggctaccccggcctggaagctcttctcggtcagctcgtaggattgctgataggcggccagggtgtcgcgggtcacctgcagcagttgctggtcggcctgccaggtcagataggcgttggccaccgccgcaatcagactgatctgcgcactgcggcgggcctccagcgtggcgaagtagttctgcagggccgccgcctccaggctgcgcacgcggccgaagaagtccagctcataggcggtgaggccgagagtggcggtgtactggttgtaagtgatgccgcgaccgcttataaacggcgaaaaacttgccggaatatgctggcgctggccctgggcatcggcgctgaccgcgggaaaaagctcggcgcgctggatgcggtaggtcgattggtagagctggacgttcagggccgcctcgcgcaagtcgcgattgttctcaagggcgatctggatcaggcgctgcaggcgcggatcggtgaagaactcgcgccagcccagctgggccgccggcacgccgccggcgtccgctgccgatgcctcataggccggcccctgcggccaggtctggctgaccggcgccgaaggccgctcgtagctcgggatcatggagcagccggacaacgccagggcggccaggctcatggacagtgcgattttcttcatgccccttccccttcatgctttgcggctgcggcccgacgcgccttgcggtgatcgacgcgccgggtgaccagcacgaagaacagcggaatccagaaaatcgccaggaaggtggcggtcagcatgccgcccaccacgccggtgccgatgtcgcgctggctgccggcgccagcgccggtggcgacggcgagcggcaacacgccgagcacgaaggccatggaggtcatgatgatcggccgcagccgcagcctcgcggcctcgaccgccgactcgaacaggctcttgccctgcttttcatgcagcaccttggcgaactccacgatcaggatggcgttcttggcggtcaggcccatggtgatcaaaagggcgatctgcaggtagatgtcgttggacagcccgcgcagccaggcggccaggaacacgccgagcacgcccagcggcaccgccagcatcaccgcgaaggggatcgcccagctttcatagagcgcggccaggctcaggaagatcaccagcagggacagcccgtagagcagcggtgcctgcgagccgctcatgcgctcttcataggacacgccggtccacgcgaccttcaagccctgcggcagttggctggcgatctgcagcacccgctccatggcctggccggtgctgaagcccggcgccggctcgcccatgatctcgaccgcgggaaagccgttgaagcgttccagcttgggcgagccgtaaccccattcgccgcgcaccaggctggccagggacaccatctgtccctgctcgttgcggacgtaccacttgttgaaatcctcgggattcatgcgcgcgtccgcctggccctgcacatagacgcgcttgacccggccgcgatcgatgaagtcgttgatgtagctcgacccccaggcggtggacaaggtctggttcagatccgcttccgagacgccgaaggtacgcagcttttcatcgtcgatgagcagccggtactgcggttcgtcattcaggccattgggacgcacgcgcaccagatccgggctttgcgaggcctgcatcaggaactggttgcgcgccgccatcagggcatcgtggcccaggccgccctgatcctgcaggtagaaatcgaagcccgtggcgttgccgagctccagcaccgccggcggaaccactgcgaagaccatggcgtccttgatgctgtgcaacgctttcatggcgcgctcggcgatggcggcggcgccgttctccgcacccgggcgctcctcccaggccttgagctggacgaagcccatgccggcgctttgcccgcgtcccgagaaattgaagccgctcacggtgaagatgcccttcaacgacttcgcctcgtttttcatgaagtactcgcgcatctggtccagcaccgcctgggtgcgctccgcggtggagccgggcggcgtcgtcacctgggcgaagatcacgccctggtcctccggcggcaggaaggccgaggggacgcggtggtacaggagcgccacggcgcccacgatgaccaggtagaaagccatgaaaatggcccggtggcgcaggatgccggccacgctgcgctcatagcggtccacgccgtgatggaactggcggttgaaccagccgaaaaagccccgcttctcctgatgctcggcatcgctgggacgcagcagggtcgccgacagcgcgggcgtgaagatcagggccaccagcaccgacagcaccatggccgagacgatggtgatggagaactgccggtagatggtgccggcggagccgccgaaaaaggccatgggcaggaagaccgccgacagcaccacgccgatgcctaccagggcgccctggatctggcccatggacttgcgggtggcctcgcgcgccgagagcttctcctcgtgcattacccgctcgacgttttccaccacgacgatggcatcgtccaccagcaggccgatggcgagcaccatggcgaacatggtcagggtgttgatggtgtagccgaaggccgccagcacgccgaaggtccccaggagcaccaccggcacggcgatggtggggatcagagtcgcccggaaactctgcaggaacaggaacatcaccaggaagaccagcacgatggcctcggccagggtcttgaccacctcgtggatcgaggcgctcaccaccggcgtggtgtcatagggaatgacgatctttgcgcccggcggcagcgacggctccaggctggcgatggtggcgcgcaccgccttggcggtgtccagggcgttggcgccggtggccaggcgcagggccatgccggacgagggcatgccgttgtattgcgcgttgatggcgtagctctcgccgcccaggctcacctcggcgacgtcccgcaggcgcacctgcgagccgtcgggattcaccttcaggaggatcttgccgaactcctccggggtgctcagcagtgtcttgccgatgacggtggcgttgagctgctggcccggcatggccggcaggccgccgagctggccggacgcgatctgcacgttctgcgcccggatggccgcggccacgtcgctgaccgtcagctgatagttgtcgagcttggccggatccagccagatgcgcatggcgtactgggtgccgaagacctgaaagtcgcccacgccgggcgtccgggcaagcggatcgcgcagggttgaggccacgtagtcggacagatcctggcggtccatgctgccgtcggtcgagaccaagccgatcaccatgaagaaattgcgctggtatttggccacgcgcaacccctgctgctgcaccgcctgcggcagcatcggcaaggccagctgcagcttattctgcacctgcacctgggcgatgtcggggtccgtgccctgctcgaaggtgaccaggatgttcatgctgccgtcggaattgctttccgaggagatgtagcgcagcccgtcgagcccgttcatctgctgctcgatgacctgcaccaccgtatcctggacggtctgcgccgaagcgccgggataggtcacgctgatggaaatggccggcggcgcgatgttgggatactggttgatcggcaggttcaggacggcgagggtgccgcccaacatgatcagaatggcgatcacccaggcaaagatgggccggtcgatgaaaaagttcgacatgaggaaattgctcccttattgggcgctgcgggccatggacgcggccgggccggcctgtcccggcgccgccggtccgcccacgttggtcgccggcttgacccggaccacgtcaccgggatggatgaactgcaagccttccgtgatcaactgatcaccgggcttcagaccctcgctgaccagccacatgttgcccacggtgcgctcggtcttgagcacgcgctgctccaccttgttgccggggccgaccaccagcgcggtgggctcgcccttgggattgcgggtaacgccctgctgcggcgccagaatggcctgctcgcgcacgccctcctgcaggcgggcgcgcacgaacatgccgggcagcagcaggcggtcgggattggggaagaccgcgcgcagcgccaccgagcccgtgcttggatcgacggtgacttcggtgatctccatcttgccgtcctgggcgtactcgctgccgtcctccaggaccagccggaccttggccgcgctgccgctggcgcgctgcaattggccgctttccagctcgcggcgcaggcgcagcagttcggtggcgggctgggagatgtccacgtagatgggatcgagctgggtgacggtggtcagtgccgtgggctgatccgcggtgaccaaggcgccctccgtgaccagcgagcggccgatgcgcccgccgatcggcgccgtcacgcgcgtgtagccgagattgatcttcgcgctctgcaccgcggcgcgggcctcgctgatggcggcctcgttctggcgcaaggtggcctgcgcgtcgtcgtattcctgccggctgatggcattgacgtccaccagctgccggtagcgctccaccttgagcttgttggatgccagcgtggcctcggcgcgcgccagcgccgcctgggcgctcttcagcgtcgcctcgaagggagccggggcgatttgataaagcggctggccggccttgacctcgctgctttcatggaacagccgccgctgcaggatgccgcccacctgcggccgcacctcggcaatgcgataggccacggtgcgaccgggcagctccgtgctcagcgtcaccgtctgcggcacgatccggaccacgccgacttccggctgcatcttcggcggcccggcgggcttgtcgtccttgccgcaggcggtaagcgtgagcgctcccaggaaaagcagggcgggagtgaggtgtgccgactggattcgcatagggtcgtccttgctgaaaggggccgataactgcttgcacggggccgcgcaagcacgagaatgacgaaaagcccgacaacgggccaagcgaagcctggccgcacctcgcccgacctgcggccggggaacgcgcccaggtcctaggacaacaaaccttccaggttttctcctgccgggctacaactcgactaaaaggcgttgactggccggcatgcccggcaggtaattcagtacttggtcattttcagatgcgccattttagttagcaagctaacttttgtaaaggggtgactctggacagagtctaatcgacgccagaccaaagcgtgagcccgcctgccgtaaaatcggcttgcctcccttcggcaaagttgggccgctggagcagcttcagttaaaaatcagatgcgtgaggagcgactttgatccgcaggagttatacgtaatgggccgcgaacacctctatacgcgctgctctcaccagcctctaagcgcggcaacagaacatggaggccaacggggcaggaatcaagggaatatcgagcgcgcgcgtttgctcgcgccaagacgggggccggcaaaaggcatggacggagcgtgccaaagccatgcgcagggcttcttcctgcccttgcaagtttcagaactgggggctattagagcactatccccggaaagcaaaagacccgacatgcttgcgcagaggtcgggtcgggttcggttctaagaccttattgtagcaacggctctcaccccggaaagctacaatgtttcctagcatagtttacgagaaatccacatgcaagctccatccaaggctgaatacacactcgggctggacatcggcatggcctcagtcggtgccgcgctgctcacgaatgatcgcatccttgctttgcacgtccgcgccttcgacaaggccgaaaccgccaaggaaggtgaatcgctcaacgccatccgccgcgcggcgcgcctgacccggcgacgcctccgacgccgcgcccatcgcctcttgcgcctgcgccgcctgtttaagggcatgggcttgctcgacagccaagatcctgccgcccttttcaccgggaaatcgccctgggtattgcgcagcgaaggactggatcggcggctcacatctccggagtgggccgctgtcctctaccacatcgtcaaacaccggggttttcactccagccgcaagagcgaggccaaagccgatgaacaaatcggccaaatgctcagtggcgtcaaccgcatcaaagagctgctggcaaacacgggattgcgcactgtcggcgaattggctgccaagcatgaggcgtttgccgaggccaagcgcaacaagggcggcgcctacacccacaccttcgcccgcgcggacctcgccgccgaactgagcttgcttttcgcggcgcaacggcgcttcggtaatcggcatgctgacgccaccttcgagagcgccgtccgcgacctgctcatggcacgccggccggctttgtcgggcgagcgcctgctcaagatggtgggcaagtgtaccttcgagcccacagagttccgcgcccccaaggccagccatagcgccgaacgcttcgtctggctgacccggctcaacaacctgcgcgtcagcggcttgggcgaaacgcgcccgctcaccgatagtgagcgggcaacgctgatggaattgcccttcgcgcaggcgaagttgacttataaacaagcgcgcaagctgctcggcttggctgagcatgagcgcttcgccggtctcgactatcgcgataaggatccggaaaacgccacactcttcgaagccaaggcctttcatgcgttgcgcaaatcatatgaggaggcgggcctgaaggcgctctggcagcgtgacgccctggatcccgagcggctgaacaccttggcccatgcccaaaccgtgttcaaggaggacggcgaggcccgtgcatggctggccgggcaaggcgtggagccggaaatcatcgaggccgtgctcaacgtcgccttcagcgactttgtccggctgtcggtcaaagccctccgccggatcattccgcatatggaaaccggactgcgctacgacgaagccgtgcgggcggccggctatgtgcaccatagtcagcttcccgggagcaagagggccttgaccatcccgcgcatcagcaaggacgattttcccaatcccgtggtctaccgggcactcaatcaagcgcgcaagctggtcaatgccatcgtgcgtgaatacgggccgcccgtacgcgtgcacatcgagctcgcccgcgatctcagcaagtcattcgacgaacgcaaaaggatcgagcgcgagcagaagagtttccgtgaaaacaagcaaaaagatatcgcggacttcgtcgagcgctttggcgtcactccgaagggagcagacctcgtcaaatggcggctgtaccgcgagcaaaatgcccagtgcgcatacagtcagaaggccttcgacctcgatcgcctgttcgaggacggctacgccgagatcgaccacatcctgccctactcgcgtagtttcgacgacggtatgagcaacaaggtgctggtgcacacagcggaaaaccgcaacaagggcaatcagacgccttatgaatacctagacggccaaagtgacagcgaacgctggcgccgcttcgttgcttggatcatgggcaacaaggcttaccggcaagcgaagcgccagcgcctgctgcgcaaggactttggcgaagcggccgctcgcgaattccgcgagcgccatctcaccgatacccgctacatcgcccgaagcttcaagcgcttggtggaaaggcacttgcaattggcgggagatacgagcaacacgcgttgcatgatcctctccggccagctcacggccttcctgcgcgcccgctggggattgctcaaggtgcgcgagaatggcgatctgcaccatgcccttgatgccgcggtggtggccgcgtgcagccaggcgatggtcaagcggctgtcggattattcccggcgcggggagctggagcaggtgcgcaaaggttacatcgatccagaaacaggggaagtcctggatctcgccgccctgcgccggctggaagcacagtttcccacgccttggtcccacttccgcgatgagctgctggcttggctgtccgccgacccggcaacccgcttggcccgcttgcccaattacccggcgaaacaagcccaacgcgcacgtcccgttcgcgtctcccgggcacccacccgccgtggcaccggacaggctcaccaggaaaccatccgctcagccaaacggcttggcaacggggtgagcacggtcaagacgccgctgcaaaatctcaagctgaaggacatcgaaaaaatcgccggctttgatgacccgcgcaacgctacattgctcgaggccatccgccaacgtctggaacagcacggcgacgacggtaaaaaagcctttaaggaacccctctacaaacccggcaagcccgcccccgtgatccgttccgtcaagctcatggaaacgcagaaaagcggcctggccgtacgtggcggcgtcgccaacaacggcaacatgctgcgggtggatatcttcaccgatggaaaacgctttcatgctgtcccattgtacgtggccgatgccatcaaggcggaattgcccaagcgagcggtggtggcttacaaaccggaagcggagtggaccgtgatggatgacaagtacgccttcctcttcagcctccacccgaatgactgggtggtggttacattgaagggtgcaggccaaccgctggcgggttatttcgcgggcctggaccgttccacgggtgcaatctcactgtggacgcacgataggaaccaaaccgtcgccaaagacggcctcatcagaggaatcggcatcaagaccgcgctggccatcgagaaattccacgtggacatgctcggccggctgcaccgggtacggcaggaaacccgtcaacgcctgaggcgcgcgggctgaagccatggcgtggcgcagcatcgtcattacccagccgtcccgcctgcggcttgcgcagcgcgccttgctggtcgagcaggacgagggcaccgtgcgcgtgccgctggaggacatctcggtactcgtgatcgaccaaccccaggtcaatctgaccgcccaactgctgtccgcctgcgcggcccgacagatcgccgtcgtcacggtgggagatgatcaccaccccaacggcgtgctgctgccccatctgccccacagccgggcgctcaaggtcatgcgcgcccaactggacatgagccagccgcgccgcaaacggctctggcaacacatcgtccagcgcaagatacacaatcaagcggcagtgttggaccggcatgacccgattgcagcccaccgcctgcgtcagcttgcacgcgatgtgcgctccggcgacacgggccacgccgaatcccaagccgcccagctttacttccgcagcttgttcggaccgggcttcagccgcaatcacgcgtgtttacacaatgccgcactcaactacggctacagcatcatccgctccgccttggcgcgccacctggtcgcctacggcttcctgaccgccttcggcctgcatcatcgcagcgaacagaacgccttcaacttggctgacgacctgatcgaacccttccgccccattctggatgcccatgtgctacgcagctacccgccgggctgcgaagagcacgacctgacccgcgacgacaaagcctatttggtgagcgtgctgcatgaggacgtggcgctgcaccgcgccgacggcttggcgggcaaaagcactttgcttgccgccgccgaagccagcgtgatcagcctcggtcagcgcctcgaagacgacgcaacgcaactcacgctgccgggaccgctcccgaccgtcgagcccggctggtcatcgagctgcgaggaccatgagtaaggagacccgccgcttcatgcgcctgctggtgtttttcgacctgccgaccctcacccgcgccgagaagcgcgcttacacgctctttcgtcgttttctgctgcaggacggctacgatatgatccaatggtcggtctatgggcgcgtggtgaacggattcgacgacatggagacgcacatcaagcgcctatccgccaatctgcctcccgaaggatcggtgcgttgcctgcagatcagcgaaaagcagtttgcccaaatgaagcttctggttggcctgcccaaaattcaggaaaagaaggtcaatgccgctcaactgctactgctatgagccgaaaattcatcggcaaaaacccgcttctgccaaggcaggagcgggtttccgagaagggcattgtagctttccggggtgagagagggaactacaaccgacccgggcagtggggcggcgctcgcgccattgtagctttccggggtgagagagggaactacaacgcgcgacgaggttgttgcgcagataacgcaattgtagctttccggggtgagagagggaactacaactcgctggccagctcggtcaccggcgccggtattgtagctttccggggtgagagagggaactacaacctactgcagattacgatgtcacattgcgccattgtagctttccggggtgagagagggaactacaacgccagcggtcaaggcgagctacgaggccgcattgtagctttccggggtgagagagggaactacaaccgtgctggctttcgtcgccgcgccttcgttattgtagctttccggggtgagagagggaactacaaccccgcaaaagggcgtcgctgtgttttttatcagcaactgctcggcgctcgcgccaccacccaggcccgatctccctcctcaccgcagtgcagcagctccagtccctcgcacagggctaccagctcccccgcccgcagccggaaggcttcgctgatcggtccgcgctcgcggcgtggtcccagccaggtttcgtagaagagcaggccgcccgggcgcagggcggccgtgagcgcggggaagagggggcggtgcaggaagttgctgatgacgatggcgccgaagctgcccggcgcgggcgggtcgcgggtgacgtcgcggcaggcggtggcgatggccaggccttcggcctgcgccgcccgcgccagcgccgccagggcgctgtcggcgtagtcccaggcgtgggtgtgcaaaccgcgccgagccaggaagagggcgttgccgccgcgcccgcaggcgaggtccagggccgtgccgtgggccggcagcaggtgggcgtgatgccgcagcacggcacaggcctgcgccggctcgtcggcattttcgctgtagcaggcctgccagcggctgcggcgttcggtttcgttttcttcgctcatgcgccgggatctccgtggtcaaaagaacgaggcgctgcttggcgcagacagcggattgcgagccagctcgctcctacgccactggggcagcccgcctcacttttcgtcgcggatgcgcggcagcagctcggccaggttgcaggggcggtggcggatgtcgagctgcggcaggatgatctcttccacgcccaggcggcaggcgccggtggagccgggcaggaggaagacgatggtgccgtcgcagatggccgcttcggcgcgggactggatggtgctggtgccgatctcggcataggagagctggcggaacagctcgccgaagccgggaatcggcttgctgaccaggggcaggagggcctcgggggtgatgtcgcggccggtgacgccggtgccgccggtgctgacgatcacgtccacgccgggatcctggatccagtcgctgaaggcttggcgcagggtcatcaggtcgtcgggcacgatgcgccgggcggcgacgtggtggccggccctcgccaccagctcggcgatggcgtcaccggatttgtccgtttccggcgtgcgggtgtcggagacggtgagcacggccacgctcagggacagaaacgcgcgttgagtgtcgatcatggcaggtccttggctggggtggatgcgccaagcatgccatattcctagtagcgccaaaaggcgcgggtgaagagcaccaggaaggtgtagatttccaggcggcccaggaacatagtgaaggtcaggatccacttggccaggtcggacaggccgccgtagttgctggcggggccgacctgattcaggcccgggcccatgttgttgatgtgggcgatcaccgcgctcatggcgctgatgaagtcgacgccggcggcgctgagggccagggtggcgacggccatgctggtgacatacagaaagaagaagccccagatggcggtgatgatgggctcctccacccgccggccgccgaacttgacgaggtccagggcgtcgggatggatcaggcgcttcatctcgcgcagcccctgcttgagcagcaggatggcgcgcaccatcttgatgccgccgccggtggaacccgcgctggcggcaaagcagctgagcaccagcatgagcaggggcacgaagatgggccagagattgtagtcggtggtggcgaagccggtggtgctggcgatggagatcacgttgaagctggcgaagcgcagcgcgctcagcaggtccggataggtgccgcgcgcccacagatagagggcggccagcacgacggcgctcaacatcacgcccacagtgcccagggtttccggatcgcgccagtagggcagcaggctcttgcgccgcaaggcgatgaagtgggtggcgaaattgatgctcgccagcaccatgaagaccatcaggatgaactcgatcagcggcgagtggaagtaggcgatgctggcgtcgtgggtggaaaagccaccggtggagagggcggagaagctgtgattgacggcatcgaaaggactcatgcccgcccaccacagggccgcggcgcaaagtgcggtgagcccggcgtagatgaaccacagcgccttggcggtgctggtgatgcgcggggtgagggcggtgtccttcatgggtcccggcgtctccgccttgaagatctggcgaccgccgacgcccagcaagggcaggatggccaccgccagcacgatgatgcccatgccgccgatccagtgcagcaggtggcgccaaaagttgatggcgtgcggcaattcatccaggcccgagaacaccgtcgagccggtggtggtcaggccggaggtggtctcgtacatggcgtcggtgaagctcgaggtgacgccgctcagcagcagcggcagggtgctcgccagcggcagcaggacccaggcggcgccgacgatgagaaagccgtcgcggttgcgcagctcgcgcttggcgcggcgcacgggaaaccagaacagggcgcccacgagaaaggtgatgacgtaggagtcgaggaaggccagggtgccgccgtcgccgtagtaccaggccaccgcctcgggcagcagcatgaactgggcgaaaatcatcaggagcagggccagcacccgttgcacttcgcggatttggatcatccctgcctctagaagaaagtgaagccgacctggaagagcttttccacctcgcgcacgcgccgcttgtcgatgacgaaaacgatgacgtggtcctccgcctcgacgaccgtgtcgtggtgggcgatcagcacctcgttgccgcgcaccagggcggcgatgttgacgcccggcggcaggcggatttcctccaggcgtcggccgacgaccttggaggtgctgcggtcgccgtgggcaacgatgtccagcacctccgccgcaccgtagcgcaggctgtgcacggcggccacgtcgccggcgcgcacgtgggcgagcacggagccgatggtggcccagtgcgggctgaccgccacgtcgatgccggtgctctgcaccagatcagcgtaggcggcgcggttgatcagggaaaaggtccgccgcgcgcccaagcgcttggccagcatggccgacaggatgttggcctcgtcgtcattggtgacggcgatgaagaggtcggtctcgcggatgccctcctggttcagcaatccctcgtccgctgcgtcgccgcgcagcaccagactgcgccgcagctgctcggcggcatagagggtgcgcttgggattgtgatcgatgaccttgaccgccagggaacgctcctccagcgccttggccaggcgcaggccgatgttgccgccgccggcgatgaggatgcgcttgtagtccggctcgcggatgcccagctcgcccatgaccgcgcggatatcctcgctgcgggcgatgaagaacacctcgtcgccgggctcgatgaccgtgttgccctcgggattgatggcgcgggtgcgccggtagatggcggcgacccgggtatccacatgcggcatgtgccgacgcaggtcgcggatggcgtgaccgatcaggggaccgccgggcacggccttgacgcccactaggctgacccgcccttccgcgaaggactgcacgcgcatggcgccggggtattccactaggcgcaggatgtattcggtgaccagcgcctcggggctgatgagcacgtccaccgggaaggtcttggcatcgaagagattgcggtggctccagtactccggggcccggatgcgggcgatcttggtgggggtgtggaagagggcgttggccacttcgcaggcgacgatgttggtttcgtcgctgctggtgacggcgaggagcaggtcggcatccgtggcgcccgcctgctccagcaccgagggaaaggcggcgtggccggtcacggtctggatgtccaggcggtcgcgcagcgcggcgagcaggtccgcgttggcgtccaccacggtgatatcgttgttttccgtggccaggctttccgccacggaagaacccacctggccggcacccaggatgatgattttcatgtatcgctatgacccgtgaaaagtgaaagccggggcgtgaacggccgcccctttcacgaatcgccgtccctgcccctccgcccgctcaatagggaatgcccaggctcttcaatttgcggtaaagatgggtgcgttccaggcccacggcctcggcggtgcgcgcaatattacccccgttgcgcgctaaatggtactcgatgaaggcgcgctcgaacttgtcgcgggccaccttcagcgtgccgctgaactcgtcggcctccatatcgctgatggcggcgcggttgtccaggccgagggcgcgctccacctcttcgccgctgacctccggaccctcggacaggatgagcaggcgctccaccaggttctgcagctcgcgcacgttgccgggccagggatagtgggacatcacctccagggccgccgggctgaagcgccgcgggctcaggccgtcgcgctcgccgtagaagcgcacgaactccgccaccagcagcggaatgtcctggcgccgctccgccagcgcggggacgcgcaggggcaccacgttgaggcggtagtagagatcctcgcggaagcggcccgcctgcatttcggcgcgcaggtcgcggcaggtggccgccaccacgcgcacgtcgacctgcaccggcaccatgccgcccacccggcgcaggcggccctcctgcagggcggacaacagccgcgcctgggtttccaggtccatgtccgcgatttcgtcgatgaagagcgtgccgcgatgcgcctgctccagccggccgctgtgcacctgcccctcctgctcgctgccgaagagctccacagcgatgttgggctgagtgatggccgccgccttcagatccacgaaggggcccttggcgcggcggctgtgggcgtgcagatagcgggcggccacctccttgccgctgccgggcgggccgctcagcagcacccaggagtcgctctgggcgacgcgctccagttgctggcgcagatgagccgccgccaggctgtcgccgctgggggcgctcaccggccgcgcctggcgcttgaggtccacgttttcctggcgcaggcgcgcggcttccagggcatggtcgatggtgagcagggtcttgtccagggacaggggcttttcgatgaagtcgtaggcgccgagcttggtggcctccactgccgtctccaccgtgccgtggccggacatcatcaccaccggcggctccaggccgcgggcggcccagcgcttgagcagggagatgccgtcctcgccgggcatccagatgtccaggagcaccaggtccacccgctgctcccggcgcaccgcctcggcctcggcggcggaggcggccagcaggacctgatagccctcgtcctccaggatttccttgagggattcgcgaatgtccggctcgtcgtccacgatcaggatgcgggcgagcacttcgtcgctgcgccggtcttccatagcgggttccatgttcatgccactcccttgtgcaggatgcgggcgggcagggtgatcacgatgcgcgccccgcccgtgggtcggttgtcggcggtgatctggccgccgtgctcctccaccatctttttgacaatggccaagcccaggcccgtgccccggggcttgctggtcacgtagggctcgaagacgcgctccagcagctcgggcgggaagccggggccgtcgtcggccacggtcagctgcacgcgcagctcgccgttgccgccgccctgggcgcgcgtcctgatctcgatgcggtggccctcggacagggcgtccagggcattgcgcagcagattgtgcagcacctgccgcaggcggccggcgtcggcctccaccaggggcagggtcgggtccaggtcggtttcgatgtagatgcctttggcggcggcatccccggcgatcggcaggctcgccggcgtgatcaaatgctgcccctgctcccggtacagttccagggtctcgttgatcagcgcattcaggtccaagggccggatgcgcagctgcggctggcgcgcgtactcggaaaaggcgtccaccatgaccttgagggtttccacctgattgatgatggtgcgggtggcgcggtccaggggttcgccggccgcgccgagctgcgccagatatttgcgccgcagccgctcggcggagagttggatgggggtgagcgggttcttgatctcgtgggccaggcgcctggccacctcgctccaggccgcgctgcgctgcgcctggatcagggtggtgatgtcgtcgaagaccagcacgaagccggccgggccgtgaaccgcgggcgcactctcctgctcctcgacgggccgcgccgggggcaggggggcgccgcgcaggagcagggtctgcttgcccagcacccggtccagcaccagctcctgctggcagtcccgttccggatgcgccaggcagttctgcagccaaccgaagaagggcgacaattccggatggcgggcgatcagctccgccgccgacaggccgagctcctcgtcgaagggaatgcgcaggatgtgggcggcggcggcattgatcaccgccagcctgccctcggcgttgaaggtcatcacgccggtggacaggtgcgccaggatggtctccacgaaggcgcggcgctcctcggcctgggcctgggcctgggcggcgctgcgctgggcctgggccagctggcgggtcatgctgttgaaggagtgcaccaggatgcccatctcatcgtggccggcgccgggcagcaccggcgcgaactcgccgcgcgccacggcgcgggtgcccgccgccagatggccgatgggcgccgccaggcgccgcgacaggaacaggctcagccacagggcggtcaggccggtcaccagcaggacgctggtgaggctgagcttgaaagcggtcttcatgggatcgcgcatgagctccagccgctgatagcgcttgtaggccagctgcacgctgtcggcggcggcggtgagctggcgcggcaggggattgaccacgtacaggagacggcgcggcggcgccagccgggtgctggccaccggcaccaggaccttgatcacgagatcgccgcgggcattgggctccaccacggcgtagggccggctgccgcgggcgacggccagcatgtcgccggtgggcagggcgggcgccagggtcaggctgtcgctgctggtgccgataatgcggccgtcctcctccagcagggtggcctccgccagccggaactgggcgcgcatgcgcatgagggtggccaggggcttgtcctcgccctgctcctccagcgcccgggcaatgctctgcgccgcgcccagggtatcgaggcggctttgctcgatgctgctgcgcgccacgctgagggcctgatccagggcatcgcgcacctccacgctgaaccaggagtcgatgccgcggttcaggaagagccaggagaagccgaacacggccgccgccggcgtgaccgtgagcacggcgatgatcagcaccagacgcgccgccaggcgggtgcccaggatgccggcgcgccactgccgccacagcacgaaaatgttgaagagaatgagggcaaagagcagcactacggcggcgccgttgccgatcagtaggggaatgaagagatccccgtaatcgcggccctggctggcgatgtaggtgaaggtcagcgaggcgcccagggccaggagcaggatcaccaccccccaaccactggcgaagccgccgcccaaccgtcccaccccgagggtggaaaggcggctcacgggcgcagtgcgacgctcttccatgggctgtccatcccccagtcggaggtcatggcgctcaggcgcagggccagcggcaggacggaattgtccaggcggatgcgcacgtacacctcataggattcgttggggctcaacaggacctcgtccaccaaaggcaaatcccgcacccgctccagataggccagcgcctggggccaaccggcgaagatgcggcgcgcgccggtgctcggttcatccaccagatacaggcgcgtcagcgggtgatactgcacgtagcgcacctggcgcaccagcgcgatggtgtcgccccagatgagcggacgcggctgctccaccttggcctcggtcaccagcgccagggtgacgccgcga

SEQ ID NO: 2889 - DNA, 23186 bp, synthetic construct
  misc_feature 1..23186: note = Synthetic
  source 1..23186: mol_type = other DNA
ctggatgcctccggcgttcaccctgagtcttaccctgtagtggagcgcattgcccatgaattctcacgcgatgtcagcagcctgattggcgacggcagcttcctgaaatctgtcaatgcaggccagttcacggatgaacataccggcgaactcaccttaaaagatatcctgagtgagcttgaaaaaccgggccgtgacccgcgccccgaattccgctttgcggaatacaaagagggcgtagaagacatcaaagacctgaagcccggtatgattctcgaaggcgcgatcactaacgttgccgcctttggtgcctttgtggatatcggtgtacatcaggatggtctggtacacatttcagcgctggccgatcacttcgtgaaggatccgcgcgacgttgtgaaagccggcgacatcgtaaaagtgaaggtaatggaggtcgatgtgtcgcgtaagcgcattggtttatccatgcgactgggggatgatatcaacgcctcgggcgacaccggaagccgacctgctaaagacagacctcagcgccagccgcgtggttcaaaaccgacgcagcaacctgccggaaacggtgctatggcgggggccttcgcagccgcgtttgcaaacgccagaaagaaataaagcgaataatgagaagttatcgtgcaaaaaaaaggacctctactcatcatactcacgtgtgccgcgaacctttgccagcctttgcacgttacagcagatgataacccggataacttctcttccctctcgtgggatgcctcaagctgggatgcctcagcagccgatatcccgcatgtactgacaccagcgcgactgcatcaggccaccgcagaggtgccaggcagtgtgacggttctggatgctgattttataaaacgcacgggcgtcaaacgtatttctcagcttctgcgttacgttcctggaatgctggtcgctcacgacatccgggataatagcgacgcggtggtctatcacggtgggccatccatcctgcccaagagctttcaggtcctcatagacggacgggcacaatacctcgccgggttggccgcggtgtcatgggaagacttacctgttgcggtcgaggatattcagcggatcgaagtcgttcgcggccctgcggccaccagctttggcaccaacgcttatcaggctgtaatcaatatcatcacgaattacccacaggatgccttcgacgaccaaatcggtgtccagcaaggtaataatcgggatacttatctctacgcacgaacgaccggcgatcaggggattcatcactggcgcttgtcggccaaggcctattccacagaacacctgcgcgacagtgatgacaccagcataggctgtacaaccccttgtgacgacaaccgtgatttcgcggcagttatgctaaataccagccatcaactgagtgatgctcagagcctgaacactgccttcacgatgactaacgcttaccgggacgtgcctgattacgagtttacgagtaatcacgttgagtccaaccagtttgaagccagcgtcgtttatgatcatgacctgtcagatctacatgagttgaaagtgtcggttcacgcaacccgttttgagcgtcgccagcatggtgtgctggaaagtggaccttccggtttctttgatccgcttctgagacaactggatgaggtaaacccggaagccgccgatcagtttgttcagggcgaatctctcaccgcactggataccaccaacccggaagagctgacactggctcaacagctcctcactcgctacggagccgacccggctgctttcttcataccgatcagcggtgatgtgcacgctgatacgaacgaacgacgtatcgacctggaaatacaggatacggtcgccttcgcagacaacctgatcatgatcagcggtctcggatatcgcagagaacagatttactcgaagccattctatggcggctacatagactcagatcaactccgcgggttcggcaacatcaactggagagccagcaaccgctgggccctgcattcaggtgttatgtatgaatatgaagaggacggtactgacgtctggtctggaaaactggcggccaactacctgatcagcccagtcgaatcggtcaggctggtgttcagtcgtgccgggcgtacgccggacatactcgaacaaagagcagactggatatacgtcgttgataatgccgaaacagaatcgcgatacgcgggtgtcgagtattacgatggattcaaaggaccgggtaacctcaaaccccagatcatccactcagtcgagttagggtatttcgccagcaaaccgttctggaaaggcaatatagagtgggacgttaagctgttccgggaagagctgaataatgtcatctatcactacccatccattcgtctcgatacggtcaatgatgggaatgaaattgtctacaccggcgctgaggggcagttaacgttcacgacgcgaagcaccgcagagttccgcctgaccagcgcatggctgcgcgcagaggtagatccaacagaggatctcagcgacagcgacctggtcgccctgtattcgccgcgttcgcactccgcctcgtggttccagccatggccagcgcagattttcactcatctcagtgcgtttgttattgaagacggacgccgggtgaaccgcggtgatgacggcgatgatctacatacactggagctgaatatataccgtgactttgcctcggcagagacaacaacccggttaggtttcagagcacagagagactttacgtcaaataccttcaagccggactcagaaccctacgagcaggctgtacgcgttcagttaagtgccagtgttgcattctgataatcgatctgacgaacaattagtaggcctatacacaacactgttcattatgagcgaataatctgagaccaatttctgatacaagcatgtataagatcctgtcgattcctcctataatccgctgacttccaacctgatgcagaggtgctcttggcttcctacaattcactgctggcgctactggccgactcccggcacctacccatgctttcccgactgcaacggggaattgagaaggaaggcctgcgctgcggcaatgacggactaatcgctcagacacctcaccctaagggaatgggctctgcgctgacgcacccggctattacgaccgactactccgaagccttacttgagttcattacgccggtttttaccagcgcccatgaggcgtcggcttacctcgaaaccgcccatcgctttgcctaccagcaaatggaaggagagctgatctggccagcgtcgatgccgtgtatcctgaaaggcgagatgagcatccctattgccgagtatggcagctccaatatcggacgtctgaagcatgcctatcgccatggcctctggcaccgctacggtcgtgtgatgcaggcaatttcaggtatccactataacttctcgctgccagatgaattgctgcaatcgctggcggagcaggaaggtcagaaagcagacaaagacttcgtatcccgccgctatctcggcatgatccgtaacttccgccgctatggctggctgctgatgtatctgttcggggcatcaccggcggtatgcagcacatttcttgatggccgtaagcactctttgcagaagcttcacaagcacaccttatacgccccgtacgcgacctcgctgcggatgagtgatctgggttaccagaataatgctcaatcgggcttagtgatctgtcacaattcccttgagtcgtacatcgacacgctgagtaaagcgctgaccattcctgtcgctgaatacgaagccattggtatgcaggaagagaacggccagtataagcagctcaataccaacctgcttcagatcgagaacgagtactacagcaatatccgtcctaagcgggtaggcgagtccggcgagaagccgctggagtcattggctcgtgccggtattcagtatattgaagtccgcagcacggatgtgaatccgttcctgccactgggtatcgacgttccacagatgcactttatggatatattcctgacctggtgtgctctgcaggacagtggtgagattgatgatgccgaatacgaacgtattcagcgcaacttcagtaaagtggtttacgaaggtcgtcgcccgggattaatgctcgaaagcgccagcggcgaaaccactctggcagactgggcaagcgaacttctcgacagcatgcagcccgtggcagccttgctcgacgaagccaaccatcacagcttccacatagatactcttggtcagcaacgccttaagatcgctgacgccagtcatacgccatccgcgaaagtgctgagaattctggaagacgagaagattgaatttgctgaactgacattacgtcaggcgcaggcacatcgtaagttcctgagtgaacccttgtcagcagacgtccgcgccgagtggaaggcaacagccgaagaaagcctcaaagcacaggccgaactcgaagcaaacgatgttcagccctttgacgagtttctgcatgactatatgactcgctgaatgacccactgacaggcgattgcgctctgcctgctctcggccattagttctgtacgacgaagttattaaagtacaggtcatccactgacggagccccttccagctgagtcatcactgcacggacttcttccaaagcaatctggcgaagttcctcacgcccctgagtcgaattcatgatctctgattcctgtgcactgaacagcatcaccaggctgttgcgcaggtagggcttatggtgagcgaccgccgctccagcctcagtggtactgaccttaagcgcaacatccgtacgcagatacttaatccggccggtactgccataattaacaacaaatgcaggttcaaagtagatgtactgaacctgaggcccagcaagggccgcttcgtcttctgcaaaagccatcactggcaacgtcaccagcagagtaaaaaaaaggcgcttcagcattccgcgtctccgtcacaatgtagattatggtcaagcttagcagctgacgcggattccgctgggtgcgcgtgatagactcttgacaactaattcacgagttcacgtaacgacttatgatgctgcaacgtctatttcccgccccgctggttgccggtggctatctggccggttttcttatctgtgtcctgctgctggcttcagcgtactactttgaataccagatgttcctcgatccctgcccgctctgtattgttcagcgtattgccacactaggcatcggcattggctgtctgctcgcatttattgcccgcaacacccgctggccgcatcgcattgctctgatattcacactggcatcgtccatatttggtgtctgggtcgctaaccgtcatgtctggctacagggcctgcctgccgacgaagtgcctgaatgtggcccgagtgttgaatacatggcggaagttctgccattcaccgaactggttaccttcatgcttcaggccagtggcagctgtgcggatatctcatgggaattcatggcgttgagtatgccggagtggacccgtgtcatattcgttgcatttactcttgtcagccttctgggtctggctcgcgcctggagcgccgacaagcagagttgatgcacataaccgcggtattgcaagaaaaaaaactgaaaaaagttgcttgaaatgccgctttccacgcgcctatattggtgacactaaggcataagcagcaccgttttcacagaggaattttgacatgctggaacaatgtaaaaacgcacaggaacgctggggcggtgttcaccaactgatcgacaaatggttgaatgagcgccagagcctgatcgtcctgttctgcaacctcagcgccagcaagccgctgtctgaagaggaaccactggcagagaacctgcagcgtttctgtgaagttatgatggattactgctcagcagggcacttcgaaatttacgagcagctgatgaatgaagcccgtgaattcgacgatggcaccatcgacctggcaaatgaacacatgccacgcctggaagcccttaccggcgaatgcgttgacttcaacgatacctacgacaaacactgcactctggaccagctggcgaagctccctgctgacctgtcggccatcggcgaagtgctcgaagagcgttttcagattgaagacaacctcatcgaaaaaatgcacaacgtgcatcgtgaggcggttgccagctaagacaggaattctgttctacactgacaacaggacgcgcacttcgcgcgtccactgaccgctcacggaacaggttgtcatgatcccgcgttttattctttttctgctttccctgactcttctctctgcctgtgacaacgcagctgagcctgagaaattctctgaggtcgcgacacagggcgtctacagcattcgtatcaatcactctggcaccgccgcctttatcggcagtctgcaccacggtggcagctactggacactcgatcctgctgagcgtcatttcgactggaaccacaccagcgacggttacagcaacctgaccagtggtgccttttcgcccgatgatgcttacgttgccagcgccgacaaccgcacgatagtgctctgggaagtggctaccgggaaagccatctggttctggaacgcacccggcgacatcgaagatattgctctgacagagaacggcaacctcgcccttctcggaatgcaggactacaccgcaaccctgttcgatatccgaaatggcggcatccgccagcgcctggcccacgacggcattgtttacgacgtcagcctgagcgccgatggtctgcttggcgcctctgccagtgacgacctgacggccattgtctggaatctcaatgacggctcagccatctccacactgaaacacaacaatcaggtcaaaaccgccgagctatcgcccagtggccgcctgattttcacctcagccctacgcgaggccggtcgcatctgggatgcggccagtgggcagcaattgattgagcttcccggtggacgcggacatttcagtacggcacggttcgacgcatcagaacaacaactcctgacgggtaatacatccgggcagatacagctctgggacgttcagacaggggccgaacttaaacgttggcgtgcgaccccgggagatcactgggttggaaacaacgttgccctggaagacgttgccttcacggacaccggcgttgtggcagccgccgctaatgggcgcgtttatcacatgcagcggtgatgactaccgctgctcttcggttgagtatcgcgactccagcatagattttacctgcttcgcctgatcaatcagctccagcgcctgcccgggcataacgattggcgagtcaggcaccctaggctcgggagtgatcagttcgttgtcggatgtgtcttcctttttcgttgcgaccggcgccagaatatttgccgcggtatcgatattaacttctttggaagtaacaccttccggcgcttcgttgccgaaatgccactggccattcgcgtcctgccatttataaaacgtctgtcgtgtctgctctgtagaggcgggtggtgtgtaggccgaaaccccggacgacgaatcgctgttcacttttttcataatgtatggcgtgccaatcgccacagcgaggacgctgagaagaaacaggatcacggtgaatttcatagcaactccttttgtcgactctattccggcagaacccggatttttgcagtatgctaaagattatccaatagagaattctattttatcacccatcgctgaaaggaaacgatgtcatctatgactgcaggggttatcagtcaacagcccagggtttttacctacgccaaagcgatgcgggttctggtcgctaacgccaagggaggctgtggtaaaaccactctggccactaacctggcctgtcagtttgcccgtgaaggtaagacgacaacgcttattgatcacgaccctcaggcgtccgcaaccgactggctgaagctgcgtagtgccaggtttccaattatcaatggtattgaggccgtcagagagcgtcaccgcacgggttcgacgctcagttggcgcatgcgcatccccctggcgacagaacgcgtggttattgacacaccagccggcctgcatggcaatgcactgtctgacctgattgctcagtcggatattgtcattatcccggtcattccatcggccattgatatgcgtgcagcgacggagtttattgaagagctgcgtaagacgcaggcctaccgtcaaaaagcctgtgccatagctgtggtcgccaaccgggtgaaacgtaataccttgagcttcagctcactgaaatccttcctcgacgacctgcagattccttttgtgaccgcactgcgcgatacgcagttctacgtaaaggccggagagcatggttttggtgttgtcgattttgaccgacaacaccccaaagaacaggaagagtggcaaccacttatgggttggttgaataaaacgatgcaggaaatccagcaaaaccgagaatgatgtcaggcttcttcctcgtagccgtacagatgacgcacttcagccctgacagccgctttggcccccatcctcaacacctgtccatgcgcccctaccaacgcatcgaaatcaagctgtaccagacgctcaaaatcatgctgtaacgaaccccctttgggcgtcacgcgtttaagccatggcccacctatattcatccctcgatgaaacccaagcagcttgaatacgacccgcgtaaagcctgaaaagtgtcgccagtcgcggtgatattggagactgtcagtggtgatcagcagtctgtgtttttcactaacaacgcggcctctgggtagactgcattgcggtaaacaaaaaactggctgtctcgggtagggccgggcgatgcttcgtccaccaacacgtctatttcgggtgagctatacgtgctctggcccgactgagcccagaaaaggcattgatagcgatcgacataatactgatcatccagcccgtgaaagtcaccaagccggacaacgcgggcgacctgccccaacgcatcaagttcgcgcagcgcttcgtcctgaagcctcacaggattgaccaacgtgagctctttgccttctcgtagaatgatcatgttgcggttaaggcgcattccagggccaacacgtatactgccgtgtacccagaacacatcagagaacagttgctcgattgggtcgtgcggataggcgggtgcgtacatgtttcctcctgaaactgtgtgtacagatgtccggttcagccccgcacaagatcagcgagggctttgcattccttttcattattgcagattagcataaggtctgaggatacgcagcggcccttatccgccggattgtctttatttctggcccataagatcccaaggccgtagcgctcagcttcgagttccgcttttttaagtaattcgtagagatccccatgctccaggcgatcagactgccgccgacgctggcgcaatggctcgatcatttcctgcttccagctcacgtaatcgctgtcggaaagagatgcctcgtccacttcaagaccctgctccgataaccagagcaccgtcagcaactgcagaatatcggcaccgtgttcatcctgcatcttcagcagaagggcctcgactccgctgcgtgagtaaacgctcagtgcatagatccataacggattctgcgttggttcaacactatcgaccatgctaacaacttctccaagttaaacgcgcatcaggacactggaggtagttatacgataggtgtatctttttgggaaatgtggcgacaggaagtcaggcggggaaataaaaacccggcagatttctctgccgggttgggttcggttcagcatcagagatgccgaccttattgtagtaacggctctcaccccggaaaaccacaacaagatcaatatacaggagttccagatccatgcacaccctcccctatacacttgggctcgacattggtattgcgtccgttggagcggcactactctccgacgagagcattctggggatgcatgtccgtaccttcagtgcagcagaaacagataaagaaggcgacccactcaacaaaatccgtagagaagcccgatcagctcgtcgaagaatacgccgccgagcacaccgcctactgcgtctacgcaggttacttaaacgcacaggcttgatttcagatacctccttagaggtactcaaaacttcaaagacgccttggcaactgcggtcagaaggcctggacaggctgctctctccaagtgaattggcagcagccctctaccatattgttaaacaccgagggttccaatctaatcgcaaagccgagcttaaaactgatgccaaagcagggcagatgctgtcaggagtatccgcaaatcagcaactcatgcgagacaagtcataccgaaccattgctgaaatggtctgcaaagatgatgcgttcaaagaccataagcgtaataaaggcggtagttatcgcaatacctttgcccgctctgaccttgccgatgaacttaaaacgcttttgaaaaagcaacgtgagtatgacaacccgctcgcgacccccgagcttgaagaagcggtacacacattgctgatggcccgacgccctgttttcaaggacgatgacatcgaaaagctggtcggcttctgtacgtttgaacacggtgaaaagcgggctcccaaagctgccttcagcagcgagcgctttatttggctcggcaagcttaataatctgcgactgatataccccggcgagcaaagatctctgacaccagaagaacgcagccagattatcaacttaccgtttacccaagcctcagtgaaattcagccagatccggaaaaagctcgatttaccagaatacgttcgatttaacctggtgcgctataaaccgggtgaagaaacctccaaaagcgaaaccgctaccttcttcgaagcaaaagcctttcacgagctgagaaaaacctaccgggaatcaggtatcagcgagctctgggagcgggatcagcatgatccgcaacgactggatcagatagctactgccattgctgtctaccgggatgatgaacgtatacgtaacgaactatccccacacactattgaaaacgaagtggtagaagcggttctgaactgcgactttactcagtttattaatctatcactcaaagctctcaataaaatattgccgtatatggagcagggccaacgatacgatgaggcctgtacttccgctggttatcaacatcattcgcctcagcagaatgaagagaagtccgggcgaatcccacccccggataagaatgttatccgtaatccagtggtgtaccgatcacttaaccaggcgcgcaagttaatcaacgccatcacaaagcgatatggtgccccagcagccatccacctcgaaatggcacgggatctcagcaaacccttcagcgaacgtaagtctatcgagcgcgagcaggaaaaataccggaagcagaaagtgcagctccgaaacgagtatatagagcactttggtactgagcccaatggcctcaacctgcttaaattcagactatacaaagagcaggatgcgcaatgcgcctacactcaaaaagcgctggatctcagccgcttgaacgaagctgggtacgttgaggttgaccacatcctcccctacagccgcagctatgacgatagcttgctgaataaaactcttgttctcactgaagccaaccgcgacaaaggcaacagaacaccatttgagtttatgggcggtgatgatcaatctcagcactggcagaagtttgttcgctgggtgcagatgaacccaaaaatccggcaggcaaaacgaaatcgttatctgcgtaaagacttctctgaaaaagccgcccgggagttccgagaccgccacctaaacgatacgcgctatatcgggcgagaactgaaggccatgatcgaatcccatgttcaatggcatccggactcgaaaagcaaagactgctgcgttgtgttaagcggacaactgacagcactccttcgcgggcgctggggctttaacaaagaccgggccgccggagaccttcatcacgctgtggatgccgccgtagtagccgcagcgacacgtggcatgattcaacgaatggcccggcattctaaattccacgagcttaaaaatgtgcgcaccagttatgctgatcctgacaccggagaggtagttaatcttgccgcagcacgagacctggaaaagcattttccactaccgtgggacaacttccgaaatgatacacttgcctatcttaatccgtctgcgatcagcgcagatgagtcggcacaggaaggccatcggggagtacgagtgtcacgagcgcctacccgccgcaagttaggtgccgcgcaccaggaaacgatccgctcgaaaggcaaagataacatcctgcttgagcaaggtttgtctgctgtaaaaacaccactttcgaagttaaccctcaaaaacatcgagaatatggtcggctacgaagatcctcgtaatgcagctcttgtgaaagtactcagagaacgtcttgaggccttcggtggcgatggtgcaaaggcctttgcacctaatcaacctcctgtgtacaaaccaagtaagcccggaaaacaagcgcctgaaataaggtctgtaaaaatggcctcgaaaagtaaaggagcattgcatgtacgagaagggctcgctgatagcggtagaatgattagaatcgatatatacgaaacaaagaatggatatgtcggtgtcccgatatatgtatctgataaagcgagaagtaaattaccaaaagcttacccgaagaaaggcgaagaccgcgccaactggcctgaagtcgacaccaacgataacttccttttctcgctctacagtaccgactggatagaagcaaaaacgaaaaaagagacaatagcaggttacgtcaaatcatatgacatatttgatggtcgcttgctggtgtacgctcacgataacaagaaggttgtcagaaagttaactctgagcgcgttggctgaccttcagaagctacatgtttcaattcttggtgatttatacaaaggaggcaccccgaagtgctctccactccgtaaaggccaggagctctgatcaatgggctggcgcagtgtggttatcagccagcctgcgtatctctccctttgtcgtggtcagtttcatatcaaactgaccgacgactcagaggcctcgattcctctcgaagacctcagtgcaattattcttgataacccccggatcactatatcccagcccatgctctgcgaacttgctgaagccggcatcgtagtagtcacagtagattcccagcatttgcccaatggcatttttctgccttatcaaagctatcatcgcaccttaaagcgcttacgcgctcagttgaccctgccccgcccaaccatcaaacgctggcatcaacagatcattcaacaaaaaatacgcaatcaggcgcagactctcgcactctcagggcagaagaaacccgtacaggtgctgatgcgtctggctgcaaacgtaaaaagtggcgacccagataatttcgaaggacaggcagcagcaatctactttcgctatttgctttcccagcctctcaagcgacgtgtaccgaacttttttaatggtgcacttaattacggttatgccgttgttcgtgcctgcattgcccgctcgatcgttgcctcaggtttacatcctgcgttagggctttttcacgacaatgaacagaacgcctttaatctcgccgacgacctgatagagccgtatcggccactgctggatcactgggtattacagcactacctggacgaagaagaacgggaactaacgccacaggacaaaggcaagctggtcagttttttacatcaggacataggtaactgcctgaacaacgatcaaggcacagttttagccaatatagatcgaatggtgtcaggccttgctcaggcttgcgagactcgagataagtcgccgttatggctggctgcacatccgaaacaggattgatcagatgagtaaagagacgaggcgatttatgcgattgatagtcttctttgatttgccagtaactacgcgggccaaaaaacgtgcttacgtcgttttccgacgttttctgctaaaagatggctacgacatgctccagtggtcagtctatagccgcatcgtcaataaccgggacgatgcagacaagcacctcaaaagactggagcgcaatctacccaaagaaggctctatccgctgtcttgaggtctcagaaaagcaattcgccaatatgaaattgctcttaggagagctgagttttcaggaaaaacgggtaacagcagaccagatgctactgttctaagagtaaaaaacaccaccaaaacacaagaaaattccttgtatttcagtgggttatgtcgagcttattgtagttttccggggtgagagagggaactacaactagctgtggtgtaagtagcggtaagacagaattgtagttttccggggtgagagagggaactacaacgccgcaggccgtagggggccgcccctcactattgtagttttccggggtgagagagggaactacaactgtcctcacgtcactggaatccgcggcgcaattgtagttttccggggtgagagagggaactacaacagaaacgcatcaagagccgcaatagtcagtattgtagttttccggggtgagagagggaactacaacctccgtggagtgccaaccccagaaagccttattgtagttttccggggtgagagagggaactacaaccgaatggcagcgaagaggcgtcccccatctattgtagttttccggggtgagagagggaactacaactacttcgccaccggtagtagttactttgcaattgtagttttccggggtgagagagggaactacaacgaaggattaagaccgcccctccccttgatcattgtagttttccggggtgagagagggaactacaacaatggcgatcgattagacaacacaacataattgtagttttccggggtgagagagggaactacaacaatcacggcggcatggtttgcgccgccgccattgtagttttccggggtgagagagggaactacaactgttaggtacgttacggataccagtgaaagattgtagttttccggggtgagagagggaactacaacacgtctgggtatgactatgactgcatccgtattgtagttttccggggtgagagagggaactacaactggatgctggcgggatcggcgcaaccacttattgtagttttccggggtgagcgagggaactacaacacgtcatgcactttgtcataacactgccataaggtaccatccactaccttacaaaggactaaacaccgctggataaaggaatatgcccgcatacgaatttcaagacaccgctggtaatcgctatcgcttgagtaagggcgctggtccctcgtttttccatcctgagaacatctgctctggcagcacgcttcgagccgaactactgctggatggcgttgacagtcaggccgttgaccatggttttaatcatttctactttgacgttcttgcgcagctgcctgccaagacctctaacccccgaaaggctctggcagatgcattagccgggaattacctgacgcttgagcagataaacaccgcctcagctatcgatgactacgtgcccgacgagcgtccattcttaaaagcgcagatccagaccgcactcgaaaaaatcattgctgaggagcgccgtgaagctgctatgcatgagcgccagttatcgaaagagagcttcggtaatgttgcattgatttatctgggaggctttgcgtataacgcataccgctcaggaaaagaacttgtgctctggttaaaagaagtcagcgatttggtgaatccggtggttcgcatggaacaccgctttaaagcggcgcaagctgcctggcttcaggataatcttgccgacgccgcgaacgtctatgcgcaaacttacgtcgagggtgaaaagcgcgagctggtcgaagcactgggatttgacccaaccacgatcacgctcgaacagcttgatgaagcgatggcgatggccagcctgatctgggacgaccctaatcttaagatgcaactgaccaagttcatcaaagactacgcttctgctcaacatagcatcgaaatgaccgaggctctcggcgccgaggcactgggcattctgttgtcggttattctggtggcgttaaccgcaggcgctgcgctacctgccgtcggctttaatgcggtgcgtaagtttaaagtgctgggtgaattactggttgaatacgcccgagtaacgcaaagaatagcccgacaacttaaacgatttagtgggaagggtaaaaaatcagcgacgcattctgactttgactcagatgagattattgtcaggaaaacaccgccacccccgccctacaaaccgcatcccggtgccgtcgagcgcggcccgaaagcaggcgataccatacacaaacgactgcacgaagacggcgagacgatagactcctatacccttcaggctgatggtaagccgatgggtgctgatgccgggaagatgccggatgagttgtcgggcctggaagatttgccagaaaatcatgatgcgctagtggaagagggctggccggatttaaataaagaatatcgcccaggaaagttcactgctgattacgccaactttaccgatgccagccctgttgttatcaaagaaggtgagaccatctaccgtattgttgatgaattgaactttgatggtggcggttactgggcacgggagctaccaccgaacaaaactcaatggcggaaaggttacgcggttaaagactcctggaacgacaatggctattacattgagcataccgtgcagaaaggcgaaagcattaaagcctgggaaggtggagccgctgggcagcgttacgaaaagcatgaaggtaaggatttttacctctctggcggcgatagtcagctctttgtaacaccgggtgaaatagataccgcgcctgcaagactaaccaactggccagagaaataagatgaccccagaattaaaaaaaatattattaacccgtaaattctccagtatcgagtacatggaagagctggagcattactgggaaaaatctgtacaggggcttgttgaatgcctgaggtatttcgatcagcactgccaacacgtcgatatgagtgactgggtacctgctgataagcccgaggcatgggaggatcgtgcgttacctaactttaaacgaatactatcgtctatccagagctcaatcacttatgccagaagtggagatctgagctatatcgagggcgttaccggcagtatgcaagggctgtccaaagatatggatgtgctgggcaataaatggtggttttgtattgatgaagacttggcaagaaagcagggaacggaccagacaaaggcagagcaaattgcctctaatatctggagaacagttggcgaatattggaagacttcggaatctattctgaaggagagcatcaccggcccgatagatgagcaggatctgctacggtatctacagcccggtgagcaggtgtgaggctgtaggaggggagcgtctccctgagcgcttggcggggaagaatccgctggcagtgcggcgctgatctatctgggaggctttgcgtatcacgcttatcgttccgggaaggatcttgtactctggttaaaagaagtcagtgatctggtgaacccggtggttcgcatggaacaccgctttaaagccgcgcaagctgcctagcttaaggataatctcgcaaacgcctacgcccaaacttacatcgaaggcgaaaaacgtgagctggtcgaagcactgggagggttctactactccggtagatgtctacagcttcatttgcttattgtagttttccggggtgagagagggaactacaacccgtcgatgtcggtgcaggatcagaacgagattgtagttttacggggtgatagagggaactttaatcagagagctttaagccttgatgattcaaacagggaattgaaacggcgctattggcctgactaacgcgaaaataatctgtggtactcttatgtcaaggaagttaaggcagaaaatggatgcaatacgatcacggccacagaagcacacaacacctgttcgagatgacaccgcttgaggctgcaattcaacaatatgaagagctggcgaacaagcactataccgagcgcttgagcatgctcaaagcatcaggtaaagagaagaaacgcgccgaggccagtttggcaaaagcccagcaatttctgctgcagcagcgtcgccatattcgcaacctcgcaagcatccagcttaaacttgctgaatatcaggcatcaggcaatgagatagccgagatagatcccgaggccctgctggaggagaagcaccatccaaccagagttctggcacgcaacatgacagccgatgctaatcccaggccttcaagccgacactctgcccatcacattgttgctggcaagggaatccacccaagaactgccgatattcgcctggttattcatttcgcaggtattcgcataaacgaccccgataatggcgtatggctacctatcggaaaatcagacaaaggtcactgggccatgccctctgctccagcccactctgaaatacatacctttaattacgaaacatgggttaactatttattagggcctctcgatagtgaggtgactatcaggtctgcactgaatagaatcagaagtttgcttagagatggtcaacaaccaccgcaggtaacaatgaaaaaagatactagctgggcaggatactaatgggcatctattcccttcacgcaaacattgaacattacctgacattcaatttgcccgtccgcgatctattacatgccttaaaagataagtttcctcctaagcagatactgcacttttataaacacaaccttagcctttcggatggctggcctgctgtgcaggcgagctttgtaggtattgatagcgtcacttcccgccctgccttacccgatataacaacctggctcccagggacaatgatattgtcacctcatgcgaaacaactacttgaaggagtccttagcgaatgtcagtggctcccagtcgataccaaagatggggagtattggatcgcttacagtcgttcagtcatcactgcagacgagaatcttagtgaaaatattgtcaacagcggggaaataatggatgcaggcaatcttaaatttccagatcgcctgaatgaaagcactcaagcgactctatttaaatcagattctgacggctatcgtcagacattcggcaacgacctgttgaaaagtacggtagaagcaggagaccttaagggtattactttttccacagacttagtctcgcctgcttacatgtccgtgtaagttgcagaatagtcataccaattccctcgggctgagttacacctgattggttcgctcccgcttctgtggcaaactgcgccgccattaccagccccttttctgtgtgttttctatgatcgagtttaatcaggtttcgttgcagcgtggtactaactttctgttagagaaagccagtctgcgcattcacgacggccagaaactggcccttatcggcccgaatggtgccggtaagtccagcctgtttgctcttctcaacggagaactgaccgtcgatggcggcgacctgaacatgccagcgaagtggcgtatcgctcatatgaagcaggaagtcgaagccagtgaacgctgtgcgctggattatgccattgatggtgacgcacgctaccgtgaaattgaagccggtatggccaatgccagtgacgataatgagctgactcgctggatggatgccatggacgagcatcagggctatcagattccggtgaaagcagaacagttgcttcatggtctcggtttttcacagaccgacctgaagcgctccgtcaaagacttctccggtggctggcgtatccgcctgaatctggctcaggcactgatgatgccgtcggatcttctgctcctcgatgaaccaactaaccacttagaccttgaagccactctgtggctcgaaggctggctgaaaaaatatcccggaaccctgctgtttatctcgcacgaccgggattttattgattcggtggcagaccatattgttcacctgcataaccgtgaactggtggtgtatccggggaactacagcgcctacgaacgcatccgtgcggaaaagctggcccagcaacaaactgtatatgagaaacaacaggaacgtgttgctgaaatcgaaaaatttgtcgcacgcttccgcgccaaagccagtaaagctaaacaggcacaaagccgcttaaaagaactgcagcgcatggagctgattgctccggcgcatgtggattcaccgttccgctttgaatttccctgtcacgaaaaaatgtcgacgccgttattggctatcgacaacgctgatctgggctatgccgacaaaacgatcctgccccaggtaaaaatatccatcgtacctgggcaccgtattggtttactcggccccaatggtgcgggtaaatcgacgctgctaaagacgctttgcgaagaagtccctttgctcgcaggcgagcgcagtactggcgaacactgtcatattggttattttgcacagcaccagcttgagtctctcgatgtaaaagcaacaggtgcccttattctgcaacgcctgcgcccgacagccagcgaacaggaaatccgtaattttctcggcggatttggcttccatggtgataaagctttagaagttattgagccattttctggtggcgaaaaagcccgaatggcactggcctgtgttgcctggatgaaacccaacctgttaattctcgatgagccgaccaaccatctggatattgaaatgcgtgaggcgttggcactcgctttacagaatttcgaaggcgcgattctaatcgtcagccacgaccgtcacctgctgaaatctaccgttgacgaatactggctggtagatcatggaaaagtgcagagtttcgatggcgaccttgatgactatcacgattaccttaataagcgtgaagcgaacacgcctaccgcagaaggcactgctcctgccacaaccgaggtgaagcaacccgctgtagaccggaaagaacagaaacgcatcgaagccgaaaaacgccaacgtctggcaccgatacgcaagcagcaacaggtggccgagaaaaagatggaaaagctccagtctgagctggcgaacattgaagaaacaatgggcgacagcggtctgtatgacgccagccgcaaagatgaattaaacacattaattcagcagcaggggaagttaaaaaccgagcttgaagagattgagatggagtggatggatttaaccgagcaattggaagcagcggaataaaacactccacggacactcagacagcgattaacgcctgacgcatggcattgcgcagaaagccgggcttcactggtttatgtaataccacaataccgtcatccgccagagttttaatacgctcaggcgcggtatcaccggtaatcataagagcgggcaaattggaggagagctgtgtttgtatgtgccggatcaaatcctggccatccatggctcctggcagacgataatcactgatcagaatgtctgcccagtgtggctcggcttcaaacatagccaggcccgcctgggcatcagcataagctctcacttcacacccccaacccgcaagcagttgctcggtactctctcgcaccatggcatcatcttcgacgagtaatacgttcacgccggcaaatatcgcatctgcagatacttgcggttttaagccagagggagcgccagaataaacatcggaggtgtcacttaccatgtcagcaggtgtatcggctgatacctcatgcgcgattgctacagtaagggtgaattcagatcctttgccgggttctgatctcacctgcaactcatgcccgagcaggttggcaagtcgccggcatacggacaagccaaggccgagccctttctgccggtcacgctcaggattgttcagctgtacaaattcctgaaatattttttcctgctgatccttcgggattcccattccggtatcagatacccggacaagtaaacgagctggctgagcgacttcggtcgagatgacgacctcacccgactcagtatacttaatggcattggtgatcagatttctcaggatattccccagcagaacagggtcgctgcgaacagcatatcggcaaggtttgatactcagtttcagtccctttgcctctgccacgggtctggcttcaataatcaggctattgagcagtgcatcgagagggaagtcagtgacttcggcatgtacgtcgcccgcatccaggcgcgatatatcaagtaatttccctaagaggtcgtctatcgaggtgaccgcagagcggatatgagtcgcaagctgttgaccgcgatcgctggtaacttcctgccgaagcccttcagagagcaacgacagtgaatgcacaggctggcggaggtcatgacttgcggatgccagaaactgagttttcgcccggctggcagcgtcggtaatctcatactgctcgcgcaaagtctcggccaggcgcatattttttaacgtcagtgccatcatgtctttgtaagtaatactgcccgaacgagcgactgaataagcgacaccaatgtaggcaaggaatgccatacccatccctttgtactgagggtcaagttgaatcagacacataataatcatcggcatggtgctgataatgagataagccgtatgactcagtaaccagatggcattggtactgaccgaggaaacggtaaccccgatgatcagaacaaataacagcgtctgctcagagaattccgcgggattaaaaaacagaacaccggcacttccccacagagatgccagcacaaggacgcctgacatatacatgccgcgccagaacgaaagagaacggcgctcatagtaattccggtagcaccacagcagcccagttccgaaaacttcaagtccgacacaggcggcatacc

SEQ ID NO: 2890 - DNA, 23180 bp, synthetic construct
  misc_feature 1..23180: note = Synthetic
  source 1..23180: mol_type = other DNA
ttcagcctgacattctctgcttcaagcgctttgaggcgtttaacgtcgtcgcggaccatctcgccgaagcgctttcgccaggcgtagatcgacgcttcgcttacgccgtggcgcttggccacttcaggaacgctctcccgatccgcctcgcgcaatatccgcacaatttgttcgtcgttgtaccggctcttcttcataccaacttctctctagatttctttggtacgaaatttcacggtcaggtcactaccgctaaacccgcattaacttaaaccaaccagcctccacgattcccggggcggttcaccacctcaatggaacgttatttcgagtaatgttactaaaatcatgaggcggcaataagccgacttcatatacatcaaccaaaaagttaattcgaacatgcaaacttcatcagcaacatcttctagaattgatagaaatctgtcgattaatacggatcagaacaacgaaactacatcatcaaatatcggaggaaaaatatgtactattgactcggttgatacgggctctacaactgccaagtcgcagtcatctttcacggatcaaatcaagattgaaaatcgaagtgttacgctagccagtccccaaacggagacgcaggataaggtcgacaacccagggaaagttccgcacaatttttcagataatatttccaaagaacaaaatattacaactgaaaaatttaattttttaaaaagagttgatgaggaaagactggcgcacgtgaaaattttaaaattagccgcgcaaaaactttcatctgaaaattttataaaaaataactcggattatgaaagcaaccgcctctctcctctgatcagagcaattcagatcctattaagcaaaagtgaaaatatttccgaagagtcctttagcacagatttagcgaatttttcgtttatgaactcgttgcctcccgaatctatcccactcctgaatagccatatttctaaaatagaagaattcaataaagacgccaattcattaatatatgaaacgcttctgggggccccagtgggcagcatgggtcgtcctactataccgacgcagaagaggaatgaaaaacttgatgcttacaaaaaaaatttggagcaaatgaaaaattgcaagaaatttctggaagggactgtgagggtactttccggtgttctttccacgaaaagtgatttaaccgataaccaaaaagatggaaataataaagttatcaacatggccagcaccctattaaaacacagtgataatattaatgaaaaatacaaaatagagtccttcgacaaaaattttccggaatttttgtccggcgagccgctatctcccgatttttaccagatcctggataacctgatggcagatatgggaaaatttattatccgtgcatcgtctttaatgaatagcttaatgtctgacaagccagtgtacttcgtagattactcatagactccgttgacgcgatacgcccacgtcacacttgggcatatcgcgcatacaatgtagtatcgtcgtcaccaaagccgaatcgcgtatctagctagctcactaacttgatacgcgaccggaattttggaaagggcgattttatataaacaggcaacttaaagatcaacgaaacgcggcaacaggtcctggtcagccaaacggatttcgatatcgtttgccgccttgacgtgatcgcggttgttcacatcgaataccgcgtccgtcacgctaacgatgatcgtgccttgctgcctgtcgtcgcgcatgacaggaatcaggtcgcgtgcttcgggaacctggcttgactcgaggacatgcggcaaataaagcatccagctaacgccgggccgatcttcgaatacctgctttccctgatatttccttggcccaaacgttaaattcgacggagtataaatttcgacgaccttttctacaacttccaccgccgatctatagtctccaagcctggaggtttcggcagtcatttcattgaccgtcaactcgaaagtattggaaaacaccgtgctgtcaatgcaaaattcaatcgagctgccacaacctttttgtaaatctccattccatattccgatgaacttggcgtcgtcaataacatcagcattttttcttcgcaattcgtcaatgacttcttttctgatcgcgcgaccactgaaaaccgggaatcgttgagcatcggcaatactacttccgcccagaaaccaatccccatccaatttcgcatccttttcagcaagaagttcaatgacaggtcgcaaacgtcggaggtgaaattcaaaatctgcctttcttaggttttcactatctcgatgctgtgaagttaagtacatgaaattctcacggctgataaacagaggggacactggcgcgcgcaagcgtatccatcagatacactcgtgcttcgggtgtttgaaagtaccatatcaattttgttggtggatttttcttaacaagcgtgccttgtttaaatatttgggtttttgtcgaggtaaatccatcaaagttgtatttcggatcgccattttcatcaaaaaatttatccagtaattgatcgtaatttcccttggcttcctgcaataggcactgctcttttacaaagccgtcgaaatccgtccccagccaggcaaactccatattccagtcatccttagtctctcggcctctgccatccgtcgtgataccgtattcgtatccagtgatgcgggcttgataacgccgcggctcggggttcatgttgtgctttctccgcactttttcgccgcttttctcaggcgggcacttgcaacgcggttgctgcgtgcgcgtgtttgcctgtgcttccgctctcgccttgtcattgtcctgtgccgtgtctcccggcaacgccagaacagccgccgccgccgcgccgcccgccaccgccgttgcggcacctgatgaaacgaacgccgacaatgcggctgcaatggcttcgccagcccctccgagcaggggaattacgaataccgccatttacctgttctccttcttctcacgcagcttcgcgcgtgctacatccattgccatatcaaagcgctgttcagggggcatgcccggtttgccgagccatgccgcgatggctggcttcgtgtaaaagccagctgcaatcgcttcaagatatagaaactgaacgatctgccggtcgtaggtgaatccaagctctttcgtgcgcgcataagctgcattgagccggtcgcgcaaagtcggatcgtcggccagcctgggataatcgcgcacgatatggccgcggataaagtccacatagttacggtcttcgtagactttcaggatcgcccattgttcttcagtgagttgcattgtcgttgatggtgaaccgttgtccttcgttgaggtattgccatgcttcggcggtcctgaaaaggctccggctggccttgtcctggtacgctgcattcagcgcatgcaataccctggggtcccagaagcgcagcagtgcagactgcccggttggtagcctggtattcaggtgcgggcgcaactttgcggcttgcctctccaaactctctgaagtaatcagccagatcaccccagggcggccctgttcgagtttgccaaggtctccaacacgctcccgcgctgtcttcgggtcaatcagccacggacccgcatgcgcaagcgcaatctctttcgtgcccgcgaacagcgaaaccgccatgccatcttcgggcgtgagttgccagccggtgtgctgctgatactggagcccatcaaccagcgccacgacatggctactgtagtggtgacgcttacggaattcgcggagttgtgcagcaacagaggcaggaatcatcagcgttccaatgtcatcgagccttgctcggcggcgtgaatcatgcattcgagacaaatactcggctggggcaggagcgaccacggcgtaacgccatacatcgatgccttgccctgcttttgcacggtaatggtcttgaggaacaggtcgccgggcccgccgagcgtaatgctgccgtccttgatttggacgaacgcgccgccgcactccaggatgatttcctgcgccgcagaaaccttgaccttgccgttgacgctggcgacgttcacgtccttgtccgcaatgagagacatcgggccgccttgggcctggacttcgacagggcctttggtcgcaaaaatcttgatgccgaacttctgtgcgaacagtgaaattctttcgcccgccgtgaccgtgaagcgcttcagcacactccagtcggcatttttcccggcaacggttgaaatgctgtcctgcgccgaaagctgaacgccaccgcccgcgacaatgcccgccgatgcgggcgtgctcatcagcaggcctggtttcttcaggccgtccagatcgtccttcatctgctgttgtgcggcggtgtcggcaggctcggccttcgcgctgctggccgaaccagccagtgtcttcgcaagttccagcgcgctttccagttgcgcaatggtttcctgcatgtcgagctggtgcccggttgcgccggggcggtcataggtcgtgaccatcacgcccttgcccgcacggttcacgccgtaaccggacgtacgcgcttcaaagccttcgccccgatattcgagcttgctgtttaccaggtagccgagattcagttgtgacttgcccgagtggtcggtgctgagcttgatgccctcctggcccgaccagtcctccatgcgcagcttgttgttcttctgcgtgcggatcacgttgcgcgagagccagcgccggtcattcgtcaccaggtcgcgcgcctggctgtgatggtgaaacgcaacgatttcaggcttgtccgggtcgccatcacgacaggtaatcacggcttcggcatcgtccagcgctgggaaatgcatgccggtttgcagcttgcccgcgaacggttttgccagccttagcggtacgctctcgccaccgttaggccaagtctcgaagtccgcatcgaagcgaacgatgtagtggccgtcttttgtgatgtacgcgtatgagtaggcgtccgggcttgtgacgcgcgctgacagggtaccggtcactttggcccaggtttccggctcaaattggagacgaaaacggcggtcggcgggaatcgccctgtagctgttcatataggacgcatcgcgtgcgccgctatgggtgacttcgacaatcagttggcctttcggtgcatcgggcaagacaatatctgtttccagcacgtagcccggctgcaaggccaggacattgctttcgccttcatagacgacctgccaggcaatcgccgcttcgtggcggagttgcgcttcccacttcgcgcctgcctggtccaggtggtgagtgccataaatatagggctgaccataggtggtggaatcgcctggggccacattgacttcgtctttcagacgctcccacgctttttcagggttgtaatccgcaaccacgaacgactgcggcacgatcacggtatgggtcctgatcgccgttacggcctcgacgccgtccgcctcaagtcccgccgcttcgcggtacggcacgatgcgttgcggctcatcgtaaatgtaatgatcctgatcatctccgtagaccacctggtcgccgtattccgtctcctggatatagctgtagatacccgctttctcctggagcatgtgggcataggctgcatcgctcatgccgtgctgcatgcggaacgcgtgtgtcgggtactgacggcgcagacgaaaactgaattgatgctcacgcattccatgaccgcgcaggatttccgcgagaatgccgggcgttgaagcatgctggaaaatcctgtttcgggtgactgcggcgagccgaccgacatgcgacttcaggacaatttgatactttacatagtcgctcgtggtctgaatcgtggaaaagcgttctatgaagccgctgaattttcgcggttggccatcctcggacacgatgctaaacgtcgcatcaaggttcagataatcggtgcgtggaagctgttcgggatgcgtcacctcgacaatcacttcggacggtgcgcccatcttttcggtggccttgaacgacacgaccgagagcgccgccgcgctggcggtgccgggcacgtcgagaaaatacatctggcgccccgcgacaccctgacgtaatggatcaaattctgccacttcccgctccctgaaaagatcagcgatgcagcattagctgtcaaacctgttacctgaccatttaaatccattaaggtccacgaatttaatatgggataagcagcgattaacaaaccgtgacagaatttcgcattaatctattcccgatgcatatttctgcggcaatgtactggcgattgatgtggcgtgatcgattcgctcaagttgagtcgtcgaagtgcttggtcgattgattagcgtgcatggcgcaccgcgttatctccggtcagacaatgggccagagtttgtcagcacagcgctattgaaatgggcggttcaagagcagattgagacggcactgattgatccgggtaagccttggcaaaacggcaccaacgaaagcttcaacggaaaattccgtgatgaatgtttggcgatggaatggtttcgcaaccggatcggagcgaagatcgtgatcgaagactggcgtacacattacaacgaagtgcgtccgcattcgagtttgcagtacctaagcccggcagaatttcgccgggctagcgaacgtagttcaaccactggggctgtgaatctctagaaaccagtggtacgaaaatacccgtcaggccagatggaccagaaaaaacaaaaaccccgtaagttcttgaacttacggggttttgatattccattgtggcggagagacggggattcgaaccccggataggtattaacctatacacgctttccaggcgtgcgacttaaaccgctcatccatctctccgcgaggacgcagagtatagcaaactctcgcccattcgccaggttttccgcgcctctcctttggcttgccagcatcgctccatctcacggatgccggatatagtcgaccagtgcccgggtataggcatcgggacgcgtatccagcaagctcaccgcaatcgcgcccaaaaaaccagcagggacaccaaacacgcccgaactgatcggatcgataccgaaccagtgcacgccgcgataccccgtgagctggatgaaaaacggataagtcgagacgatgtagtaaacgcacaccagcaatccagccaccatgcctgccaccgcgccgcgccgtgtgattcttttccagaacacacccagcaccaggaccggaaaaagactcgatgccgccagcgaaaacgcggcacccaccagaaacaagatatttcccgcattgagcgatgccacataagacgcaaaaagcgccacgcctagcaataaaagcttcgaaacactcacccgacgctggctcgaggccgtcgggtccaccatgaaatagtagatatcgtgcgagagcgcattggcaatcgtcagcaataacccatccgctgtcgaaagcgcggccgcgagcgctcctgctgcaatcaggcctgacatgacgtagggcagcccggcaatctcgggtgccgctagtaccagcatgtcgggttgtatctgaatttcgccccaatgcacgatgccattgagattgctattgctgatactcagcaaataaggctcgaccttgcgccattgcatgacccattgcggcagttcgctaaaacgttggcctaccaggtgagtcaggatttcgtatttgatcaggacagccagcaacggcacggtcaaatagaacagggcgatgaaaaagagtgtccagcctaccgagcggcgcgcagaggccaccgatgtcgtggtgttatagcgcgtcagaatatgcggcagactcgcggtcccaagcgagaggcacagcaacaacgcaagaaaattgatgcgatggtgctcgcgtgcttcttgtgtcgcagcgggaaacggttcatgcatcggcaggggcgcggctgcgcgggctaacagggtgtcgcgctgctccgtccacctgatctgcgcgcttgccgcattcagtggaaacgcttcgaacgcccgctcaagcgtgttgatctcgcgtaacggaccgttacgtcgccgcaacgtcttgatctcctgctccatgcgctgccgttcggtcacaaatgagccaggcaaggtatcgagcaggctctggatgtgtgccgcccgttgccggtactgatcccggatgatctgttcctctggcgcagcaagcacctcgtgctcacgcgtttcgacttgcgtcatcagcttgccgtagctgaaatgcggtatccagccgagcccatccttgtgcgcaatcattgccacgggaatcaggatggcggcaatcagaatgatgtattgcgccacttgcgtccaggtcaccgcgcgcatgccgccgagaaacgaacaaaccagaatgcccgccagcccgcagaaaataccgatggcgaaatcgacgccgataaaacgcgcggcaatcaggccgacgccctgaatttgcgcgacaagatagacaaacgaacacagaatcgtggcgagtgcggcgagaccacggaccagattgcttgaaaaccgtgtgccgagaaagtcggcgatggtatagcgcgccagcttgcgcacatacggggcgagcaacaaggccacgagacaatagccgctggtccagcccatgagataggcgaggccatcgtagccggttgcatagagtgacccggcgaggccaatgaaagaggccactgagagccagtcggcggccgtcgccatgccgttgaagacggctggcacacgccgcccggcgacgtagtattcgaccagatccgaggtgcgcgataacaggccgatgaccgcataaaccgcgatgggcacaaacagaaagacatagccgatccacgtgccaggcccggtgctgcgctcgatttgcagcatcacatagataaatgccagaaagcccagcgtgtagaacgcgtatgaacgaatcagccggtgcgtgagcgtcatgaggtagacggttggggcttgccgtttgccggagcgtctgcatgctgccgcaagattcggtccgcgcgttgcatcagcacgatgtagctcacgacgagcgccagataaatcaggatcgcgccttgggcaccgaagtaaaacggcaagcggaatccagcgaaagagatttcattgagttcgcgtgcggcaaatgggagcgcaaacgtgaccaggccgcctaacgtcagtaatcccgcgatcagacgcaggttaaaacgccaataccgttggtaagcgagcgccatttcggccgaaacggctggcggctccacgggcggcggtgggcggaaaggagagggcctggacatgtgtctgtgtaccaaaaagagatagcgttcgcaattaggattgcccatgcagaccgctagataaggacatcgtcacagaatgatttaattttgagattttattgaggaagggttaaacaccttgatgttctagagtggatcaattttaagattgatcccataggtttaggactggggcgacgtgtatttttctcggctaggtaaataagtcaataagaaaaagcaaaggccagagatgggtgcaccgatatcgtttcggatggagattatttttttaacatttgcgcgacagtattcatggcgatatgaaatgtcgcgctcgctacgaacgttacgaaattctgatttcgatacagtcgggcaatggccttcttatcttgaaaataaggtgttgaaagacatccgcaattttaaaagcaatatcgaaatacaaaaaataaaggcccgacaggcaagcctgtcgggccgggttcggttcatcgcaatgaagcgataaccttattgtagcaacggctctcaccccggaagactacaacgagggccactctaaatgattaggatcgtcagtgcaattaaaaaatctaccgtatacattgggcctggatattggcatggcttcagtgggcgctgcgcttttgctgcccgatgcccaacgtattattgcgatgcatgttcgaactttcgatcgggccgaggtggctaaaacaggagagtcgttgaatagcattcggcgtgaatctcgtttaacccgccgtaggcttcggcggcatgcccatcggctggtcaggctggcgcgtttgatgaggcggaggggaatcattgattcaatcgtgccgaaagaatttatcgatcctctggtttcgccgtggacgttacgggctgagggtcttgaacggaaactcgagccgggagagtgggcaacggctctttaccatcttgttaaacatcgcggctttcagtccaatcgaaaatctgaagccaggatagacgagaaagccggacaaatgcttgctggtgttgggcatattcagtctcttttgaaggcgcaaaactaccggacggtaggcgagctaatcgcacatgatcaatatttcaaggaggcgaaacgcaataagggtgggagttatagccataccgttgcgcgctcggatatcgaagcggaattaaacactttatttgagtgtcagcgtgaactggggcagcgttatgccgatgcgaatttccagaacgaagtgcgcactttgctgttggcgcggcgtcctacattatcgggggagaaactattgcaaatggttggccgttgtacgttcgaaaaagacgagttccgtagccccaaagcgagctatcgtgcagagcgttttgtctggttgggcaagctgaataatctgaaaattatcaatggtggagatgcgcgtcccctgacagatgatgagcgacggaaaatcattgagttgccatttatcctgtcgaaattaactttccagcaggtacgaaatgtcctggatctgaagcgaacacagcggtttaacatggtgtcgtatcgcgttaatcctgacgcagcggaaaaaaatcatgaagacagtgttttttttgaagcaaaatattttaaagaactatgtggtgcatacaggaaggctggcctggataaagagtggcaacgggactctattaatccagaccggctcgatacgctggcttatgcattgacctgttataagaatgatgccgagagccgtgactggatgatggaacaaggtatcgagcccggaattatcgaggcggtgctggtcgaatcatttgaccagtttatccatttgtcacaaaaggcattaaaaaaaatcattccttttatggagcaaggtcagcgttatgatgaggcggctgcggcggcaggttatcaccctagccagttgaatagggatgcgattaaaacgaaatggctcccaccgcctgactcggggttgattcgtaatccagtagtgtatcgcgcgctgaatcaggcacggaagctggttaatgcggttgtgcgtcaatatgggcctccggccgccgtgcatatcgaattggccagggatttatcaaaatcttatgatgaacgtaaaaaaatagagcgggagcaaaaagagtttcagatggaaaaagaaaaatcggtttctgattttgaggaacgctttggtttcaggcccaaagcgctagaccgtgaaaagtggcggctttttcgggagcaactggatcaatgcccctattgtcagaaagcgctggatattaatcagctgtttagcgtgggttatgcgcaggtggatcacgtattgccgtactcgcgcagcctggatgatggaatgaataataaggttgttgtgcatattgcctgcaaccagaacaaggggaaccgcacgccttatgaatttcttgatggagaaaatgatagtgagcgctggcggtactttaaagcatgggtggaaggaaacaaggcattgcgccagggcaagagaaatagtctgttacggattcattttggcgcggagcaagcagaagaatttcgggcgcgccatcttaacgatacccgttatatttgccgggaatttaaacggctcgttgagacttatctggaatggcatcccgacgtgaaaggctcagaacgttgcgtggtggtatcgggcaggctcacctcgctgctgcgagcgcgctggggattaatcaagattcggaaaaatggtgatttgcatcatgcgatggatgcggctgttattgctgccacgggacgtaatttgatcaagcggatggccaactatgctcgtagaagggaactggagagcgtcactgaacgatataccgatccagaaacaggggaaattctgagcaaacttaccacggtcattcctgagtctcgttttcctgagccatggccgcattttcgcaaggaattacaggcctggctgacgcccgatccggctagccaactgattgacgtaccgggttacgacgatgcgttgcgcgaagccatccgtccggtaagggtgtcacgcgcaccgacgcgacggggtttgggtgcggcccaccaggacacgattcgctcgatacgggaaggatttgtctcggccatcaagacaccgcttaaagagctgggcatgaaggatctggaaaatatcgttgggtatgggcgtgatacagggttaatcaatacaattcgggcgcggcttgaagcatttggcggagatggaaaaaaagcatttgatgaaaaacagccgcctttatgtaagccatcagctaatccggagaatgcgccgattatccgtagcgtcaaattaatcacaacacaaaaaagtggcgtactggtgcgtggcggtattgcaaataatggtgcaatgcttcgggtagatattttttctaaagatagccggttttattctgtgccactttatgtgtcggatatcgtgaaaaaagaaatgccgaatcgagcttatacttctggaaaaaatgagaatgattgggtggtaatggacgatggttatcaatttttatttagtttgtatcccaatgactgggtgacggttcgccttaaagatgaggtacgtgaaggctactatgccggttttgaccgggcaaccggcaccatcaatatctggttgcatgatcgtaatcagttacaggccaaacagggtctgcttagaagtaatgggattaaaaccgcactgtcgattgagaaatgtcatgtggattttctgggaaatctgcatcgtgtgcggcaggaaaaacgtgaaccattgcgtgtctctaaagggcagaggtaaacggtgggctggcgcagtgtggttattgctaatccagccgcgctgacgctggacaatggtgccattggcattcggcaagcagggcaaagcgcgagagtgatgctcgaagacattaatgttctgatactggatcatcctcagatcagtctgactgctccacttcttgcggcttgcgccgaagcctgcgtggctgtcttgaccgtcgacgcggctcatttgcctaatggtgtgctgctgtcgtacttgccgcatagccgggcattaaaagtgatgaccgcacaattggctattggcctgccgacgcggaaatgtctgtggcgacatattgtgaaaatgaaaattatgaatcaggcagccatactaaagattgtggggcgagatgaatctggacagcgcttgtttaaattggccaggacgttacgttcgggtgatccggataaccatgaagcgcaagctgcacaagtttattttcgacatatttttcatgctaattttaatcgaggacaaagttgtttttataatgcggcattaaattatggttatgcagtgattcgcgctgcaattgccagatcgctgacgagttatggatttttaccggcattcggaatttttcaccataacgaacagaacgcttttaatctcgcggatgacttgattgaaccgtaccggccttttgtagatgctgttgtgttgcaccattatccggatgagcctgaacgcgaactggcgccagctgacaaagccaggcttgttaaggtactgcaccaggatatcaggatttcaagtcatcgtgcagaagaagggcgctgcacattaatggctgcagtggatgcaacggtgtcaagtctttcgggtatcgtattgaatggtacccggattgaaagcctggttttgccgctgtttgatgtttcagttcatgacgatttgtgatcatgagccaaattactcgtcgatatatgcgtctacttgttttctttgacttgccagttacgactcgggaaaaacgtcggacatatactattttccgtcggtttctgattcaggacggttacgacatgatccagtggtcggtttacgggcgaatggtgaatggtttcgatgatgcggaaaagcacatgaaacgtctcgccaacaatcttccaaaagagggctcgatacgctgtcttcaggttagcgagaagcagtttgccaatatgaagttgctggtcgggttgcaaagttttcaggaaaagaaggtcaatgccaaccagatgctgcttttttgaaggaaaaaaagcgtcggaattccttgcaaagctatgctggcaggggattccggcggggatattgtaggcttccggggtgagagagggagctacaacactcttcttcgacgtaagcttgaacttttgattgtaggcttccggggtgagagagggagctacaacactcttcttcgacgtaagcttgaacttttgattgtaggcttccggggtgagagagggagctacaaccgataaagccatgcaggccatcaaggtcttattgtaggcttccggggtgagagagggagctacaacacatattccggcgaatgcgcgtgtctcatcattgtaggcttccggggtgagagagggagctacaacggtagtcgacaacgcccctctgctggtcaaattgtaggcttccggggtgagagagggagctacaactttgtgacgatgcgggcctgactcgatatgattgtaggcttccggggtgagagagggagctacaacttgaaacaggcgcatcgtattgcgcagtgcattgtaggcttccggggtgagagagggagctacaactgccgtcgttgccgtctgcgaaatcgcaggattgtaggcttccgaggtgagagagggagctacaaccgggaagccatcatttagtgatgccgcgccattgcaggcttccggggtgagagagaaatctataacgcgaaacatcatgaagaaacgaagccccggattgtaagcttccggggtgagagagggagctacaactgcgaacggcaccgtctttatgaccgttcattgtaagcgtccgggatggaaaaaggcgtcccaaaaaaaccattgatgaggctcgacgatgcccccaaacgttcaaaaaacgcatcgaggatcccatcataaaaagccatcacaagcataaaaagccatcacaagcacacataaaacatacggctggttgctggctgtctgagcgacacggcgcatgcccgacgctttattttctgcggtccccatacgccaatccgctagcctccctatctctatttaagtatcgccgtaatttttgtatgccttcttgagcggagcggctaaattacggcattcggcatgcatgccaatacccggcgccggtgtcggcgggcgataggcgccgcgccttgccaacctgctgcagaccactacagactgcggccagtaacaggcgttgaagcggacagcgagtgccggctgcctgtgctgctctttcacggaaaagggcaaaagataaaaggagaaacctgccgtgtctgaacagaacgtttcgccatcccgtttcacccgaatcgtcacgacgctgtccgctcccgtcgtcatcccatcattgctagccgtgggtgtcttgctgctgttgtgcgcagtctggcctcaggaggccgatgatcttttctctcaggggcaacggtgggtcagccatcatttcgactggttttattccctggccgttacggttttccttgtttttctcatcgtggtggcggcaagccgcttcggtgatattcgtctcggtccggatgacgccaagcccgagttcagctttatttcctggagtgcgatgctgttcgcggcaggcatgggtattggcctgatgtatttcggcgtgggcgagccgatgcaacattatctgaagccgcccaccgttgcgggcagcacgcctgcggcagcccgtgaagcgatgctcacgacgtttttccactggggttttcatgcatgggccgtgtatggcgtgatggggctggtgctagcgtatttcggctttcgctacaacttgccgctcaccatgcgttcggggctctacccgttattgcggcaccggatcaatggggtttggggtcacaccgtcgatgcttttgcgcttgtcgcaaccatcgccgggattgccacgacgctgggctatggcgtgcttcagttgagcgcgggcctgcatcaggtggggggctggaataccgattctgactggttccgcacggcgctggtgctggctgttgtggtgctggcgggtctttcggcggctacggggcttgaccggggcgtgcggcgtctgagtgaaatcaatctcacgctcgcattcttgctgctggcgtttgtgatcgttacgggccctacagtgtttttgtttcaggcactgagcgaaaacatcggcaactatttatcgagcgcggttgccctgtcgttgcatacctttgcctatgagccagcgcgtgaggccaactggtttggcaactggacgattctctactgggcgtggtggatttcctggtcgccgtttgtcggcatgtttatcgcgcgtatttcgcgggggcgcacgattcgtcagtttgtcgtgggtgtgttgctggtgccgacggcgttcaatctgctctggatgacggcatttggtaatagcgcaatctggctggatacgcacgtggcactgggagggctggcgcaaacggcgaccaacgtcgatgcgctgctgtttcatttcttcgaatatttcccgctgacgaagctgttgtcgtggttggccatcgtactgatcgcggtcttttttgtgacgtcggcggattcaggggcgtttgtgatcgacaccattgcatcgcgcggggcggtgaactcgccgctctggcagcgcttgttctgggcggcggtgctgggcgcgacggcgacgatcctgctggcggcgggcggcttgaaagccttgcaggcggtgacgctggtggcggcgttgcccgttgccctcatcatgctggcgctgtgttatgggctgtggcaaggcttgagggccgaccgggcgcattattcgcaggatctcgcgccttcgacgaatttctggagcggacggcattggcggcggcgtctggagcagatggtgcatcagacgaccgagccccaggtgcgtcaattcttgcgcgaaacggtgttgcccgcctttcaggacgtggcggccgaattgcgcgggacaggcgctgacgcggtgattcatcaggatgaaaacgacggctcaatgcgtttgatcgtgccgcacgatggcttgcgtgattttgtttatggggtgcgtccggtgcgcaaaacgttgcctgcgtttctggttcgcaatgcggctgacccggaggcccaggggcatatccatgaaccggtgactttcttcgaggatggccgggaaggctacgacatccagtatttgcgtcaggaagaagtcatcgccgatatcctgcgccagtatgagcgctacctgtcgctcaacgcggatcagcgcacgcatttgttgagccgtgcgccgggacatacggaggcgcggaaagcggctcccgattgagaatgaagcggcttcccagggacacttcagaagccgtgcaacgctttttattggcccgtggcgtcaagcgtcattcccgctggacgctgggccagatgcgcgctgagtacttgccggattgccgtgtcgaacggtgttcggcatcctatttccaggttttccagacggcttgaatcaagatggcaattgcgtggccggggtgtcgcgtcaagcggcatgggcacggcggtaatcggtgcatcgagctgtaacgcatcggccagccgcacggccatatcgtatttgctcatcgcttcattgcccgaccattgcgtcatgccgcaaaccggcgtgccgttggcatggcattcgagcagttgccggatgacgacggcgacatccggcgtaaaagtgggataccggatggcccatgcatccatggcggcggcttgcggttgcgcgctcgcgcgggttgccgcggccgctatcagcggaggcacgaggctggtgacggcggattcctgccagtcgtcgatcggcccataaagcagggggagccggagcacgcatccgagtggcgtggtttccgtcaatgcctgttcaccctggagcttgctgcggccgtaggcattgagaggggcgggcaagtccgtgcagcgatacggcgggttcgtgccatcgaagacgtaatccgtcgaaatagagagcacccaggtgcctgttcgccgcgcggctgtggcgagggtgcgcacggcttcaacgttgagcgccgaggcgagtgcggggttgtgctcgcatacgtcggggcggcgttccgcggccagaatgaccagggcatcgggggcttcgtgttcgacgaactgggtgagtgctgccgcatcgcggatgtcgagtgtgatgtgaccgggcgcggcccggcgcaagcaggtcgcaatggtttgccagctgcgctgtcgccccagttcagccgtcacggcgcgtcccagcaggcccgacgcgccaatcacggcgaccttgaagcgggatgtggtctttcgaatcatggattgcgcggtgcggccgtgacggtataaccggcttcctcgatggcgtgctgaagtgttgcagcgggttgggctgattcgatggcgacccgtccggcagccagatcgatctcgacgcgtgccgtggcgtccagggcctgcacggcacgcgtgacggccgcaacgcaatgctggcagctcatgccttccactttgaatgcgaggttcatgtgttttcctgttaaagatcaagagggggagttgaattatgccttcctgcatgcacctgagcagcaggataggcgagggcgtaggcgccgtgcgcaccgtgcgcaccgtgcggaaagggaaatcaataaaaaaggtgattgataggagaaagtgctgatgaatatcggagaagcggcgcgcctgtcgggcgtcacggcgaagatgattcgctattacgaaagcgttggcctgcttgccgcaaaggcacggacgtcgtcggggtaccggatttatggcaaagcggaagtggaggccttgtgttttatccggcgcgcgaggcggcttgggtttctggtcgacgatattcgccagttgctgatgctttggcgggatggttcgaggtccagtgcggaggtcaagcggatcgcgcttgaacaaattgccgacctcgatctgcgcattgccgagctgacggtgatgcgcgataacctggtgcaactggcgcgacagtgtcatggcgatgagggggcggagtgttcgatcatcgatggcctggcggatcgggccgggttgccaggcggcgcccatcatggcgcccggtccagcgaataaacggagccgcagacgattgttgggatttgcccacaagcgtgcaccagcagggtgcaaaaaatatccggatatttttgaatcttactaataatcaataaaatcaaagggttgaatttgcattttgatgctcgtggagggggcttgatgcctgttgacagtgcatgccccctagccaaactccgttagatgtctataatccgggttaacccgttttagggtaatccctgatttttcagccgccggggataggtcgaatccttggagaacattatgtttgcttattttcttgaaaacttgagtaactggtttgaacgtgctgagcgcaaccgccgcgaagcctatctggcgtcatcaacggatatcgttcagcttgaacagcgtatccgctctctcgaaacgaacggctactcgctgtaagcattcgttttcgcctgtgtgagcggcatctgagcagcacctgagccgcagctctggatccaaagccccgtacatcggggctttgccgtatctgaacgacgctttatgattttttgcctgtatcgagcgcgcttcacgctagcctgaatttttttacaccgttaaggtaaagcgcttaagcgctcttaggccgttcgtttcattggattcattggcctgatttgtcaccggattccctatgttgcctgctatgcgaatacttcgttcgatacgaacccggcttcccgttatgttgcttttggcatgggtgactgcgagtgccactgcggcggggacagggcagggcggcgcgcggccgcccaaggtgctggactcgcagcaaggcatccaggatggggaaaatgggttgatgctgcaaacagcgcccttattgcgagccccgatcgttgcgccgcaaccgatggcggccccggctgaactggcaccatcgaatactccaccgctcatcgtggcgccttatatcgagtacccggttggccgccccgtaccctatccacctcatccgcctcatccaccccgtcctcatccgcagcctatgcccacaccaccgctgccgtgagccccttggggtttgcgctaatgcggttcaccagacccgcgagacccttttcgcatctttccgaaatgcctgtgccatgtgcaatacggctcattaaatcgacaagttttgtgcagatcgccataatccgttgccatatgccttatctcataaatggcgggaaggggattaagcgatgggcaaaggacgtatcgaagcgtttagcgatggcgtaatcgccatcatcatcacgatcatggtgcttgagttgcgagtcccggaaggcgcgagtctggccgccttgcgcccgcttttgccggttttttgcgcatatgtgctgagtttcatctacgtcggcatttactggagcaaccatcaccctatgttccatgccgtgcagaaggtgaatggcgccattttatgggccaacctgcatttgcttttctggctctcgctgttgcccgcggtgacgcactggattggggaaagccccttgtcggcatggcctggtgcgatgtatggcatggtgctttttatggctgccatagcctatttcattctgacgcacgtcctgatgcgccatcacggcgctgactcaacccttgcccgggccatggggcgggacgtgaaaggcaagatgtcggtcggtctctatctcgcgggcgttgcgctggcgtttgtcgcgccatgggtttcggcactgctctatacgctgaccgcggcgatgtggctcataccggaccggaggattgagcgcgtgctgagcgctgaatcatgattcatgaatgatgaaggctaatcgcgcgtgggcccaggcgcatggcccagcgcgccatgacgctgcgctggattgatggctgatggggttgatggggttgatggggcgttaagcccgcgccacggcctccggggcataacacacctcatcggcctcgaggtttgccgcgtcctcgcgcaaaatggcatgcgcttcagcctgcgtggcgaccgagggggccgagcccagcaagggctggcgagcggtttcggtcaaggccagcaccgccacggccccgatcagcgaagcgcccatcaggtaatacgcgggcatcatcaggttgccgctgaaatccacgagccacgccgtgatgagaggggtcgtgccgccgaacagcgataccgaaatattgaagccaatcgccagcgcaccgtaacggatgcgcgtcgggaacagggcgggcagcgcggaaggcatcacaccggtaaagcacgagagcagcacgccgatgatcagcaagccgcagaacaccggaagcatcgtgcctgtgcggatcagcaggagtgcggggatcgacaggataaaaagaccgatgcagcccacgagcatgacgggcttgcgtccaaccgtatccgagagccgtcctgccagcagggtcatgggcatcatgagcagcatgaccagcaacaccagaaagaggccgtgggtttcgttgaaatgcagcgtggccgacagatagctgggcagatacgacagcgccatgtaatcagtcacattgaaaatcagcacgaggccgatgcagatgagaagcggtttccattgctggacgagcaactggataaacgagggctggggccgggccttgtcttcggcttcgcgcgcctcagcctgttttttgaaggcgggcgtttcttcgagcttcatgcggatatatagcccgaccagccctagcgggcccgcgatcaggaacggtatacgccagccccatgacagcagggcttcctgcgagagcagcgcagtgagcagggtgacggtgcctgcgcccagcacatagccaatcagcgtgccgaactcaagaaagctgcccatgaaaccccgccgccggtcggtcgagaattcagcgatgaaggtggccgcgccgccatattcgccaccggtcgaaaagccttgcacgagccgcgccacgagcagcaaaaccggcgcgagaatgccgatcgaggtgtagctcgggatcaggccaatggcgaacgtgcccagtgccatcatgatcatggtcatggcgagcacgcgctggcggccgatccggtcgcccagcgggccaaaaaccatgccgccgatgggacgcacgacaaacgccgcagcaaaggtgccgaaggtggctagcagttgagccgaggggctgctggcgggaaagaacactttgccgagcgtcaccgcaatgtagctatacacgccgaaatcgaaccattccatcgcattgcccagcgccatcgcgctcaccgagcgtttgagcaggctgtgatcgacgacggtgatgtcgctggaagaaaggttgttgtcttgcttgtgctggcgccacaagccgttgccgaaagcggtcatgaaaactccaatgacggcgacacaatgcgtcaggcattgcacgcagttgctgggcaagtgcagttttccgggagcggaaagggggtgccgccgggggggggccgcggccactggcccacaagcatgaggaaaagcaggtcccatgcggcgccggttgcgtaccagttggccgtgaaactgcacttgaagggtagggttgccgggaggcgtctttac

SEQ ID NO: 2891 - DNA, 23177 bp, synthetic construct
  source 1..23177: mol_type = other DNA
  variation 14986..15085: note = note, n is a, c, g, or t
  misc_feature 1..23177: note = Synthetic
ctccatggcgatgagctggccgagatccgtcccattgtccgcgaggtgaacaccgtccgcaagcaacgggccggctatgaaatcggaaaaatagggcttttttatcggattgtccaaccggttttcaaggaggatcagtacctcggcgccctggagttcggcatcagccatgagcagcttgtcaatctgctccagcagcgcatcagcccggaaatcgccgttgccgtcaaatcggcgaactggcagaaggcgaccctggtagcggacaaaaaaatcgagcaaggagaatataccttcctgcccaaacaaaacggtattttcagaaaacttgacgacaaaatcctgctggatcaggacaataaccgccgctacaccgtcgacggcaagacatatatcctcttctccaatatcgagctgaaaaatttccagaaagaacccattgccaagattctggtcgccctggatatcagcgaggagctgatcaatgccaaaaatttcatcatcaaggttctcctgctcgccgcgctgctcctgctcgtttcctgcctggtcctctatttcagctttggccagttgctcacccggatcttcaacctcaacacctccctgagcaggagcaacgaggagctcaccacagccaaggcctatgtggataatatccttgcctccatgagtgacggcctgctggttaccaccgccgagggaacgatcaacaagacaaaccaggcgctctgccggctgcttggctactcggaggcagagcttcttgagaaacaggtcttttccttctttgaaaatcctgcggaggctgaagcgagcttcactccctggaaaaacaaaaatcgagacatcagcaaggcggagcaccagctcctgaccaaggaaggagcacgcgtgccgattcttttttcggcaaccgcccttgccgacgaaaccggcgggctcatcggcattgtctgcattttcaccgatatcaccgagcgcaaaaaatcggaaaccgccctgcgcgaggcgcatgacctgctggaacagcgggtcattgagcgcacccgggagctggccgaggcaaacaccgccctgaccagggagatggcggaacgcaagcgcgcggaggccgagctgcggcaggcccagaagatgcgggccatcggcaccctggccggagggattgcccacgacttcaacaacatcctcaccgccatcatcggctacacccaactggccatgcaccgggcaacctcggatgccacttcccgctcctatctcggcgaggtgtttatcgccagccagcgggcccagaaactggtccagcagatcctcaccttcagcaggcagagcgagcaggagaaaagaccggtcgagatccatccgatcgtcaaggaagccttaaagctgctgcgcgcctcccttccggccaatattgaaatcgtgcaggatatcccggcacgctgcggatccgtcatggccgatcccacccagatccatcaggtggtcatgaacctctgcaccaacgcctaccacgcgatgcaggaaaaaggcggcaccctcacggtttcgctttttgaaacagcggcggaaaatatctccccgccgctgcccgccggcgactatatgcagcttgtggtgagcgacaccggctgcggcatggacaccgcgaccctggagcggatctttgaaccgtattttaccaccaaggagacgggcaaaggcaccggcctcggcctggccgtgacccacggcatcgtcgaagggctcggcggccagatcagggtggtcagcaccacgggcctcggcaccaccttcagcgtctgcctgcccctgcacaaacaacctcaggccgagcccgaggaaccgtcggaaaaaaaggagatccggggcggtagcgagcggatcctggtggtggatgacgaacaggaactcgtccgcctcctcgaagtggttcttcgccgatacggctacagggttaccagcttctcggacagcaccgccgcttctgcgtggttcgacgccaatccgggggaggtggatctggtgatcaccgacatggccatgcccaagctgaccggccaggatctcgcccgcgcgattctggcgaaacggccggacctgcccatcattctcggtaccggatacagcgaggtgatcaatgcggagcgcgcgaaacaactcggcatccgcgccttctttctcaagcccttacaggaagaggagttggccggcctggtccgggaggttctggatgcagggcccggccgggacaagtagatccgttgcgtctttttcaggcaggatggaaacagcggactgaagatgcgcggcgatcaggtgtttcaattggcggtcaccgtcgccagcaagccgtgcaggctcgcgcagagaacaagggcgaggcccgttttgcgatgggtgccggttttcacctggatccaccggaggccggaagaaagctgaaacaggatcagcataaaattgatgatcccgaggagctgcaccagggagattccgccgatccgcataccgtcaatcgcaggccaacggtcgccgttgccgtgttggcgctgccatggacattacagatcgcggaagattcgagggtaattggcccggtcagcacatattcaaaggagcggctgaactcggccgattccggaaggttcatggcgctgaactcccaactggcggcctcctggccgttgatggtgagattcagccgtttggtgtagtgcagaaaattattggcgctgtgtctggcaaaaagggtgatggtgatcttttccccttgccccgcattcgccgggacttccagacggacagccgacttgtccgccaaggcggaccctgcatcaagaaagagcaacacgcctgccgctgccagcattatttttttcatggtgcctccccctgtgcgtttcgttgagacaaaccctttgtttgattatacttcacatggcgtcgacaatggcattaaaagttgtgctgggacgcatggcctggctggtctttgccgcatcgggccggtaatagccgccgatatccaccgggtgcccctgggcggaattcagctcaccgacaatcttcccctcgttgccggaaagcgcctgcgccactccggcaaaccgtccctgcacctctggatccttgctctgtccggccagggcctgggcccaatagagggccaggtaaaaatggctgccccgggtatccagctcccccaccttgcgggagggggacttctcgttttccagaaacatgccgatggctgcatccagcgtctccgcaagcagttgcgccttttcgttcttgaaggtggcgtaaatatgctcgaaggagggcaccagggcgcagaactcacccagtgaatcccagcgcagatgcccttcgcgcaaaaactgctccacatgcttgggcgccgagccgccggcgccggtttcgaacatccctcccccgttcatcagggggacgatggagagcatcttggcgctggtgcccagctccaggatggggaagagatcggtgagatagtcgcgcagcacgttgccggtgacggagatagtatcctcgcccttgcggatgcgcgccagggagaaacgcatggcctccaccggctgcatgatgcggatatccaggccgctggtatcgtggttcggaagatattgctttaccttggcgatcagttgcgcatcgtggggccggtttgcatcgagccagaaaatggccggcacacccgtggccctggcgcgggtcaccgccagcttgacccaatcctggatgggcgcatccttggtctggcacccccggaagatatcgccctcttccacctcttgcgcgagcagggtctcgccgctggcggcgtccaccacccggatcgtccccttgcccggagcgatgaaggtcttgtcgtgggagccgtattcctcggccttttgcgccatcagcccgacattggccaccgagcccatggtggcgggatcaaaggcgccgttgcgtgtgcagtcggccaccacttcctggtagatcgtggcatagcagcggtccggcaccatggcgatggtgtcgtgcagcgcatcgtccgccccccacatcctgccgccgtcgcggatcaccaccggcatggaggcgtcgacgatcacgttgttgggcacatggaggttggtgatccccttggaggaatccaccatggccagttcgcagtttttcgcataggtcgcctggatgtccgcctcaatcacctgccgctccgcttccggcagggactggatcttggcgtagaggtcgcccaggccgttgttgacgttgacccccagctccttgatggtcgcggcgtgtttctcgaaaacatcctgataaaagaccgagacgcagtggccgaacatcaccgggtcggagaccttcatcatggtcgccttgagatgcagcgaaagcagcaccccgtcctgtttcgccgccgcgatctgcccggcgtagaaggcgcgcaaggatcggacattcatggccgaggcgtcgaagatctcgccggcaagcagcggggtcttgggcttaagcaccgtggcgacgccatcctcgccgacaaactcgatccgcacctcgcatggttccgccacggtcaccgaccgttcgctgccgtagaaatcgcctgccgtcatatgagctaccctggtcttggatgcggctggccacggtttcatcatccggtgcggatttttctggccgaaccgctttaccgaggccgccgcccgccggtcggagtttccttcgcgcagcaccggattgaccgcgctgcccaaaaccttggcgaatcgcgcctgcagctctttctccgcctcggttttcggcgtctccggatagtcggggatggcataccctttttcctgcagctccttgatcgctccctttaattggggaatggaggcgctgatgttgggctgcttgatgatattggcctggggctgcttgacgagcgtgcccaattccccaagataatcagggattctctggctctcggcgagattctccggaaaattggcgatgattcttccggccagggagatatccatggttgtaacggcaatgcccgagcccttggtataggcctggaggatcgggagcagggaataggttgccagggcgggcgctcaatcgaggcgatggatccgtttcgcaatccgtaaccgaagcccacagaattagcacataccgtccgggattgcaaatagcatgtgtggccgcgcagcctaccgcgccccgccgcccgcgccgtttcgcggttcgctctttttcttcttccctgttgctttttgccgcccagacaccgtagaatgctggaaaagcccacttactcccggagcacgcttacggcatgaccgaattcacctggaaggacgaatacagcctcggcaacgcgcagatcgacgccgaacaccaacggctgctcgagctggccaacgctgtcgccacccttgccggcagcggggaaaaaatggcgcggatcaaggagaacatcgtcgccctctacgattatgtcacaacccatttccagcacgaggaagagtacatgcttcagctcggctacccgcagtatgaagaacacaaaaaactgcacgaagggatcatcgccgagatgaacaccatcatgaaacacagcggcaacctggatgcgctggtatacaaattcaagcggctcatgcacgtctgggtgctggagcatatcctggccgaggattcgcgaataacccaaggcaaaaagaaagaggttccggatgaaccagcaagcgaggccggttgaaaccattcccgccatccccaaaacagtgccgcccttggtcatctacctctttttggtgatcggcttgctctccgccgtggcttttcggctgctgaccatcatcaactcctttgcccccaccctgatgcggccggtctggtatttcggggtcatcggctacatcttctttttcgcctaccgctaccatatctccgagaaacggaaaaccgccatccgcgccaacctgctgctggaaaagatccagggccggggagaaatcaccagcgaagaccgggcgctcatcgcctatgtgctctcctccatcatcaagtccaaggagaacctcaactacctgttcatctttgttctctccattgccgcggtcggcgtggacatcctgctcgccctccagggttattgacgggatacgggatactctgtattctgcgtccagagaggccaccccccttgtcttttgtgatttttccattataaaaccgttactgcctgcagataaaccctccgcatcctggataccgaaacgccatgaaaacgattctggtggtggacaaccaccctgttgtcctgaaactattggtggaattcctgaaaaaacagggccacgaggtgatcaccgcggaagacgggcttgcggccctggagattctcaagaaggtacggccggacatcgtttttaccgatctgatcatgcccaacatcagcggggaaaagctctgtcaggtgatccgcaaccgtcctgagctgaaaaatctccacatcatcgtttactcggccacagtactggaggatgaaaccaacatcctcaacctcggcgccgatgcctgcatcgccaaaggtccgttcaagaataccgaaacgcatatcgccaaggtcatcgagcatatcgaccgcaacaccctccatgaattgaagggcaagatcctcggcggcgaagacctgtacaagcggcatatcacctcggagctgctcttttccaagcggcattacgagagtatcttcaactccatgcccgaaggggtgatggagttcaccctggacggcaagatcttccgtgccaacaccgcggcccttgccctgtgcggcctgcgggaggaggatttactggcctccagctttcccgagcttttcaccggcgaccaccgggaacggctgcacgatctgctgcacacccttggccacgctccggtggtcatcggcgagaccgagcccatcctgctcaacggcaagatggtcaccattgattttcttcccagccgggatgaatcgcatgccttcatcatcgccatcctgcgggatctcaccgaaaaaatcgcaacaacccgtgagcttgagatgatgcgccgccaacaggaacgcattctcaacgccgttggcgaagggatcttcggccttgacacgaaaaagcgcatcacctttgccaacccggcggccctggctctgctggattacgaaccccatgagttggtgggcgcccgcttgcgggagatcgtccacgcctgcacaccggagaataactgcccgatctgctcggtctgccaagacggctttatgcgcaaggggaccgaaaccttctggcggaaaaacggcacgagttttccggttcgctacaccagcaacccgattgtggaagactataaaattctgggtgcggtggtcgcctttgccgatatcaccgaacgccagaaaatggaggaaaaactgcgggagtcggccatgaccgatgaactcaccttccttttcaaccgccgcggcttcatgaccctggcggacaagctgatcaagatcagcgtgcgggacaaaaccgacctgctgctcatcttcgtcgatttcgacaacctgaaatggatcaacgactccctggggcactccgtgggcgatcaggctctcattgaagcagccaccctgctccgggataccttccggctggcagatgttgtcgcccgcctgggcggggacgaatttgtcatcctctgcaccgacaattcggcgctgggcaacgaggaaaccattctcaaccggttgcgtgaaaacatcgacaaaaccaacaggctgacaacccggcaataccggctgtccctcagtgtcggggtgggccgctacgagcatcaggccccttgctccattgacgagctgctccgccgggcagaccaggccatgtatcacaacaaggaagacaagaaggcccgccgccaggatggctataaacagtaatgccgcgaggctgatactgctttgtcccgatcttttgcccgaaaaaaatatcctttttcctgtggattttttcgcaggagccattatagtaacaattatcattaaccatcaatgaggtgactcatggaaatcagcattgatagaaatgtcgtggaattcaagccgggcaacgcccaggaaacagcagccatggagctgctgtggcgggtcattgtggactgcatgcgggagaacaaaaaactggtgcccatgggcgagtacatcccaaccaaggaaaacctggcccgctttgtcatcgaggggattcccggcggcaccacccagtggtcggacctcaaggccccggcggacaacacctattactgttccgtctgcaacaagtacatgaatgtgaaaaaggacagcgagatcccgaaatgctgcggcagggacatggagaccatggactgacccgcccaaccatccagcctcaaaaggagagccatcatggacaagtatgaatgcccctgcggttatgtgtacgacccggcggaaggtgattacgaacacggcatcgagcccggcaccgcttttgccgacctgcccgacgactgggtctgtcccaagtgcggcgcggaaaaggaaaatttttataaggtgtaaccgcctgaaggcaacaccacccaccccctggaaaccctctcacctcgccggtttccagggggtcttttttttgcccaccccccgttcctcccaacacttggccacagccgaccactttttccgatttccgcaaacaccaaaacgctgtactatgcagggcactatgaacatcaacaacgaagatcaggcccgggaggccatcgccctctggcagtcagacccacccagggcgcagctcaaaaacctgcggctggccctggaatccctggaactcagccagatgtactatgagcagaagggcaacgagcaaggcgcggcacgggctgccgtctgccagaccattattgcctgccgcatcgccgaaatcgaagccgaataggtcaggaccgcattatgcacaccatgttcgccaccctcggcatgatcctcgccgttgccgggcttgtcgtctccgtggccttctggatcccgggtctctgcaaccggaccaggcttaaagagatcctcggctccagatatccgctggtctatgtggtctatgtcgccaacggccccatgctcctgctgcttggcgtcatcctgctgatcttcttccgctgaacactccacaaagaggaaaccataatgagcactgacacaccatacggatggaaccccgccttgggcatgaccctgctggccaaactcaaaagcgacctcaaggccgccatgctgagcaaaaacgaggctgtcaagggcgcgctacgcatcatcatcagcgaattccccaccaagatcaccacccccatcaccctggaaagcggcaaaaagagcacccgggccaagcgggacgacgaaatcaccgacgacgacatcatcagcctgatcatggggttgtgcaagtcggaacggcagaccctggagtacaaaaaagaggccagctccgagtatctggagatactggaatcatacctgcccaagatggccacggaagaggagatcaccgcctgggccaaggaaaacgtcgacctttccaagttcaagaacgccatgcaggccatgggcccgatcatgaagcatttcggcaagagcgcggacggcaatgtagtgaagaaggtgctggcggatttggcgagataggtatttttctagtattgacgtggtgtggtgtccggtgcatgctggaaaaagcagccgggaggcatgaagcgccaataagaaagcccgaccgaagtcgggcttgggttcgaggacaacccttgcgggtgcccttattgtagtaacggctctcaccccgggacactacaatcgttgtaacgataccccatcatgaaaagaaattgcaactctcttttctaaaatgttccatgagcgtgagggccaaccatgccgaaaccagatcgctacacccttggcctggacatcggcatggcgtcggtgggcgccgccttgctagcctgtgaccacatcattgccctctttgttcgcacctttgacaaagccgaaaccgccaaagagggcgagtcgctcaacaaaattcgccgcgatgcccgcctaacccgccgtcgcatccgccggcgcgcccaccgtttgttgcgattgcgtcgtctgttcaaacgcattagcttgctccccaccaacccaaacaacaacaccctttccgcagacaatctttccccttggcaattacgcgctgaaggactggatcgtcgtcttgatccccaagaatgggccgctgtgctgtatcaccttgtcaaacatcgcggcttcctgtctaaccgcaaaagcgaggcaaagaccgacgccaagacaggagaaatgttgggcggcgtcagtaccaaccagcaacggctctctgagggcggctaccgcaccatcggtgaaatggcctggaaggatgaccgttttagcgccgccaaacgcaataagggcggagattacagccacaccttcgcccgcgccgacctggttaatgaacttcgctcgcttttctcttgtcagcggaagttcgaaaatcctcatacgaacccggaatttgagacagccacccacgaactgctcatggcccgtcgccccacgctgtcaggcgacaacctgctcaaaatggtcggcaaatgcacctttgaacccaccgaataccgcgccccaaaggccagccataccgccgagcgttttgtctggctgaccaaactcaacaacctgcgcatcagcggcatcggcgtcacccgcccgttgaccgatggcgaacggcaaactcttatccacctgcctttcagccaagccaaactcacctataaacaggttcgcaccaaattggctttgggagaagccgaccgttttgtcggactggactaccgcaacagcaaagacccagaacttgccgcccttttcgaggccaaggcgtttcatctcttgcgcaaagtgtatgagtctgctggcttgcatcaagcttggcagcgcgacggccatgatcgccaacggcttgatctgcttgcccacgcgttgaccgtcttcaaagacgacaatgaggctcgccaatggctgactgtacagggcgtggaggccgagatcattgaggccgtgctggaagaatcattcgacaagttcatccgcctgtcgctcaaggcgctacacaagattttgccgcacatggaagcggggttgcgctacgacgaggccgtccaggccgccggttactcccaccacagccagatccacaccgacagcaaaacccgctacatcccaaagatcagtaaggaggatatagccaacccggtggtatcccgagcgctcaaccaagcacgcaggctggttaacgccattgttcgggaatacggttcgcccatggcggtacatatcgaactggcccgcgacctcaacaagccttatgacgagcgtcgccgcattgaaaaagaccagaagacctacaaagaaacgaaggacaaggacatcgtcgattttgaaaaaagatttgaattcaccccgaaggggctggagttggttaaatggcggttgtaccgggaacaggacgcccaatgcgcctacagccagaccggttttgacctgaaccgcctctttgagccgggctacgccgaaatagaccacgccctgccccaatcacgcagctttgataacgggatgaacaacaaggtgctggtccattctaaacataaccgcgacaagggaaaccgcaccccttacgaatatctgggcggagaccacaacagcccggaatggcaacattttgttgcttgggtggagggcaataagaaatatcgcttgaccaaacgccaacgcttgctgcgcaaggacttcggcaaggaagaagctaataaattcagggagcgcaacctcaccgacacccgctacgccagtaaaaaattcaagcaactggtggagacccacctgcaactggctgaggaatcggacagcaagcgttgcgtggtgctgtccggacagctcaccgcctatttacgcgcccgttgggttttgaacaaggttcgcgaagatggcgatctgcaccatgcgcttgatgccgccgtggtggcggcttgcagccacagcatggtcaagcggttgtcggactattctcgccgcaaagaactggagcagagcaggggccatttcgtggactatgaaaccggcgaggtgctggaccttgccgctctgcgacgcgttgaagcacacttcccccaaccctggccagggttcagaaaagaactggaggcacgcctctcccctgacccggctgccacattgcatacactggcaggcgttgcgccggtgcgcgtttcccgcgcccccacccgccggggcctgggggccgcgcatcaggaaaccatccgctcggcaaagtgcctggaagatgggacaagcagcgtcaagacctcgctgaccagtctcaaactcaaagacctgcccagaatcgttggctataacgacccgcgtaaccggacgctgataaccgccatcgagcaacgcctgcgcgaacatgacgacaatggcgcaaaagccttcaaagagccgttgcggcggccagcggctccgggcaaaaaagaccaagcgcctatagtgcgcagcgtcaacctcagagatactcagaaaagcggtttattggttcgtgacggcatcgccaataacggtagcatgctccgagtggacatcttcaccaagggcggtaaattctttgccgtgctactctatgttgccgatacggtgaaaacagaactgcccaatcgcgctgtcgttgctagcaagcctgaatccgaatggccggtgatggatgacagctatgctttcctgttcagcctgcatcccaacgattggattaaggtcacactgaaagatcaacccttaaaggaaggttatttctctggcctcgaccgttcgacaggtgccgtctcgatttgggcacatgatcgtaattcctcggtgggcaaagatggcctcatgcgaagtatcggtatcaaaaccgctctctccttagaaaaatgtcatgtggacatcctgggtcgcttgcaccgggtacatcaggaaactcgtcagccgctccggcacaaataggcgcacgccatggcttggcgcagcgtagtcatcaacaacccggcgcgactaaccctgaaacaccgggctatccaagtggagcaggacagtggcgcggtctccgtgccactagaggatatcgctacgctgatcatagaccatccccaggtgacgctgaccaatcaactcctttccgtctgcgccagccagcagattgccgtcatcaccgtgggccaaaaccacacacccaacggcgtcctgctctcctttctgcctcatagccgggcgctgaagatcatgcgccagcaacttgcaatgagtacaccacacaaaaaacgcctgtggcaaggtcttgtccagcaaaagctgcgcaatcaggccgaggtgttgacacggcatggcgaggcagacacggccaccaggctgcacgccctggcgaacagagtgcgctccggcgacccagacaattgcgaggcacagggtgcgcagctctattttcccggcctgttcggactggacttcacccgcgaccaaccagcccttgccaatgccgctctcaactatggctacagcatcatccgctcggcactggcgcgggcgctggttggctatggctttttacccgcctttggcctgcatcacaaaaatgagcaaaacgccttcaatctggccgacgacttgatcgaaccctatcgtccgctagtggatgcccaagtgctgaccatctgccgcgatgcccaacccgaagaaaccctgaacacttccaccaaggcgcaactaattagtctgctacacaaggatgccccccggctcgaaaacggcaaatccttgggcacaagcaccattctggcacttatcgacgccactgtcatcagcctgggacagcgcgtgacggatggagagtgcaaccttatgttgccaggactgactgacaagccatcatgagcaaggagactcgccgattcatgcgcctgatggttttctttgatctacccactgtcaccaaggcggaaaaacgcgcctacaccctatttcgccgttttctgctcaacgatggctacgatatgatccagtggtcggtctatggccgggtggtcaacggctttgacgatgccgaaactcacctcaaccgcttggcggcaagtctccccccgatcggttcggtgcgctgtctgcaagtaagcgagaaacagtttgccagcatgaagctgctcttgggggtaaaaaaattgcaggaaaaaaaggtgaatgccgcgcagatgctgcttttttgagcagaaattttactagaaaacccgcttccagccttgctggaagcgggttttctagttgttgattatagcatcccggggtgagagagggaactacaacatttggagtaatgaagaaaccagagaagaattatagcatcccggggtgagagagggaactacaactaatgtttttttcttgagatgcatcaagctattatagcatcccggggtgagagagggaactacaacgggacgtggtgtctttgtcccacgtcataaattatagcatcccggggtgagagagggaactacaacgggtctcagtgcgcttagtcgccgccaagtattatagcatcccggggtgagagagggaactacaacagagcggatgagagtctaaaccgtttcaggattatagcatcccggggtgagagagggaactacaaccggtacggcctaatcagccaagcgaaaggaattatagcatcccggggtgagagagggaactacaaccggcattgacaaggattcccttatcagtagattatagcatcccggggtgagagagggaactacnnnnnnnnnnnnnnnnnnnnnnnnnnnnnnnnnnnnnnnnnnnnnnnnnnnnnnnnnnnnnnnnnnnnnnnnnnnnnnnnnnnnnnnnnnnnnnnnnnnnatagcatcccggggtgagagagggaactacaacgttctccttaaaggctggatcctggatgcaattatagcatcccggggtgagagagggaactacaacccttaccggtgagggctggctttggggtgcattatagcatcccggggtgagagagggaactacaacgcgtggtcatggaaggattttatctgcgctattatagcatcccggggtgagagagggaactacaaccaacactgcgtagggcaggtcgccgaccttattatagcatcccggggtgagagagggaactacaactacgtcatgtactggcccggctggaccttaattatagcatcccggggtgagagagggaactacaactcggaagatttcacctcgcgcaacttctgtattatagcatcccggggtgagagagggaactacaacacaatgacatttgttgcctctcttccttcgattatagcatcccggggtgagagagggaactacaacgtactgcccgatgatctcagccagctttccattatagcatcccggggtgagagagggaactacaacaactcagccaagcaaaacgccaaccaggacattatagcatcccggggtgagagagggaactacaaccgacaaaacagcacgagcaccccctacacagcctcagaccccttccgccagcaacgccctgaactcctcgtcgtccagggcctctttctcaagcagggttttcgcaatcttttccagcaaggggcgctgttcggtcagggttttctccactccgaccatgcgctcctcgatgatcttgcgcacctcctcgtcgatgagcaaagcggtctggtcgctgaactccttctgctggaacaacccctgctgcaaaaactggttggcctgttgcaggtaggtgacctggccgagtttttcgttcatcccgtacatggccaccatgctgcgggcgatatccgtggcgcgctgcaggtcgttctgggcgccggtggtgatctcgtcgaagatgaccttttccgcacccctgccgcccagcagcacgtcgatcttctccagcagctcggtcttggacatcaaaaagcggtcctcggtgggcagttgcatggtgtagcctaaagccccgatgcccctgggaacgatgctgatcttgtgcaccttttccgcactcttgcggaaggtggccaccagggcgtgcccggtttcgtggtaggccacggtcttcttctccgtctcattgagcacccggttctttttttccagcccggcaacgatccggtcgatggccgcttcaaactccgtcgcctccacctgctccttgcccttgcgcaccgcgagcagggtcgcctcgttgaccaggttggcaagatccgccccggtaaaaccaggggtgcggcgggcgatgatctccagatcaaccccaggcgcaagcttgatccccttggcatgcaccgccagaatcgccacccgctccttgaggtcgggccggtccaccaggatgtgccggtcgaagcggcccggcctgagcagagccgggtccaggatctcgggccggttggtggcggcgaggatcaccacccccttgttcacctcaaagccgtccatctcggcgagcaactggtttaaggtctgctcgcgctcgtcgtggccgcccatcatgccgctgcccctggccttgcccagggaatcaagctcgtcgatgaacacgatgcagggcgccttggcattggcctgctcaaagagatcgcgcaccctggccgcgcccagccccacgaacatctcgatgaaatccgagccgctgatggagaaaaacggcaccccggattcgccggccaccgccttggccagcaaggtcttgcccgtgcccggaggcccgaccaggaggatgcccttggggatcttggcgcccaaccgggtaaacttctccggggtcttcaaaaactcgatcacctcggccagctccaccttggcctcctcctggcctgccaccgaattgaaatccaccccaagatcggtctgggcgatgatcttggccttggacttgcccagggtcatcatcccccccgcaccgccctggcccatgcgtttcatcatgaacatccagatcccgacgaaaaagagggtgggcagaacccaggagagcagcgtgcgcaaaaaggtgttctcgttggccgcgatgatatccaccccgtatttttccagaaaatccacgaggttgcggtcatcgatccgcggggtcacaaagagggccttgggaaacatcggctccttcttgctgctctcgattttttcataccctttgagcagggtggaggagataaccacggaattgatctttttttccgccacgtgcgccttgaactggctgtaggaaacattgtttatctgcggcgaaatccagttctggaggaggatgaagatggccagggcgatgaacaggtagctgagagaaaactggaattttttttccattaccaatatatcctttggattatggtccgctcaggcggggaatacacgatcttccctgcccggaccttgctttcatggtataagataattgttttttttgcaaagccgatgaatggagcccgtggaaaatgaatcccgccgatgaaatcgttgtgatcgttgatgagcagaaccatgaggtggcgcaggtttccagacgggtgatgcgggaaggcggcctgatccaccgggccagctacatcctggtctttaaccggagccaggaaatctttgtccaaaaacggaccatgaccaaggatatctatcccggttacctggatgtggccaccggcggtgtggtcctggccggggaaacctacgaggtttccgccaagcgcgaactggcggaagagcttggggtgcgcaaggcttccctcaccagccatttcgatttttaccatgcggcggacaataaccgggtctggggcagggtcttctcctgcaccgccgaggggccgttcgtgctccagcccgaagaggtggaggatggtttttttctcgggatggatgaattgcaatcccttgccgcggccgaacaatttaccccggatggccttatggtcctgaagagattcatggccggatgaaacggttttttacagccctcctcgacctcctgctgccctcgttctgcctggcctgtgaaaagcccctgggctcggcgccggacctcttgttctgcccggactgccgggagaggctccagtttatccacagcccgctctgcccctgttgcggcagggtctatctcgcggcggccggcggcgaccacctttgcggagcctgccttgccgcccctcctcatttcacgcgggccagggcgctctttctctacgaagagccgctgaaagaggtgatccaccgcttcaagtaccagggaaagacagcctgtttgccaagctttgcccggtttgccacaaaccatcccctgttggctgagctggaaggggttgactggattgtccccgtgccattgcatccaagccgcttgcgggaacgcggcttcaaccaggccctgctcctggcccacgccttgtttcccaaggacctccggatcgcccccggccttctgttccgtacccggccgaccgagccgcagaccagcttcaacgggacagcccgccgcgccaatctgaaaaacgccttcgcggttgtaaaaccgcaagggcttgcagggaaaaatattctcctcatcgacgatgtgttcaccaccggcaccacggtgaacgaatgcgcccgggttctcaaaaaggcgggcgctgccggagtgatggtgctgacgctggccagggtcaaggaggattattaggtaaatatccatcagcaccacatctgcttcgcagtctcgcctcgctcgcttagctgtcatcggcctgctcgcatagctgggctattgctcgccgtcctattccgcgcatctgcggcagcagcgaagcggcgctgctaatatttaccgcctgtggggatgccgggatttcatcttgatttggtcggatagttagagcttggcagcagaaaaattccggtttaccctgtagccacaacaaccatgaaaccatgaggaaacattgccatgaatctccatgcccttgccagccttgccgcccttgttgttgccggtctgacctttgccttcatgcttaaaaagcaaagggaaatcgactgcccgtcctgactgcttatctacgccaccactggtatgggtctcatatcatattatctcttcaccttttttctctgatctcccggggcagacatgcacgtttcaggaaaaccctatcgaaccatctggccgtctgagacagacggcgccaccataaagattatcgaccagcgtcatcttccccaccgcttcgtggttgaggagctgcgcaccgtgaacgaggtgtgcacggccatccgggagatgcatgtgcgcggggccgggctcatcggcgccacggccggtttcggcatgcaccttgccgcccttgccgcgccggaacatgactttgccggatttatgcacaaagcgggcgagaaactggtccaaaccagacccaccgccggcaatctggcctgggcggtgaagcggcagcttgcagccatcgatcagggagaaaccattacggcacaacgggccagagcctttgcggttgcctgcgagatagcgggcgaggacgcggaattctgccgaaggatcggagagcacggcaaggagatcatcgccgaactgagccgcagaaaaaacggcggggtggtcaatattctcacccactgcaatgcgggctggctggcctttgtggattacggttccgccaccggacccatctatgccgcccatgccgaggggatcaaggtgcatgtctgggtggacgaaacccgcccctggctgcagggggccaagctcaccgcctgggaactgaaggaggaaggggtaccccacaccctgatcgccgacaacaccgggggccatctcatgcagcacggcatggtggacatggtcatcgtcggcaccgaccgcaccacccgctgcggcgacgtggccaacaagatcggcacctatctcaaggcgttggccgcccgcgacaacggggtgcccttttatgtagccctgccctcctccacctttgactgggcggtgcgggacggtctgagcgagatacccatcgaacagcggagcggcgaggagatcacccatatccggggcttgaacgaggcggcggaaatgaccaccatcgccattgccccgccgaatacggccacagcgaactatgcctttgacgtcaccccggccaggttgatcaccgggctgatcagcgaacgcggaatcatgcaggccagcgaaggggatatcctgcggctgtacccggaacactgccggaaacacctcatgccagccccaggctctccatcaccgtctcgtgaaacagaggccggaactgcttgatccgtggattctcccggctgggatggacccggttgctcaagagaatcatgaccagatcgcgggccgggtcgatccagaaggatgtcccggtaaaaccgagatggcccacgctggcaggatccagatatcttccgccactggaaccggtggcggaaggggtgtcaaaacccaaaccccaggtggagccggggatgttttggcggattaaaaatcggccaagatcgcttgtcaggtagccgggatgctccttgcggccctgccattgatcgagcaactgcacccccatctccagcacccccccgatggtgccgaacaacccggcatgcccggccacccctccaagggcatggcagttttcatcgcttacctcgccgcagaggagccgcttgcgaaaagcgcactcttccgtgggagcgatgcgcttcttgtgcgtggtccctgtttgctctggccctgccggtccatagaatatcttttccgcaatccccagggggtcggcgattttttccctgaaaaaccggtccagctcccaatcgcttttcctttccacaatcaggcccagcaacatgaagccgagatcgctgtacaccgaaccgctgccaggctcataggctggagattccgcgaggagcaggtcgaggagcgcttcctttctttttgcctcgggcaggcggagcaattcgagataatagggtttatgggcagaaaagccagcggaatgtcggagaagatccttgatcgagaccctgtgcaggaatgaatcccttgccaggggaaaaatatccgagatccgttcggtaagttgcagccgttgcgctttcaacagggcaagcaccgccagggttgtggccagcggcttggtcagcgaggcgagatcgtacaccgtggcttcatcaaccctgttttcccggctgtaggtggtgtgtccgtatgtctgaattatccgttctctcttctccggcactccccacacaacccccattgcggccccgggaaaagcacgccgctggatcgcctcggtgaaaatattgtaacagtttgatattgttgtttttttaatgtttgtatgcatgcagtgaaaaaatattccgctccctggtggggatggtcacaaaaatgggtgtttcggcggctcgaaaataaccataatacagtatctttttatttattatcattgaattttttttgattttacactatctttttgtagctgtttttaaaaaaatgcagccgctgacgtatatttagtttttttacaataaaatcaataaattaaatggtttttattgtcgtgatccacctagaggccttgcataaatttttcaacaccttcttaacagtgtctgtcgaaactctgttcactctgtttgtacaatctgttgataacttgttgtatatccttttccaatttttcccagtctgcgttcgattaaaaaatatttaaaatgttcaggaggttactgtctttttcaacatatcaacacccttaataaccataatcttttaaatatacatacaactactactctatggagtgcccccttatgtcccttattttcaacatctcccgtgatgattttttgacaggccttgcttccctgcaaaatgtaaccggtaaaaagggaaatatcgccattctctcctatatcctgattgagtctcaaacagactccctccttttgactgccaccgatctggaaataggcatccgaaacagtctgcctgcggagatactctcccccggctccattaccctgcctgcaaagaagatttttgaaatagtgcgggagtccggcgccgatcagatccacgtcgagatcatggaaaacaactgggcgaagatcactgcggattccacggattacaagctggccggcatgcccagcgaggaatatcccgcctttcccgagtacgatgaaaacaatcttgtagccctggccagcgacaggatcaaggatctcatcgataaaacgatatattccgtggctccggaaggggaatcccaattcaatctcaccggggttctggtggaaaaggatgttgcggacggcaagaacatgctccgcatggtttcctcggacgggcaccgtctttctttgtgcgaaacgaacgtggacaatgatttgagcgggctgaagatggagaagatcatcctcattccccgcaaaggcatgcaggaaatacgaaaattcacggataattcagcggaaataaaaatatcgtttgaagaaaaacaggcggttataaaaaccgaccattccatcatcgttgtccgtttgatgaatggtgatttcccggattataaaaatatcatcaatatgatcaaaaaagaaaagtgcatagagatgaaaagggttcagttcatgaattcgatgaagaaaatgaatctcttcaccgaagaccgttacaacgccgtgcagtttcagataaaacccggcaaacttatcctttcctcgcagagcatggatataggcagcgccaaggatgaaatagcgatcacctatgacgatgctcccttaaagctcggattcaacggaaaatattttattgaaaccatgcaggtaatgtccagcgagaccatcaaggcctatatcaattcggaagaaagcccctgcatgattcaaggcgacgacgatccaggctttgccagca

SEQ ID NO: 2892 - DNA, 23036 bp, synthetic construct
  misc_feature 1..23036: note = Synthetic
  source 1..23036: mol_type = other DNA
tttttgcttgatgatggcgcttttcctgtctgtggtctttttgctgcttctcttcccggaacatcagttggcgcttgctgccgtgcttgccgtagtttttttccttgcggcgttactgctgtggtcggtaagccgcgcgaatttctcgcgtgaaaagcttttttcagcttccatcgcggaattgaaagaagatgtccgcgccttgcgcggcgcgaacactcccccttccgatgcaccataagctcccgctcatctttgaggagcgtggttttatccgcgcccgcatagccgcgcagcgcaaaaccctggccggacacggcaaggctatcgagcgcctctccgctgccggagattccgtttgttcggcgactcgctgggcaagacggcatttcattgagcttgggcttatcggctgcgtggcgattatcctgcgccccaaaggtttgcctcgcgtgtttcgttttggaaaacgcgctttcttcctgtggcggataggaaaaaaaatcatttcccgcatatcttccctgcgctttttcttcggctgaccttcgctccgccctgaagggcggggtttcaaaccggagttagttttacgatgaagaaaatctcgtccagtctgttcttctacaagaaaatacttccactcttttggtttggatccctggcgtactttgtcatcgcagggttcatgtatggcgctttcgaggaagaaccagtagctcttgttgtgccatgcttcatcatggctgcctttggcttttttctcatgaagagggtcgtttgggatctcgttgacgaagtctacgactgcggtgattcactccttgtcaagaacagaggaatagaagaaagagtagcgctggcgaatatcatgaatgtcagttcttcaacgaacgtgaatccttccagaatcacacttcgcctggtaaaaccgggaaagcttggctcggagatttcattttctcccgctgcgccatttaccatcaatccatttgcgaaaattccggtggcagaagacttgattgtccgcgtagataaagcaagggggcaacgtgcgccctggtaacactttttctccgctccagaacgtaggcgaagcgcagcgaaccccaacctacagcctgaagcaacattatttgcggaagcccccatatatggccttcccttttaagcaggacatgccgtgaacaaacctacaacctctcctccagccgccaatttcatccgcaatatcatcgaggccgaccttgccgccggaaagcacgcaacgcggcgctggggcggcaggccgggtctggctaccgtccatgctgcggggcaaccagaccaggcaaaaatccgcacccgttttccgccggaaccgaacggctatttgcacttcggccacgccaaatccatctgccttaatttcggtctggcgcgacagtatgaaggacgctgccatctgcgttttgacgacaccaatccggaaaaggaagaagcggaatacgtccagtccatcattgacgccgtgcgctggctgggctttgattggcagaatgaaacggaaaacaatctttactacgcttccgactatttcgaggccatgcttgcctgcgccgaatatctgatttctgccggacatgcctatgtggatagtcagactgcggatgaaatgcgcgccaatcgcggcaccttgaccgagccaggcaaaaacagcccttatcgtgaccgccccgccgccgagagcatggagcttttcaggcggatgcaggcgggcgaatttccggacggagcgcatgtattacgcgcaaaagttgacatggcatccccaaacatcaacatgcgcgaccccgccatttaccgcattcgccatgccgctcatcataataccggcgagcgtttctgcgtctatccgatgtacaccttcgcgcaccctatcgaagacgcgctggaaaacatcacccattccatatgcacgttggaatttgaggatcagcgccccttttatgattggcttctggaacgcctggcggaaggcggactgttgcttcgccctttgccttatcagtatgaattttcccgcctcaatctgacttacgtcgttctttccaagcgcaagctcattcaactggtggaagaaggccatgtttgcggctgggacgatccgcgtatgcctaccctcgtcggagcgcgtcgtcgtggatatgcgccggagggttttcgtctgatgatggagcggatcggcatctccaaatccgattcgctgattgactacaccctgcttgaagattgtatgcgcgaggtgatgaacgacttggacgaacgtcgggtcgcagtgctcgatccgataaaactcatcattaccaactacccggaaggccagacggaaacctgtcacgcgcccaatcatcctcttaaaccggaattgggcaaacgcgagctgcccttctcccgcgaactctggattgagcgggaagattttcgtgagattccggaaaaaggctatcaccgcctttatcccgatggtttggcgcggttgcgacacgcttatgtggtgcgctgtgtcggttgcgaaaaagacgaaaacggtcaggttactgccgtgctctgtgaatacctgccggagactcgttccggcacgcccggcgcggatagcgtcaaggtcaaggggacattgcactggctatccatagcccatgcccatgccgccgaaattcgtctttatgatcgcttgttcaagactaccgcccccggcgcagaaagcggagattttcttgccgatctgaatcccgattcctgccggacgcttaacacatggcttgagccttccctgaaagacgcccgtcctgaagaacgcttccagttcgagcgacatggttattttgtcgtggattccgactcccgccccaacgctccggtattcaaccgcgccgtgtcgctcagggattcatgggggaagtctggatgattcaggcatgaattgcggggtcggaaagacttgcggttaagccggaaatacttaaagtgatgctttaagtttatgttatatcttgttgatttttatggattttatgctcatgatttatctaaacgaaaagctgtcctgacagcatttacaagttaggctatactgccattttatgatattggtggttaggtcatgctctcatcacctcgttccttcgcccaaatcgatgttttcaccgcccagtcaggcatgggtaatccggttgccgtggtgctcgatagcgccgatctggatgacgttaccatgcaacgctttgcgcgctggactaacctgtcggaaaccactttcgtgctaccgcccaccgatccgcgcgccgactatcggttgcgtatcttcacgcccgacagcgagataccgtttgccggtcatcccacgctcggctcgtgtcatgcttggctggcggctggcggcacgccgaagtcactcggacgcatcgtgcagcagtgcgccaagggattgattgatattcggaaggatggcaaacggctggcctttgccgcaccgccctgccagcacagcgaacctttacccgccgtgctgacacaggtagcccaagccatcggcgtaaacgccgcacaagtgttgcgtgcgctggtgctcgacaacggccctgtcttcataacgctgcaactggacagtgccagcactgtgctagcgctggaacccgactacgcgcagttgactcggctgaggcaaaatgtgggtgtggttggacggtattcatacggacaaacccggttgccgcctgcccaatcgaaccgcgcggcggacgctggcgagccgctggtcgaggtgcgcgcctttgccccgttgatgggcatcaacgaagacccgatcaccggcagcctgaatgccagcctggcgcaatggctgattgagtctggcgaactgcccgaccgctacgttgccgctcaaggctccgcgctaggccgcgcggggcgggtacacgtcgagcgtgacgcgcagggtcaagtgtgggttggcggcaatagcgtgaccgtgatacgcggcgaggcgatgttatgacgatgccagcgcggtaggctggagtgagccaaaggcaaacccctacgttgtagtgggtataacgcaaaccgcgacgaccacctttgaatacgccgcgagtctcccctctcccactcgcggcgcagtcattctttcgcacagactccaacccacccgtcattcccgcgaaggcgggaatccagtacggcgttgaaagtcacgacaactttccagaacaggacaggagcggcattccccaaacaccaacggagcggaaaggctgctctggattcccgccttcgcgggaatgacgagtgattgagcgtgggagagatgagccaagcccctaaccgtcacttcgccgaaattcgcctttacgaagtccggctgattctgtcatgaatggcagggtcggcaaggcgagttcttcggatcgaaaacctaaagcaatactttagatttatcgtatatctcattgattttcatgggttttgtgctcatgatttgtctaaacgaaaagctgctctgacagcatttacaagttagattatactgtcctcaagacaatttgtctatacttatgtagcagtcatatgccagacttcctcacctcaatcattgatgagcttgccaacccaaaatcagccaatttctgggctgtttggctatttgcaatcggtggcattttctcgttcattaaatggctaggcaattcccgtgcagccaaaatagagcgaatccttacctttgctttagttgatgattatgaaacctgggtgaaagcacgtagcaaatctcagcaatttgatattgatactctgggcgaatggctttctagtgggaaaatagcgttgcttggacatgactactcagtgttcaaaaatttcatgaagcgtatgcaaaaaaatgggagagcaatcagtatccctgatgaggattggttcttggcaagttccgaacaatacaagtcagctccaaaatggagtagagtagagtggtgattagctgctacaattcaatcaaccaacatcatacggagtcacgatggcaaagtttctgaacacaagcgcgacgaattacttccttgaagaactaatcaagagcgccaaggataggctcatcctcatcagtccatttcttcgccttaatgacagaatcaaggaactccttgaagacaagaaccgcctcaagattgatgtgcgcgtcgtttatggcaagagcgagctacagcccgaagaaatcaactggttgaaagagcttacctttctcaggacgagtttctgcaagaatctccacgcaaaatgttacatgaacgaagagctttgcatcatcacgagcctgaacctctacgagttcagccaagtgaacaataatgaaatgggggttctcattcgccgctcggaagaccatgagctttacaaagaatcttacgaagaagcgcaacgcattattcgcgtcagcgatgaaatccgcatttccgtggaaaccgtcgagaaggaagctgagtcctccgtcgaaggggaagacttagcgcccgacaaactgaccacatcaaaattagcccagaagctcggggtcaagaccaatgaactgattgaacgactggtgaagtttggctatcttgaagcaagggatggcaagaactacattactgccaaaggaaaagaagctggcggtgaatttcgcacgagtccaaagtttggcccgtacttcttgtggcctgcgaattttcggccatgaaggctaacccattgcgcctaagcggatggcctgcggtcgccgcttaccttccatgttaacctgtcgggaaattttatgccgttcaccccaattcatctcggcccgggtttagtctgcaaggcaattgggggcaggcatttcagctttatggtatttggcggagcgcaagtattaatggacatcgagccgcttattggcattctgcgcggctgggatgtcttgcatggttacacgcataccgtccttggcacgctggtcattggcgctatcgcgggcttcattggcaaacctgtcagttcttttgtcctcaaacgactgcaaatcccgcattatcagttcacatggtcggcgtcttttcttggcgcttttatcggcacgttttcccacgtcctgcttgatgcaatcatgcactgggatatgtcgccttggcggccaatcacctctggcaataaattgcttggcgtcatttcaatggatgcgcttcatttgtcgtgcataattgcggcagtaattggcgctattgtctgcatcatccgtttcaagacacgaggcagggtataatcctgcgctcaagcggatggtcttcgccgctgcttaccttgtacatcaggccgcaacatgccctttcttcgattcgtcattaccaaggtaaacccggactctgaagttgaggatggactcttcaatacagcatatgctttgcgaaaagcgtccatgccggaacaagtccgccttgaactggaagagcatctgacttggttcaacaagaatctggcagtcccgcgccgcttcaatcgttcaaaatccaaaggctacttccataggcgcaaaacaaaggggatttcgtggtttcgtgatactgctgtggatcacgtcgcgcgaatgcatcgtctaaagcgcatagtggagtcgaatggttatcatgtctcaatcatcagggaagatcgcgtgggttacatcgtgtatgaagacgaatatcaggtggtggcagagccgttcgcggacaccaaaaccagctcgtgaatgtgttatgcttcaggcattcagtttggctttgcgcttacgtggatggccttcggctcaccttaagcgttaagtatgcgctgaaactttcctaacaattcgttcaactcggacgtgctaaaatgcgccggttaatttttacatttggcttcataatgccgcactccgaatgcaaattgagaagaggaaacttgccaagggcttgagctacccgctccgagcctccgtattggaggcagccctgtccgctttcaccattgacgcacatcttattcaaggcggcgggaggcgcaatgtactatttgagtgtttcttctggcctcacaatcccaatgtgtcccacgagcgcctgtacattcgcacaaccgctgttccggtagccaacgcacatgaagcccgcacattcatcgaaaactcagttatccctgaattgtccacttgggttcaaggcatcctggcgttagcgccaaactcaactgttcgccgcgaggaacaatactttgagcgttctcttgcaagatatgcgatcagtcaaaaatagttaaggtaacactttaagtttatattatatcttattgattttcatatgatttatgctcattacaacttcagtcatggcgtatttgcccaatgtgcgcggataaaaggcaaacattacaacctgtttcctgattccgaacattgaccgataatgcgcctttttcctgcgtactggtgactggtatgtcctctcttttccataatgttcccgcgtttctgcaaaatcctgccactggcgcgctgcgcgcgcttgccattgatgctatccaaaaggccaactccgggcatcccggcgcgccgctcggcatggcggaaatcgccgaagtcctctggcggcgcaatctgaaacacaatcccgccaatcccgattggccggatcgcgaccgcttcgtcctctccaacggacacggctccatgctcatctacgccctgctccacctcacgggctacgatctcacgatccacgatctcaaagatttccgccagttcaactccaaaaccgccggacacccggagacaggccacacgcccggcgtggaaaccactaccggcccgctgggacaaggcatagccaacgccgtcggcttcgcgctcgcggaaaaactgcttgccgccgaattcaaccgccccggccacaccatcgtcgaccattccacctacgccttcgcgggcgacggttgcctgatggaaggcgtctcccacgaagcctgctccctcgcgggcacactcggccttggcaagctgatcgtcttttatgacgacaatggaatatccattgacggccatgttgaaggctggtttaccgacgacacccccaaacgctttgaatcctacggctggcaagttatcccggatgtttccggtcacgactcccaggcaatcgaggccgcccttgcaagagcgcgggcggacacccaaaagccctcgctcatctgctgcaagaccgtcattggcatgggttcccccaacaaggcggggagccacgattgccacggcgcaccgttgggcgcggatgaagtcgccgccacgcgagaggccattggttggccgcatcctccgtttgaaattcccgccgacgtctacgccgcctgggatgcccggcaaaaaggaaaatcgctcgaagccgactggcaacagcggttcgatgcttatcgcgccgcctttcctgagcttgccgccgaattcgagcgtcgtgtcatccgtcgggagcttccggccgactggcctcgaattgcggcgcaggttatcgccgccttcggggaaaaagcggacaacatcgccacccgcaaggccagtcagaacgcgattgccgccctgcttccctgcctgccggaactcttcggcggctccgccgaccttgctggttccaaccttactttcgtgcagggaagccggggcgtaacggctcttgagggcggcaactactgttactacggggtgcgcgaattcggcatgaccgccattgccaacgggctggcgctccacggcggcctgattccctatactgctactttcctcgttttctccgactatgcccgaaacgccatccgcatggccgcgctcacgcgtcagcggcagattttggtctacacccacgactccataggtctgggcgaagacggccccacgcatcaacccgtcgagcacatccccagcctgcgcctgattcccaacctcgatgtctggcgaccatgcgacgctgtggagacggcggtagcgtggattgccggtatcgaacgcatggacggccccaccctgcttgccctctcccgccagaatctacccaccgtcaccagcgacattggcgcggagaatatcagaaaaggcggttacatccttgctgatgccgacgttggaaccccccaggttgtactcatcgccaccggctccgaagtcaaactggcgctcgatgccaaaaccgtgctggaaaaggacggcatccccacccgcgtcgtctccatgccctccaccaacgtcttcgaccgccaaagtctggaataccggctcggagtcctcggccagcatacccgccgcattgccattgaagccgcgcatggtgatttttggcgcaagtatgtcgggctgaatggcggggtcgtcagcattgatacctttggcgcgtcagccccggccggggaattgtttgagcatttcgggttcaccgttcagcgtgtggtggatgtggtgaaggatgtaataggcacacaaccgtaacccaaagcaataaatatgatgctaaaatgaaacaacccggcaggtttccctgccgggttgctggatacgaattgcgttgaaaacgcaattcttattgtagcaacggctctcaccccggttagccacaataccgggagtgtaaaggagaaaaacatgtctgacaagtctactgaacaacttacttttggcttcgacatcggcattgcttcggtcggctggtgcgtgcttggcgaaaaacacatcgttgatctcggtgtgcgttgttttgacaaggcggaaaacgccaaggatggcgagtcgctcaacctcgcccgccgtagcgcccgcctcatgcgtcggcgtctgcgtcgccgcgcatggcgattggtcaaactgacgcgactgttgaagcgcgaagggctaatcaacagcatttaatcaatacgccagcctgccacggagtcaccctggcaacttcgtgtggacgggctggagcgaaaactcgccccggaagaatgggcgcgcgttctttaccacctctgcaagcatcgtggttttcactggatcagtcgcgcggaagagaaaaatgcagaggcagacagcaagggagaaggcggcaaggtcaagaaaggactctcggataccaagcggcgcatgaatgaaaaaagctaccgaagcgcggctgaaatggtgttgaaggaatttccagaagcgcagcgcaacaagcagggcgagtacgccaaggcgctctcccgcctgctgctcgctgaagaacttgccttgctgtttgagcggcaacgtgaattgggtaatcttcatgcaacgcccgaacttgagatgcgtattgccgggtgcggcgatcgcaaaagcggtctgttctgggaacagaagccgcccctgaccggggaagggcttctgaaaatgctgggacgctgtacgttcgagaaaaccgaatatcgcgcccccaaagccagttttactgccgagcgccatgtctggctgacccgcctcaacaatctgcggatagtcgtcgcaggaaatgttcgtccgctcaatgaagccgaacgccgcattgccctgcccctaccctatcagcaggccagcgacctcacctacaagcaactgaaaaacgccctggtcaaagccggtttgctacccgaaaacgtcaaattttccgggttggattatccaacgcagcaagccgaagataaagtcaaagaccctgaatccgaacggctggtcaaacttcctgcctggcaggcgctacgcaaaaccctcaaggaaaaagggcttgaaaccgaatggagaggcatcgccggagccgcaaccggagggcaaccagaactgctagacagaatcgcctggacgctcagcgtattcaaggacggtgatgagatcgaacaagagttacgcaaactctccctgccaggcggagaaaaaatggttgatgcactcagcgaactcagcttcgataaatttcacaacctgtctctcaaggcgcttggcaaaatcgttcctcacatggaagtcgggctgcgctatgacgaggcatgtgcaaaagccggttatcaccacagtcaactatccaagacaggagacggtcagcataaatacctgccgcctttttactccgggcgagataaaggcggccgcatggtatttgatgaggaaaaggatattccgcgtaatccggttgtactccgttcactcaatcaggcgcgcaaggtgctgaatgcgctggtaagtcgttatggctcgccttccgtcgtgcatattgaaatggcgcgtgacttatcacgcccaatggatgaacgaaacaaaatcaaaaaagctcaggaagaatttcgtgacaagaatgaaaaagccaaagcagattttgaggcaaaattcaatatgcccgcaaaaaaccgggaagttgaaaaatacctgctttatagcgaacaacatggtaagtgcgcctactcgctgaaaccgctcgatcttgaccgggtattgcatgaccagggttatgccgaagtcgaccatgcccttccctggtcgcgcagttacgacgatagcaaaaataacaaggttttggcgcttaccagcgagaatcgcaacaagggcaatcgtacgccttatgaatatctgacttcgtttgcaggaggcgaaaatggggaacgctggcgcaacttcgcagccttcgttgaaggcaacaagtcttaccggcttgccaaacgtagccgcttgttacgcaagcatttcggcaaggaagagtccgaaggattcaaggagcgcaacctcaacgatacgcgctacatctgcaaatttttcaagaattatgttgagtgttatctgaaactggccgagggtggcgacagcaagcgttgcgtcgtacttagcggacaactcacggcattcctgcgtgcccgctggggattgcacaaagtacgtagcgacaatgatcgccatcacgcgcttgatgctgtagttgttgccgcatgtagccactctctcgtcaaacgtctgtctgactattccaggcgcaaggaactggagcaggccggaaatgttattgacatggaaacaggagaaattcgtgacccggaattgttgtcaaaactggaacgacattttccgaaaccttgggagtatttccgggaagaacttttgctgcgcttgaatacagacgatcccgctttgctcaaaagagaagcggaacgtcacggctatccgtcggcaacgctggaaaacctgcgtcccctgttcgtctcccgcgcgccgaaacgtcgtaatagtggcgcggcgcacatggaaaccatctattcccagccggaacgcctgaaaagcacaggaagcgttacgcagaaagtttctttaacgagcttgacgctcaaggacatagataatctgatcgacccgcaccgtaatgaaaaactttacgcggcaatacgcacccgactggaagcacacaatggcaaaggtgacaaagcttttccttcggataacccgttacgcaaacccgaccgtgacggtaatccaaccggcccttttgtccgtagcgttacgatgctcattgacaaactttccggcattccggttcgcggcggcattgccaaaaacgacaccatgctgcgtgtggatgtgttcaggcataaaaaagacaggaaatatcatcttgtccccgtgtatgtgcaccatgcggtagcaaaggaattgccaaatcgggcagttgtggctttcaaggatgaaaatgaatggacactcattgatgaagagaatttcgatttctgtttttctctttatcccaacgacctggttaaaatcagcctaaaaaaaggaggaatccttgggtattacgccggttgtaatcgtgctacaggcgcaatcgacctttggactcacgatagaaatcgggctatcgggaaagacggactgattcagagtatcggcgttaaaacggctttgtgtgtagaaaaattccacgtcgacaccttgggcaatatctaccctgccccgccggaggagcgccgtgggctggcgtagtgttatgatctcccgcccggcgcgtctgcggcgggagcattattcgctggccattgatcaggaagaaacggctttcgtgcctttcgaggacattgccgtgattgtcctcgatcatcgggaaatcacgttgactcatccggtactttcggcctgtgccgagtacggcatcagtctttatgctaccggtagcaatcaccagcccgctggcgtttttctgccgtttctttcgcattcgcgcgccacgcgcatgatgcgaaagcagttgggcatcacccgcccgatggtcaagcgtctctgggcagatattgttcgccgcaagatcgaaaatcaggccgcctgccttaccctgtgcggcaaaaaaggcgtggaaaggctggaaacctgtgcacagcgcgtccgctccggcgatccgaacaatctggaaggacaggcagccgcgatctactttgcagagttgtacggcgctaatttttatcgcgaggacaaaacgcgctggacaaatgccgcgctcaattatggttatgcagtcttgcggggcgctatcgcgcgaggcttggtagcgcacgggtttcatccttccatcgggttgtttcacgacagtgagcagaatgcgttcaatctggccgatgatctgatcgagcctttccgcccattggtcgacctgtatgtcgcccaatgcccggccccgaaggaagctgaactgatgccgaaggataaacaagctctggtcgccctgttgaatgtggatgtcggcatgccgcagggaaaaatgtcggcgctctctgccgtcgagtacgccgttgagagtctggcgcggacttttgaatccggtcatgttgaacttgacctgcctcgtctaatcggtctgcaagcgcacaggctggagtattgatgtgggcacagagacgaggcgctatatgcgattgatcgtcttttttgacctgccaatggtaaccaaggctgaaaaacgcgcctatgtgcagttccgccgctttctcttgaacgacggctacgacatgatccaatggtcggtttacggacgcctcttgaacggcagggatgctgaaatcaagcatctcgcccgcctgacgaataacctgcctcccgcaggctctgtgcgctgcatgaccgtcaccgaaaaacaattcgcaggcatcaagttgttggtcggtatgcctctttttcaggaaaaaaaggtacaggcatcccagattctgctcttttgacctgaaaatttaatgaaagaaatccccgccaggccatgcctggcggggacttgaggcaagtagattgtagcaaaccggggtgagagagggagctacaaccgatagccctcgactgtggtgttttgaagtattgtagcaaaccggggtgagagagggagctacaacccagaggcggcgcggacgatttatgacctaattgtagcaaaccggggtgagagagggagctacaactgaaaaaattgattttgaaaatgaaaatcgattgtagcaaaccggggtgagagagggagctacaacattagccatcgtcatctatccatgcgttttattgtagcaaaccggggtgagagagggagctacaacatcccatccgcttcaagccgtgtcgcttttattgtagcaaaccggggtgagagagggagctacaaccagataaaccggcttgtcgacccattgccaattgtagcaaaccggggtgagagagggagctacaactcatatcctcgtgccatatttgcagcacaaattgtagcaaaccggggtgagagagggagctacaacgcggcctgaagttccgcctcgttatactggattgtagcaaaccggggtgagagagggagctacaacccttccggctgttgctgccgttgtctacgcattgtagcaaaccggggtgagagagggagctacaacaggcagggttgaatacggcgagggcacagaattgtagcaaaccggggtgagagagggagctacaactcaatacgcgggcttgcgcttgtcgtattcattgtagcaaaccggggtgagagagggagctacaacgcgggaggcgcagtcgagtatgaaggacgcattgtagcaaaccggggtgagagagggagctacaaccgcgttcttcgcaaaacctacaagcgcgtcattgtagcaaaccggggtgagagagggagctacaactgttctgcgtagaccccggtcataaggaatattgtagcaaaccggggtgagagagggagctacaaccgggcggataccggaaaatgacggcgtggaattgtagcaaaccggggtgagagagggagctacaacccagatgcccgacttcaacgccctgaatatattgtagcaaaccggggtgagagagggagctacaacgttttattgcttgttgtgttcatggtgccaattgtagcaaaccggggtgagagagggagctacaacactttgcaaaaggtgatggtttgtgttttgattgtagcaaaccggggtgagagagggagctacaactcggaaaagatggggctatcaaccaaaggggattgtagcaaaccggggtgagagagggagctacaacatgcgtgtacagaacctgattctgatggtgattgtagcaaaccggggtgagagagggagctacaaccggcggcacaagccggatggactgccgaaattgtagcaaaccggggtgagagagggagctacaacaaccgccggataatcacgcgaaaacgcaacattgtagcaaaccggggtgagagagggagctacaacgcttgtgaaatgactaaaacccctgactttattgtagcaaaccggggtgagagagggagctacaacgcgcgggtctgaagatgcaagagcgcgaacattgtagcaaaccggggtgagagagggagctacaacagactggaacgcgcctgttacggaattacgattgtagcaaaccggggtgagagagggagctacaacactgcatctaccatcggcgcgggtggcctgattgtagcaaaccggggtgagagagggagctacaactgtcgggctaggacagggaatgtctagtttattgtagcaaaccggggtgagagagggagctacaacgcttggcgcaggcttttcttcagacaaaacattgtagcaaaccggggtgagagagggagctacaacatatacgataagcatccgcccactctgataattgtagcaaaccggggtgagagagggagctacaaccgaccggctatattcatagcaagatatgtattgtagcaaaccggggtgagagagggagctacaacgctatcaaatcaacgcgccctgttagctggattgtagcaaaccggggtgagagagggagctacaacatgagttatgtcgacccaccctcggcaaaaattgtagcaaaccggggtgagagagggagctacaaccaaggttacgaacccctttttcctgcgcggattgtagcaaaccggggtgagagagggagctacaacatcctcgacgcgccatgccgtgacatttggattgtagcaaaccggggtgagagagggagctacaacgcgggcttttcccaccgcaaaacacgatagattgtagcaaaccggggtgagagagggagctacaacgcaaccacgcggcgggagtgtgtatgacctattgtagcaaaccggggtgagagagggagctacaacagtttaatgtcgctagggaatctgggcgaattgtagcaaaccggggtgagagagggagctacaactcaccgtgcgaaagttcaaagtcattgtcaattgtagcaaaccggggtgagagagggagctacaactgtcccgcttatatttctcccttggtgttgattgtagcaaaccggggtgagagagggagctacaacaaacaggcattttccctctttttccttaacattgtagcaaaccggggtgagagagggagctacaaccgggatgcttgcgcgtgttgcgagcaggcgattgtagcaaaccggggtgagagagggagctacaacatttcaaacggaataccaagccccatgccaattgtagcaaaccggggtgagagagggagctacaacgataatggcgcaggaaagtccagtgtcgcgattgtagcaaaccggggtgagagagggagctacaacactctggtgcagacgacatacaaaacatccattgtagcaaaccggggtgagagagggagctacaacgcatttgatagcggcgtagtatccggcataattgtagcaaaccggggtgagagagggagctacaacacccgccttgcaagctgctacggtacgattattgtagcaaaccggggtgagagagggagctacaaccctgcaaaagcgcaccatgctattaggtgaattgtagcaaaccggggtgagagagggagctacaacatactgtataatgcagttacaggcgcgacaattgtagcaaaccggggtgagagagggagctacaacagaatggaaaagattctgccggtacaactgattgtagcaaaccggggtgagagagggagctacaacatttttgttaatacttcgttcacgacttcgattgtagcaaaccggggtgagagagggagctacaacagtatttcacgtccaccagtatcccgtagaattgtagcaaaccggggtgagagagggagctacaactcgcattcacgccactcggtaataaccagaattgtagcaaaccggggtgagagagggagctacaacagctccggcgataattcaaccgtcggccacattgtagcaaaccggggtgagagagggagctacaacttcaaatagtaatcgccattgtctcggcgaattgtagcaaaccggggtgagagagggagctacaacttcaggggttcttccgttctgcgtctccatattgtagcaaaccggggtgagagagggagctacaaccccgctgtcaaggcttgtcttggcaagtccattgtagcaaaccggggtgagagagggagctacaacacaatccggcggacatctccaccatgcgatattgtagcaaaccggggtgagagagggagctacaacgggcggcgatggcggacatatgcgcggaaaattgtagcaaaccggggtgagagagggagctacaacgggcagggtggagctgcctgaattcctgcattgtagcaaaccggggtgagagagggagctacaacgcgggcggcgcagtcgagtatgaaggacgcattgtagcaaaccggggtgagagagggagctacaacaatttccgatagctggtcgtcattccattgattgtagcaaaccggggtgagagagggagctacaacccggcacgcctttcgttgtagcacgcgaagattgtagcaaaccggggtgagagagggagctacaacgggctggagcaggccggataacggaagtgaattgtagcaaaccggggtgagagagggagctacaacggtttaatgtcgctagggaatctgggcgagattgtagcaaaccggggtgagagagggagctacaaccttcaaggcgcaataacacgccctcgaaagattgtagcaaaccggggtgagagagggagctacaactggcgggtacttgccccaggcggctaacgtattgtagcaaaccggggtgagagagggagctacaactggcgggtacttgccccaggcggctaacgtattgtagcaaaccggggtgagagagggagctacaacagaggcgggacaagcccgccccctgttttcattgtagcaaaccggggtgagagagggagctacaactgagttcatgacgatgcactaggataaacaattgtagcaaaccggggtgagagagggagctacaactcacaaatcgcgttgatttgttcagcaaggattgtagcaaaccggggtgagagagggagctacaacgcgacgagctgcccatgcacgacaagaccgattgtagcaaaccggggtgagagagggagctacaacctatctggagttccgtccagcataccagcattgtagcaaaccggggtgagagagggagctacaaccgggcgacggtcgcgggtcacgcaagcataattgtagcaaaccggggtgagagagggagctacaaccaaatatggcacgaggatatgatgcagttaattgtagcaaaccggggtgagagagggagctacaacgtaattgcttgtgtcatgatggttccttctattgtagcaaaccggggtgagagagggagctacaacacacgcccctacatacccctgcaacctcaaattgtagcaaaccggggtgagagagggagctacaacgatttatccaatacttgacgaaccagaagaattgtagcaaaccggggtgagagagggagctacaactgaacatgcgcttccacttccgatgctttattgtagcaaaccggggtgagagagggagctacaacctgttcaataccggcctgccgcgctgcataattgtagcaaaccggggtgagagagggagctacaaccctgcaaaagcgcaccatgctattaggtgaattgtagcaaaccggggtgagagagggagctacaaccggttcatatttatgaatcgtgcgaacaatattgtagcaaaccggggtgagagagggagctacaacacggcttgatagccattgcaaagctggaagattgtagcaaaccggggtgagagagggagctacaacgcggatagcaagtgagccagcctgtgttatattgtagcaaaccggggtgagagagggagctacaactcaatacgcgggcttgcgcttgtcgtattcattgtagcaaaccggggtgagagagggagctacaacgcgggaggcgcagtcgagtatgaaggacgcattgtagcaaaccggggtgagagagggagctacaaccgcgttcttcgcaaaacctacaagcgcgtcattgtagcaaaccggggtgagagagggagctacaactgttctgcgtagaccccggtcataaggaatattgtagcaaaccggggtgagagagggagctacaaccgggcggataccggaaaatgacggcgtggaattgtagcaaaccggggtgagagagggagctacaacccagatgcccgacttcaacgccctgaatatattgtagcaaaccggggtgagagagggagctacaacgttttattgcttgttgtgttcatggtgccaattgtagcaaaccggggtgagagagggagctacaacactttgcaaaaggtgatggtttgtgttttgattgtagcaaaccggggtgagagagggagctacaactcggaaaagatggggctatcaaccaaaggggattgtagcaaaccggggtgagagagggagctacaacatgcgtgtacagaacctgattctgatggtgattgtagcaaaccggggtgagagagggagctacaaccggcggcacaagccggatggactgccgaaattgtagcaaaccggggtgagagagggagctacaacaaccgccggataatcacgcgaaaacgcaacattgtagcaaaccggggtgagagagggagctacaacgcttgtgaaatgactaaaacccctgactttattgtagcaaaccggggtgagagagggagctacaacgcgcgggtctgaagatgcaagagcgcgaacattgtagcaaaccggggtgagagagggagctacaaccgggcggagcaatcagatggggcgcggctgattgtagcaaaccggggtgagagagggagctacaacataagcggcgatgattccgtcccgagccttattgtagcaaaccggggtgagagagggagctacaacgaactggtaggtggcacgggcagagattcgattgtagcaaaccggggtgagagagggagctacaacaaacgccgtggctgctgatagcgcgacatcattgtagcaaaccggggtgagagagggagctacaaccgcgacattgatggcctgaccgtcgaaattaattgtagcaaaccggggtgagagagggagctacaactatctggcggagctaggttactcacctgtaattgtagcaaaccggggtgagagagggagctacaacagctccggcgataattcaaccgtcggccacattgtagcaaaccggggtgagagagggagctacaactcttctgcgtcgcttgctttttcgcagccgattgtagcaaaccggggtgagagagggagctacaacagaccggactcgaaagatcatatgattcccattgtagcaaaccggggtgagagagggagctacaactgttctgcgtagaccccggtcataaggaatattgtagcaaaccggggtgagagagggagctacaacggcttgcctgagggcgcggcgttgctccgcattgtagcaaaccggggtgagagagggagctacaacggtcatggcttaatcctcctgaacgaaattattgtagcaaaccggggtgagagagggagctacaactagaacgtctagcggcgtgtcgctggctatattgtagcaaaccggggtgagagagggagctacaacatacgacaaggccgtacagcttgggttacgattgtagcaaaccggggtgagagatggagctacaacgttgggcaatgcacttcccgtcccatgccgattgtagcaaaccggggtgagagagggagctacaaccctaatctgcctgaatccgtaggggcgaacattgtagcaaaccggggtgagagagggagctacaacatgagagttaagcaaaccaccgtctgaagaattgtagcaaaccggggtgagagagggagctacaacgaaagccgtgagattcgttagtttcgtgctattgtagcaaaccggggtgagagagggagctacaaccgcgtctgaatcgcgccccagaattccaagattgtagcaaaccggggtgagagagggagctacaacaccagcgtgaaagtcctgccacatattccgattgtagcaaaccggggtgagagagggagctacaaccatgaggccaaaagtgacaagacgaggcgcagcataattagtaaaagatcgttatcaaaccgaactataatcaattaaaatcaataagatatagtataaacttaaagtattacattagatcagtttagctttaagcgcgcacactttttctccaaaggtaaagcagtcacggcgcgctaaacccctcccccgacccatctcccgcttgcgggagatgggagtaaagcgcactcccaactgtctcgttatcgtgtaatcgtttcagtttgaaaagcgccaattatgctttcagcccttctcccgcaaggagaaaggctgaaaggtcagggacaggcgaaaaggaaggcgggctgaaaccgctaccgctacttgccgttgcactgctccttattgagcaggccgcagaccgtgtaggccacggtggttgtggtgatgtagccaaatccgaacagcacggtaatcagccagaagtctatggggcctccggcatccgtaaagccggaggatgaggcaagggtaatcaggatcacaaacaataccccgcctgacacgccgattgccttaacgcgagccgaggcttgccacatccagttacggttgcgaaacgactggacgacaaaagcgacgctgacgataaccgcgaacagaaacaagggccagaaccaccctcccagcatctcctgaaacaggaagaagaacgcggacaactccatatctttcatgtgtatttctccgtttcaggcgcgcccgcgcaacatgctgagataggtcggcttcagacccatcgttttgatgacccatgtcgcccacaactcttccagcggcgcaatgatgccgggaaaagaaggcacgagattgttatcgtaatcgaattccaccagcatggcgcgtcccagtcgggtaatcaggggacaggaggtgtaaccattatagattgcatccgaagtcttgcctctg

SEQ ID NO: 2893 - DNA, 22906 bp, synthetic construct
  source 1..22906: mol_type = other DNA
  misc_feature 1..22906: note = Synthetic
atcgaagccaaccgcgtctacaccgaaggcaagggcgaaacccagccggtcaccggcgacaagtgcggcaagagcgacaagaagtcgaagtcgctgatcgactgcctgcagccggaccgccgcgtcgacatcgaagtcatcggcaccaagtaatccgccgctgctacaatgcaggccctgcttcggcagggccttttctttttcagccttgcgaaaccgaccatgctcaacgccgaccccagcgaactgcaaaaatttggcgacctggcccaccgctggtgggacccgaacagcgaattcaaacccctgcacgacatcaaccccttgcgcctgggctggatcgaccgctgcgtcggactgcgcggcaaacgggtgctcgacgtcggctgcggcggcggcctgctctcggaaggcatggctgcgctgggcgccgaggtcaccggcatcgacctctcggaaaagccgctcggcgtcgcccgcctgcacctgctggagagcgggcagaaggtcgattaccggcagatttccgccgaagcactggccgaacagatgcccggcgccttcgacacggtcacctgcctggaaatgctcgaacacgtgcccaatccgtcgagcaccatcaccgcctgcgcccgcttggtcaaacccggcggccaggtcttcttctcgacgctcaaccgcaacccgaaggcctacctgttcgcggtgatcggcgccgagtacctgctcaagctgctgcccaagggcacccacgattacgccaagttcatcaagccgtccgagctcacccgctgggccaagatgggcaacctggaaccgcaggaaatcctcggcatgagctacaacccgctgacccgcgagtacagcctcggccgcgacaccagcgtcaattacctgctgcgcgcccagcgcaatgcctgaggccgctccccgggccgtccttttcgacctcgacggcacgctcgccgacaccgcccccgacctcgccgcctgcgtcaatcgcctgctggtcgaggaaggccgggcgccgcagccgctcgccgagctgcgtccgttcacctcacagggcgtacgcggcatgttgttcaagggtttcggcatgagccccgagcaccctgactacgccgccttcgcggcgcgcttcctggcccactacgaaacccgcctgtgcgaggaaacgcgccttttcgacggcattgccgacctgctcgaccggcttgaggagaacgggctgcgctggggcatcgtcaccaacaagcggatgcgctacaccgacccgctggtccgcctgctcggcctggcgccgcgcacgacctgcgtcgtcagcggcgacaccacggccgccgccaagccatcgccgctgcccctgctgcatgcctgcgaactgctcggggtggcgccgtccgccaccctctacgtcggcgacgaccagcgcgacatcgtcgccggccaggccgccggctgcgcgacgatcgccgtgcgctggggctacctcggcgtcgagcgcccgatcgaggcctggggcgccgaccgcatcgtcgaccacccgcgggaaatcgccgccgtcagtcggccgacctgaccgccgcccgctcgcgccgccggtaaccgatcaaggccggcaccaccgccagcagcagcactccgagcgccgccagcagcggccagcgcaccggcgcattccactcacgccgcgcctgcgcccggtcgacggcgtcgacccgctggtacttcagcgtgttgttgccgacatcgctcggtttgcggttcttcagccagcggtgggtcagcgtgtagctcttcgggtgctgcccgaaaacccagggcgcgtcgtggcgcaggatgtcgttcatgcgccggatgatggccaggcgctcgggcgagttctccatgttcttcatctgcaggaacagccggtcgtactcgggattctcgtagttggccgagttggcgccgccttgcagacgcccttccggaccgtgcagcaggaacatgaagttctccggatcggggtagtcggcattccagccgaggtagaagagctggaaggcgcccttgcgcagcttgtcctggaagcggttgaagtcggtggcgcgcaccaccagttgcacgtcgatcttggcgaactgccgggtcagccagtcgaggcgcgatttttcgcccattccgccgccggtggtgtcgaggttgagaaccagcggctcgccgttcctggcgtcgcgcccattcgggtagccggcttcggcgagcagctgtttggcgacggcggccgacttgcgccgcgcctgcccttcgacccagtcatagacgacgcggttgattcccgcctcgcccgcttcgtagccgaagatgccgggcggcagcggtccctgggcggcgatgccgcgaccgttctggaaaatcgagatgaactcctcctggtcgatggcgatcgacaccgcctgacgcagcttagccgctttttcgccgaggccgccgaccaccggatcctgcatgttaaagcccatgtagaaggtcgatgggcgcaccgaagtcaggaggcggatgcccttgtcgcgcatctcgtcggacagcgcgacgtcgccgccgacgttgacgcggaccgcctgatcgaagctgtccgaggaaatgccggaggcgtcgtagtagccctgcaggaacttgttccagtagggaatcgcctccttctcgcgggtaaagaccgcctgctcgatgaagggcacgctcttgccgcaatcggcaagcagaccggcgtcggcgtcttcggcttcgccgtcgcagggatagggttcgccacggaaattcgggttgcgggtgagcaccatgcgccggttcgggtcgttctcggtcagcatgtaggggccggtgccgaccggccaccagtcgagcgtcaggttcttctcgcgcatgccgggttgggcgtagaagcgatcgacctcgcgcggcaccggcgcgaagaagggcatcgccagccagtaggaaaactgcggatacttgccgcggatgcggatgcgccaggtccgcgcatcgacacgttcgacgccgctcagggcgaaggcgtcgagatcgagccaggtgtcgtcgggcaggtccttgaccgccgcccgcagacgttcgccgagttcgcgcaggccgacgatcttgtcggccatcatgccgtagatcggcgagtgcaggcgcggatgggcgaggcgcttgatctggtagatgtagtcgtcggcgctcagttcgcggctggcgctggccggaaaatcggcgatgctctgccgaccggccgccgtctcggtaccaaggaagcgcggctggccggcagcgtcgagcgcgaaagccggatgcggctgatagcggatacccggctgcagggtcagttcatagacgctttcggcgatcgccgcgtccggcgcatcgtccggcagccggctgccgtcggccgccaggtagcgcggctgcggcactgcttcgacggtcgccgggatcaactgatagggacggcgcaggtaatggtactgcagcggcggttcgtagatctggccggtgaaggcggcctcgtcctcggtgtaggactgggcggggtcgaggtgtttggggcggtcggtgaaggccgtatagaggatttcgcggccggcatcggcggccggatagggtgtgttccacgactcgccgcaggccgcgaggccgaggcagaaaagcaggcaggcaggcagttttcccatggccgccagtgtataacaaaggcttgaccgggccagcgggctccgaacacaatggcccaaaacaaccacaggaagccaccatgctcgacaccccggtccccgacttcgccctgcccgccaccagcggcaccagcttcaggctcgccgaccaggccggccgcatcgtcgtcatctacttctaccccaaggacagcacgcccggctgcaccacggaaggccagaacttccgtgatctgcacgcccagttctccgccgccggcgcggtcgtcctcggcgtttcccgcgacagcctgaaggcgcacgagaatttcaaggccaagcagtcctttcccttcgaactcggttccgacgccgacgaggccgtctgcaacctgttcggcgtgatcaagcagaagatgatgtacggcaagcaatgccgcggcatcgagcgcagcaccttcgtcatcgaccgcaatggcgtgctgcgccgcgagtggcgcggcgtcaaggtcgccggccacgcccaggaagtactcgacttcgtcaaaaccctctgatttccaaccgtccccgcgagacccccatgccgcgccaacccgccgccaagaagcccgcaatgaccaagatcttcgtgctcgacaccaatgtcctgatgcacgatccgagttgtctgttccgcttcgaggagcacgacatcttcctgccgatcatgaccctggaagagctcgacaaccacaagaaggggatgtcggaaatcgcccgcaacgcccgccaggcctcgcgcatgctggacgaaatgctggcccacgacgacgtcgacatcgacgaggggatcgatctttacggaccatcggccaaactggcgagcggccgcctctacctgcagaccgaggcgatcagcaccgaactgccgcagggcctgccgacctccaaggtggataaccagatcctgtcggtcgtcatccacctccagaagaaattccccaagcgcccggtgatcctggtgtcgaaagacatcaacatgcgcatcaagtcgcgcgcattgaacctgctggccgaggactacttcaacgacaaggtgctcgaggacaccgacatcctctactccggtacccgcgccctgcccgacaacttctgggaaaagcacggcaagggcatggaatcctggaagaaggacagcaagacctattaccgggtcaatggtccgctttgcccgcagtttctggtcaatgaattcgtctggctggaaaaggacggcttcgccgcgatcgtcaaggaaaccgccggcaagagcgcggtgctggaaaccctggtcgactacacgcacccgaagaatgccgtctggggcattaccgcccgcaaccgcgaacagaacttcgccctcaacctgctgatgaatccggagatcgatttcgtcaccctgctcggccaggccggcaccggcaagacgctgctgactctggccgccggcctgacccaaacgctggaaagcaagcagttcgccgagatcatcatgacccgcgtcaccgtcccggtcggcgaggacatcggtttcctgccgggcagcgaagaggaaaagatggcgccgtggatgggcgccctggaagacaacctcgaggtcctgaccaacaccgacgacagcagcccctacggtggcgactggggcaaggccgcgacgcacgacatcatccgctcgaagatcaaggtcaagtcgctcaacttcatgcgtggccgcactttcctgaagaagtacctgatcatcgacgaagcgcagaacctgacaccgaagcagatgaaaaccctggtcacccgcgccggcccaggcaccaaggtggtctgcctgggtaacatcgcgcagatcgacaccccctacctgaccgaaggcagctccggcctgacctacgtcgtggaccgcttcaagggctggccgcattccggtcacatcacgttacaaagaggcgaacgctcgcgtctggctgatcacgcagccgacgtgctatagtcggcgccactttggcaaggccgtgtctgacacggccttttcatttcaaccttgatttttcccgaggttcgccttgaaacgcagagactttctggccgcatccgcactgttctcgctctttaccggcgacgcccttgctgcaaagaaaaagacccagaaaaagaccactgcgaaaaaaacctcgcgcaaatccagcaagaagaaaagcccccgttccgcacgctccaatctcaccgggacatcgcgtcccgccgtacatagcgccgccaccccgttgatcgatgcctccccggaaggcacctcgacctcacgcctgccgccggttcgcgcccaggaagcccccagcgattggcagacctatgaaatcgtcacgacgctgaacctgcgcgcaccaggacaaaatgccaacctctggctgcccctgccctcaactcaggacaatctgcaccagcggctgctcggccataactggcaaaccgacgcccgcaatgtcagcctgcagcgcagacccgagggcgaactcgaagtgctgcgttgcgaatggaacgacgcaagcaacgcctccttgcgtctcgtcacgcaaatcagcacggccgaccggcactttgacatcacccggcgcagcgtcccgcccgaacgcgacgacatcctgcgccataacctgcaggccagcacgctgattccgaatgacggcctggcccgccaactgggtgaacgcatcgtcggacggatcaaggatcccctggcgcaagtgaaggccatttacgactggatctgcgaaaacgccatctacgacccatccttgcccggctgcggcaatggcgagatccatcgccaattgatttccgggcagtacggcggccgctccgccgacatcaacggcctgttcgttgccgtctgccgatcaatcggcatcccggcacgctgcgtctatggcatccggatcggccgctcccggctcttcccctcgcttggcctgcgcagcgacgatgccacgcgcgcccagcatgtccgggccgagttctatctgcccggctacggctggattccggccgaccccagcgacgtccgccgggcggtcgcctatgaagcgctccaggagggcagcggccagctcgcatcgctgcgccgggtcctgtttggcgtctgggaaatgaactgggcgggattccattccggcaacgatctgcaactgactggcctgtcgcataccttgccgcacttcatccttccacaacttcgagtcggcgcacagaatatcgacgtgctcaacccgaacaacacctccatccgcatcagcgcccgccagatcgtgctgtaagagttccgggcggcaatttctccgccccgcccgacgcgaggttttggcttgcgccaaaacctcgaacctagtcccgcgcgtcctggaaaccgcccgacgcgaggttttggctggcgccgaaacctcgaacttagtcccgcgcgtcctggaaaccacccgacgcgaggttttggctggcgccgaaacctcgaacctagtcccgcgcgtcctggaaaccgcccgacgcgaggttttcaaagcgggtgaattcgccgaggaaggcgaggcgcacggtgccggtggggccgttacgctgcttgccgatgatcacttcggccaggcccttgtccggcgaatcgggcttgtagtattcgtcacggtacatcatcaggatcacgtcggcatcctgttcgatggcgccggattcgcgcaagtcggacatcatcggccgcttgtcggtacgttcctcgaccttccgcgacaactgcgacagggcgacgatcggcacctgtagttccttggccagcgatttgatcgagcgagagatttccgagacctcggtggcgcggttctcgcctgccttgttgccgctcattagctggatgtagtcgatcaccagcaggccgagcttgccgccgtactggcgcgccagacgacgcgcccgggcacgcaggttggccggactgagaccaccggtctcgtcgatgtagatcggtgcttcgtgcagcttgccgagggcaaacgacagacgcgaccactcatcatcgctcatccgcccggtgcgcagactttgtgaattgagccgaccgatcgaggccagcatccgcatcgccagctgagcgccgcccatttccatggaaaacacgccaaccggaaggccgctatcgaccgcaacgttctcagcgatattgagcgcgaaagccgttttccccatcgacggacgaccggcgacgatgatcaggtcgcccggctggaaaccggaggtcttctggtcaagatcgaggaaacccgtcggcacgccggtgatgtcggaaggattgtcgcgatcgtgcagttcctggatgcgctcgacaacctgggtcagcagcggattgatatgcacgaaaccttcggcgtgaccggcgccggcttcggcgatcttgaagattttcgattcggcctcgtcgagcagggaggccgcatcccggcccagcggattcaacgcatcggacgcaatttcgtcggccgtcgccaccagttgccggagcaccgcacgctcacggacgatttccgcgtaacgccggatattcgccgctgacggcgtattcgccgccagctcgccaagataggcaagtccaccagtctggtcgttttcgccagcggcatccagcgcctcggcgaccgtcaccacatcggccggtttcgccttctcgagcaggttgcggatttgccgaaaaatccgccgatgctcgtcgcgatagaaatcactctcggcgacctgatcgccgatgcggtcccaggcattgttgtcgagcagcaggccaccgaggatcgactgttcggcctcgatcgaatgcggcgggacgcgcaaggtatcgagtacgggatcggcggcccgggacttgttctgtcgctggttcatggtgttctgcaatcggcatcgggggccgccattataagctgcccccctgccacatcacccgacatgcgggtccgcaccgggtggttaaagaagttgcagtcatgagtgacgagccccccccaagtcgatcaaagtaggcgatcgtcagtatcgaatcgatcagccggcagccatttcgccaccaactgcgagcgcttcccgccgcccggcgcgccacggtttctgaggcgtccagcgctttcgactcccgatacatcgaaacctcacgttgcctgtgcatgagtcgaatcgcccgcaaccggtgtcgcatccactcgtccagcgtacgccagactctcggcgtttgcgataaccggaaactggctatccaccccggcacataggaacgcagcgcttcaacaacttccagcatgtcgatccgtcaccgtcggaatgccctgctcacactcgcctccgtccgctaccggtccccgccccggtttcccaggcgtctgacgcaagacttcacgcatcgacatggcgtagcacattccttctcggctaactcttcagcttgatcacgagagcctcggggtccattgaccactcgccctgctcggcaacgccttctatccggttctcgtccatcggctcgcggatacgatccacgctcggtcgccctcacgcagttgcacttcactgcgttcgcggtgatcgactcacggcggaacttgcacccgatcgaatggcccatgctgggcgcacaaagagaaggcccgacaggtttccctgccgggccggattcggtcgtcacccgaaggtgacaccttattgtagcaacggctctcaccccggaaagctacatggcgttattctacgcattccggatagagaacagcaaatcatgagcgcgacatacaccattggtctggacattggcatcgcatcggtcggctggtgcgttcttggtgaaacccacatcatcgacctgggcgtgcgcgccttcgataaggccgaaacggccaaggaaggggaatcgctgaacctcgcccgacgcaatgcgcgcctgatgcggcggcgcttgttccggcgagcatggcggctgaaaaagctggcccgcctgttaaaaagtgaaggtctgatcgccgacgccaaggcattccagcccgaacacgcttttacccattcgctctggcaattgcgcgttgacggcctcgaccgccgcctgaacgacgaagaatgggcacgcgtcatctaccatctcagcaaacaccggggcttccactggatcagccgcgccgaagcaaagcaagccgagggcgacagcaagagcgaaggcggcaaggtcaaacaggggctcgccggcaccgccaaattgatgacggaaaaaggttatcgcagtgcggccgaaatggtgttgggcgaatttcctgatgcgcaacgcaacaagcagggcgaatacaccaaagctctggcgcgggaactgcttgccaaagaactggccctgctcttcgaaaaacaacgagaactcggcaatccccacgcatcaagtgcgctgcaaaccgccatcctcggcaacggcgacaagaagagcggattgttctggcagcaaaaaccggccctcgccggggccgacctgctcaagatgctcggcacctgcaccttcgaaaaaggtgaataccgcgccccgaaagccagtttcaccgccgaacgccacatctggctgacgcgcctgaacaatctgcgcatcgtcaccgatggcgtcacccgccaactgaccgaacaggaacgccaactctgcctgcccttgccttaccaacaagccggcgacctgacctacaagcaactcggcacggcgctgaccaaagccgggctgctggaagccggcagcttcaaattcaccggtctcgcctaccccaccgaagcgcaaaaggctgaaggcaaggcgaaagacccggaatccgctacgctgatcaaaatcccggcctggcaggaactgcgtcaaacgctgagcaaggccggcctcgacgacgaatggaaaaaactctcgggcgatgcgctctgcggtcaaccggaaaacttcgaccaaattgcttgggtgctcagtgtccacaaggacgacgacgaagtccgcgccgaactcgccaagctgccgctccccaaccgcgacgcgctcatcgacgccctgctcaacatccgcttcgacaaattccacgccctgtcgctgaaagccctgcgcgccatcgtcccgcccatggaaaaggggctgcgctacgacgaggcctgcgtcgaggccggctatcaccacagccagttgcacaaggtcggcgaaagcgaacacaaatatctgccgccgctctacgccggacgcgaccaggacggccgcatgcgcttcgccgaagatgccgacatcccgcgtaaccccgttgttctgcgttcgctgaatcaggcgcgcaaggtggtcaatgccatcatccgccgccatggttcgccggctgcggtccacatcgaaatggcccgcgatctctcgcgccccctcgacgagcgcaacaagatcaagaaggagcaggacgaataccaggcacggaatcaacgcgaccgggaacagttcatcgaattgttcggtcatccccccaaaagccttgagttcgaaaaatggcgcctgtaccgggagcagaacggacaatgtgtttactcgcagaagccgctggcgccgtcaggcaacgttgccgaaatcttcctcgaaggctccaccgaaatcgaccatgccctgccctactcgcgcagtttcgacgacagcaagaacaacaaggtgctggtcctgacccgcgaaaaccgcgacaagggcaatcgcacgccttacgagtatctgggcggcgccgaaaacagcgaacgctggcaacgctacgttgcctttgtcgaggcgaacaaagcgtatcgactggccaaacgcacccggctgctgcgcaaggatttcggcgcaaaagaatccggggaattccgcgagcgcaacctgaacgacacccgctacatctcccgcttcttcaagaactacatcgaacaacacctgaaacttgccaatggcagcgaagccaaacgctgcgtcgtcgtcagcggccaactgaccaatttcctgcgcgcccgctggggattgctcaaagtgcgttccgacagcgaccgtcaccatgcactcgatgcggccgttgtcgcggcctgtagtcacagcatggttcaacgcctgtccaattactcgcgcacccgagaactggaacaagtccgtgatggcttcgttgatatcgaaaccggcgaaatcgtcaatccagccatgcatcagcaactgcgcgaacatttccccgatccgtggccctacttccggcacgaactcgaagcccgcctgaagatcgactctcccgaactgctacgcgaagaaatggcacggctgggcagctactctgaggaagaactcgcaacactaaagcctctattcgtttcccgtgcgccgcaacgtcgtaatggcggcgcggcacatagggacaccatctacggccaaccggagagaatgaaaagaacaggcggtgtcactcaaaaagtgccgctctcgagcctgacgctgaaagaccttgattcgctcgtcgatccgcaccggaacgtaaaactgtacgaggctatcgccaaacgcctcgaagcccatggcggcaaaggcgacaaagctttcccatcatccaacccgttacgcaagccggacaaggaaggcaacgagaccggccccatcgttcgcaccgtcaccaaggtcatcgacaagctgtccggtatcccggtacgcggcggcatcgccaagaacgacaccatgctgcgggtggatgtcttcaccaaagccggcaaattccacctggtaccggtttatgtgcatcaccgtgtgactgggctgccgaatcgggcgattgttcaggctaaggacgaagaagaatggacgctgatcgatgagagttttgaatggtgcttctcgctgtatccaaacgatctcttgcaagtaacccaaagaagcggtgaaacagtattcggctattaccgaggctgccatagcgggacaggcgcactcaacattgctctacacgacagatttgctttcggagaaaaaaccaccagtctggcctgtttcaaaaaggatccaaacaaacctataccaaacgacaagctcggactgattgagggtgttggcgtaaagatggcagcaaagctggagaaattccacgtcgataccctcggcaacatctaccccgccccgccggagaaacgtcgtgggctggcgtagtgtgatgatctcccgtccggccaagctgcgccgggagcatttctccctggccatcgagcaggagcagaccgcctttgtccccttcgaggacatcgccatcattgtcctcaaccatcgcgaaatccagctcacccacccggtcctctcggcctgtgccgattacggcattggcctctacgccaccggtgacaaccaccagcccaatggcgttttcctgccgtttctcgcgcactcccgcaccacgcgcctgatgcgcaaacagatggacattccccgccccctggccaaacaagcgtgggccaacatcgttcgacgcaagatcgaaaaccagacagccgttcttcgtttttgcgcgaaaaacggtgttgaccgcatggattcctacgcccggcgcgtgcgttcaggtgacacggaaaacctcgaaggtcaggccgccgccttctatttcacccaactcttcggccagggtttttgtcgtgccgaagaacgctgggtcaatgccgcactcgattatggctatgcggtcctgcgcggcgccatcgcccggggactggttgcccacggcatgcacccgcccatcggcctctttcatgccagcgaacaaaacgccttcaatctggccgacgacctgatcgaacccttccgccccctggtcgacctgcacgtcgccaagaacccggctttcaccgaaggcgatctcagcccgcaggacaaggcagaactggtcgccttgctcaacgtagatgtcggcatgccgcaaggcaagatgtctgcactttccgccatcgaatacgcggtcgagagccttgcccggctattcgaggagggcaacagcgaactcgaacttccagccttgatcggcttgcaggcccaccggctggaatgctgaggcatgggactggagacacgacgcttcatgcgactcatcgtcttcttcgatctgcccatggtcaccaagaccgaaaaacgcgcctacgtccagtttcgccgtttcctgctcaatgacggctacgacatgatccagtggtccgtctacgcccgcttgctgaacggcaacgacgaccacgaaaaacacctcaaacgcctgatcgacagcctcccgcccgccggctccattcgctgcatgaccgtcacggaaaaacagttcgccggcattcgcctgctggtcggcatgccgctttttcaggaaaaaaaggttccggcgaaccagatgctgctgttctgacgcaaatttgcatgaaaaaaattcccgcccagctaagccgggcgggaatttcggtttggtcgattgtagctttccggggtgagagagggagctacaactagcgggtcaggccgttgatgacgaagcggattgtagctttccggggtgagagagggagctacaacccctgcacaccatagatcgttggcggaacgattgtagctttccggggtgagagagggagctacaacgcgcgatgccaccgcgcaaggtgcgcaggcattgtagctttccggggtgagagagggagctacaacgacgacggcgtcctgctgcgcaagtacgtcattgtagctttccggggtgagagagggagctacaactccagggtaacaataagggtcatatgccttattgtagctttccggggtgagagagggagctacaacacaacctgaccgaggggcgcgatgcgacagattgtagctttccggggtgagagagggagctacaaccatgatttgatctcctgttatttgctggtcattgtagctttccggggtgagagagggagctacaacttgcccggatacagagccaaagaatggtggattgtagctttccggggtgagagagggagctacaacgctgtcgggatgatggctttcagttgcatgattgtagctttccggggtgagagagggagctacaacgcaaaacgaaacgcaccaaaaaccgcgattattgtagctttccggggtgagagagggagctacaacccggccattcctcggcctctcgtccgacgaattgtagctttccggggtgagagagggagctacaacctggattcccgcccagcccgtcagcctcaaattgtagctttccggggtgagagagggagctacaacccatgaagaggcgacccaagggtcaccccttcacaggtgccgctctcgcggcgtctacaaaaatggggcttcctctttgtgagccacgaaacgagctgttccgttgcgctccatccttgaacacctgtccagaaaatgagcgggcagtgctaccgtccggagcgccctccggcccctcctccgctgcttgaaacgccggtccagcaaggcttcccgccaaaacacccgatacctcgcagcggctggcacgggcttcgcactaaaggccgcgccacaccatcgcctggcgatggcgacgggggaatgccggcgggtcgggagcccgcacggcacacatcaatgcaaatcacctggagacaatccatgaccaaaaaaatcatcgcgctggccatcgcggccgccgcttcggcgggcgccctggcccagagcaatgtcaccatctacggcaacgtcgatatgggctggatgcaccgcagcggcgacaacggcgcggtcgccccgagcaagtcgcaaaacgccgtgcagagcgccggttcgcaaagccacatcggcttcaagggcacggaagacctcggcaacggcatcaaggcgctgttcgacctgcaataccggatcaatcccgacatcggcaccggcccgacccaggccgggcaccagttcatcggcgtcaccggcggcttcggcaccgtcgtcgccggctacctcgacggcctgcgctacggcatctacggcaagtacaacccgttcggcaactactcggtcggcaacttcgcctcgatgaccacccagtacgaccgcgcgtccaacgctgtggcctacgtctcgccggccttcaatggcttcaccctgatcctggcgacggcgaccaacacccagggcgacgaaggcagcctgaacggcgtccataccgtcggcggcgtcgccaacggcggcaacaacggcgacgaccgcctgttctccgccaacctaatctacgccaacggcccgctcagcgtcgatctcgactacgagaccacgaaggccgtcggctactccaacagccgcctctacgtgctgaccggcggcgcttcctacgatttcggcccgatcaaggtctccggcgtctacgacgtcatcaagggcgacccgaactcgctgatcggcggcaacatcgacctcgacgccgccacgccgggcaaccagaacctgggcggcctcgccgccggccaggaatacgaccgccgcaactggttcatcggcgccgaaatccccttcggcaagctgaaggcactggccagctacggccaggtcaaggaccgcacgctgaacgacgccgacgcccgcaaatgggcaatcggcgcccgctattcgctgtccaagcggaccgaactctacgccgactacgcgcagatccggaacgacgacaacgccggcttcaccatcaacccgatgggcaactcgctcggcctcagcggcgtcggcgtcaagggcttcgccatggggatgaagcacagcttctgaccccgccccgacgcgccgcaacaacggcgcttcggacctgcttttcttgcgtcagatgcttcagcatcttttcggggcgtcctgcgggacgccctgtttttcaaaaatccttcttcccgtcgagccgctgtccccaccaggggcgataccactgcccgcggctgttggcctcgcggtcgatgcgggcggggtcctgaatttccgctggctgcgggttgggcaggatcagcatggcgcgagcggcgtcggggtcgcggctggagatatagaggaccgggtggcggcgctggttggcggcgtaggcggcgagcagcagggtgtaattgacggtgttggcgcccagttcgtcgaacaccgccggcaggtcgatggcgtcgcggtgcaggtcgtaatccggcagcaggtcgtgcaacgcggcgccggtatcggccaggcgctgcgccgcagccggcgtgtaacgaccgcagtcgcgggcgacggtgccgatcgccgtcggcgcgatgccggcgctggcgcaggcctgttcgactgccaggcgcaaggcggtaacgcgcggcgactcgcccttgaccttgtccaccgacttcaccggcacgacggccggcgcggtgaagtaagccagcgccgagcgcccgctgacaaagcctggatgcgccagcatcagcagcaccgcagcctcgttcggcaatttgtactttggccaactcggcgcatcgacagtacccagccagatgaccttggcctccggcgtcgcgatcttgcccagaccggcttccagcgtggtccacccggcgttgccggaggccagggtaaagctgccgggacgggtgttttcgccgaaggcgagataggcggtatgccaaagctcccaggctttctctggcgtgcgctccgcagtgaatccagcgacgatgtgcaactgcttcatccgcacgtcgttccacaggaactggtggtagccaccataggccgtctcgttatagtagctaacagtaaaggagaaactgacggtcaaagtagtaagcaggttttcttcagcctgatacttgggcatatgacttgatcccgttacccccttgtagatttttggaggagcgtcttccggcttgagggcaagcatggttggaagatagtgttccagcgggtatctgggtgccagcaaaggcgatatcaaactggctccaaccagttgagcaaccgctcctgtcggccagtccggcttgacggcggcaggcgccgacttggcagcagcaagcgccgggcggttgaatccgaggaaatcgagtaatcccatgctcaggactccggtcaagaattggcggcggctcttcatcgcagcaggccaaagaaattctgttggcgctcgttcgaaatatcggtgttggccaccatgtgcgcgtggttgtaggtgtattgaacttgatggctcttgaacaagccgagtttccaataatgtttaaagccttccgtatccagtcttgaatcttccatgtacatccagtgtgcaaagcgacgaaactgattcatgtcttccgccgtaatcttgcacggatcaacaattccaaccgcgacatcgtaggcaacgacctccgccgaatgctcagggttggtcaggatggtgctgtgatccgtggcgttgggactttccgacaggtagcgcttcatcatcgcccgctcgtcttctggggtatcgccgatttcgccacgccgcttggcggcttcgaggcgggcccgggtttcgaattcccactgtttttcggtctcactgttccccttcggcagggcttcctgctccaggttttccggcagaatgtcctgccatttttcccggtttgccggatccagtgcattggggacaggatccttgccttcatcgaacttggctgatttatcgccgtagcgcagggaatgcggcgttaccggcttgggcaggaccggggcagtgatcggaatctcccagtcctctttgggaggtttattgatcgggacatcgaccagacgcgatgccggccagatgaagatcgaggtcaacacggtcaggatgcgggaaacaaagccctgattgtggttcaggctgagcacgtaacgcatgttcggcggatcggggttccagaactggttggggtcgtggttgtgcttgatgtagtggtagcgctgccaggcttcgcaaccgacggcaaagggcggcgattgattgcctccggcctgcgcccagacccgctggtaaatcttgccctcccccttcacggcatcgatgtcctcatcgcgcaagcctttccagccgatgccctggatcggggtgacgccgatcaactggtcgtgcggattgcagtacaggaaaaccttgccgcgattgtcgcgatccttgcccgcttcgggtttgcgacgagcagcgtccttgtcaggaaatttttccatctggaacaagggggtctggctttcgacatccttgcagcccatgatccggttgatctcttccagtgactggcccttgccagcccgtttggccaccccatcgagaaagcgcttgaaggtatccttgcgggccgtagccgtgacatggccgaattcgccgaagccgccaggttgcttggcgacgacgatttcctcggtgccgggcgactccaggttgtaaggcggattgctcatgatgtaggtatcggcaatgaaggattcatcctccttcatgccgagcatggcagcccccagcgcgatcatgttgccctggctgtgacagatcacggtgatcgggcaatcggcctgcttggcgcgaatggccttgatcagttccttgaggcggtgcgaggcatgcgcgtagtaggcgcgcggcgggcaggcataaatctcccggccgtcgaccggaaacatgttgaggtagagccaccagaacacccggtcgtccatgccgacaccccacatgtaaggcaaggcgctcgtgccgttctggaaagggccgccgccccaggcgtccatttcgttgagccagatgaagccggtctgcttgtattccttgttttcatcgatggcattggggtcactcttgtcctcgccggccagcttgtagccccagcggaaacggatgatgggcgagcgtccggcatccttgacgaagttctcgccatcaagagtatcgttcagtttcccgccagccaggatttccggttcgtaggtggccttttccaatggccacgcgaaatcctgcgagccattcagaccgagtcgcttgttgagcccctcgatcaatccctcctcggtttgctcataccattcgccatcggaattgacgccgtgcacgaagatgatgatgcccggcaggcaagccttatagacgtgagccttgtgcatgccttcgcatacagtcaggtcgcgggaaaggatatcagccgaattttccataggttcaatccgaaagtaaggcgatggtcgtgatcagcagcgcgtctgactcgaccagttcggtttcgccctgctcattgctgatcccctcgacgacgcgaccgtcgctcaggctgatgcggtatttctggcgggcaatcggttcgccgtcggtggcacggtgaatgatgtactggcgcttgaaatcgccggtttgtatgaattcgggcaaggcatagccgatcccctccggcccactgaacttcttctggctcgcatgcaccgtgatcgtccccggacactgcacggtgatcccgccgtcgatggtgatgctggcgccgcccttcaccgccagatgaatcttcttcgccgccgcgaagtcgacgtgggcattcgccgagacgatcttcaggtcctgcttggcctggaacttcatttcatcgctttgcgcctgcaggtcgatatcgtctttggcggcgatcagtttgatgccggtgttgccttcgccggggcggatggcgccagcgacgaggccgatggcctggccggtgtggattctggccttgccggcgatggcgaggttgctgtcttcgccgctctcgaaggtggtggtttcgtcgttggcgtattgcaggttctgcccggcgatgtgggcgaagttggcgcgggcagcttgcaggatcgccgggtcggtcgggtgcgggcgtttgtcggtgtcagccgtcgtggtcttggcctgggcgtcggcgctggcctggttttcatctttggcgtcgaccatgccgctggcgacggtgtgcagggccttgatcggcgcggcttgttggtcgatggcgctttgttcggcggcgttgctgccgatggcgctggacagttcgacggtgcggtgggtcttggcggcctggctgagggtgcgggccagggtgtcggcttgtctgagcagggccatgccgggggcgaagtcgccggccggggtgccgggggtggcgagcggccaggtgctcatcagtacgccgcgcccgccgcgcagcgcgccccaggcgtcggtccggagttcgacgccggtgccgcggaagctgccacggtagttgtcggcctggtggatgaggtggccgaggttgagttcgctgctgtgctgggtgctcttgagctggatgcgttgctggcggtcgctgtcgtccagcactagctggttgtatccctggccgccgaattccttgctcttgaagccgccgagcgcggccgggtggcggtgactgtggctggcgccgccgtgccaggcggggctgttgccgccggcgaggttgccctggccggccgggcggtggtcggtggcggggtcgaagacgctggcgtcgctttcgcccgggcggccgcccggggtggcggggacgccgccggcgcccttgccgttgtagagggcgccgaggacgtaggggcggtccatgtcgccgttgaggaagtcgatcagcacttcctggccgatccgtggcagccattgccagcccatgccagggccggcctgacgttgcaggacgcgcatccagcaactgtcgcggtcgtccggccgttcggcttgttgccaggggaagcggatcttgatccggccgtagcggtcgcaccagatttcgtcggcgccattcgggctctgctcgccgttggggccgacgacggtggctgtcatcgggccgggggcggtggggcgcgggttgaggcgcaggccggtgtcgtcggtgagcgccggccgccaggggagatcggcgtgcaggccggtgaagctgttgccgtagccgcgttcgcgggcgagttcgaggagttcggcggggaggcgttcgggggcggcgattggttcgacggtgtcgccaccggagagcgggtcgtcctggccgaggttctgcgggaggcgcaggcgttcggcgaggcgggccatggcggcggcggtcaggttgttgatgccggcgtggttcacttcgcagaccaggtagcggtgatcgccagtacgcggcaggtcgccgatggcgatccaggtgccggcggagaggctacgcacggtgccgcggccgagccaggtgaggtagcgggcttcgtgcgcttccatcgtcagccgcccgtagcgttcggcttcggccaggctggcgaaggcgtaggggccggcatcgtcgtagttctcgagaagcggcgcatgcggccccccgaccggctgcacggtcggcacgctggcggcaatggcgcgcttggccttgtagtcgtgcgagagcagcgtggttttggcggcgagcaggcggcggtgttcgccgaaggcgaggatggcgtcctgggcttcctgcgagtcgctgcggtggtagcgcaggccgctggcggacaccgggtcctgcggcagcaggcggctgtcggcgaagatcgtcaggcggtggccgccgggcgccgcgtcgtcggcttcgacgcgccagcccaggccttcctcggcgagcaggcgggagacgaactggtagtcggattcgttgtactgcacgcagtagctgcgcggccgggtgtcggcgaggaagccggcgacctcgtcggcccattgccaggcggcgacgtcggcgtagtcggcgaacacggtgtcgacgatgtcgaccacggtgcgttcctgaaaaacccggtgatggcggccgcgcgaggtgagccagagccaggggatgacgatcagccggtaacgcccgaaaccgccgtcggcgtcgagcgtcgccgcccagcgcacgtagccgtggcgcttgtaggtgctgccgtcggccagccggacctcaagtgccagcgccttgccgaggaaacgcgactggccgagccgggcatccggcgcgacgaggtcgatgacgtactcgaagccgcccgacaggctctcccgcccccaccagcattcgacttccagctgcggcatcccctcgtcccgccaggacagcgcatacaggcgcgtgtcgctcgagaacaggttgcgcacgaggtcgatggacatggcggtgacggcgga

SEQ ID NO: 2894 - DNA, 22467 bp, synthetic construct
  misc_feature 1..22467: note = Synthetic
  source 1..22467: mol_type = other DNA
gcagatttactatggcaaaaatctggccgatatcaccccggcggaagccgcgatgctggcggggctgccggcggctccctccaaatacaacccgctggtcaatccacagctcgccaaatggcggcaggcttatgtgctacgccgaatgcatgaactgaaatatctggacgataaagcgttcaacattgccaaaaacgagcctttgaacgtccgccagagtctcctgagctcccgcgaacgttcggggcagcatgccgaatacattgccgaaatggcgcgccagaaagctttcgaagtttacggcaaagatgcttatacccgcggcctgaccgtctggaccacagtttcggcggaaatgcaggaggctgcctaccgttccgtccgtcagggtgtgatggactatgaccgccgtcatggctaccgaggtccggaaggctatgtccagctacccgatcccttcgctgaagacgacccggatattatcgagcaggcgtttcgagaccttaccgaccacgacaatctgctcgcagccatcgtccttgacgccagcgccgagcagattcgcgtgctgatttccaacggcgtcatcgccaagatcgctggcgccggactgcgtttcgcccaggcctcattgccaccgaaagcgccggccggcatccggctacggcgcggcgcggttgttcgcgtcgttcaagacaaagaccagtgggcgatcagccagctgccgcaggttgaatcctcattcattgcgcttcacccgcgaaacggctcagtgctggcgttggttggcggcttcgattttgagcgtaaccaattcaaccatgctacccaagccatgcgccagccgggatcgtcgttcaaaccgtttatctactcggcggcgctggaaaagggattttcgccagcaaccatcgtcaacgacggcccgttcttcgttcctgccgaagaagccggcggccaggactgggaaccgaaaaactacggcggcgaatatgaaggcccgatgccgatacgcacagcgttggccaagtcgaagaacctggtcaccgtccgcgtgctgcaagcaatcactccacaatacgctcaggactacatcaccaaattcgggttttcagccaagcaacaccccccctatctgacgatggcgctgggcgccggttcggcaacgccaatgcaaatggccaccgcttacgccgtttttgccaatggcggtttccgcatcgacccctatttcattgatcgcatcaccgacgcccgcggcaacacgctttacacccgccccgagttaccggaaagcgaaacccgacaggtggctattgaccctcgcaatgcttttattatgaccacgatgctgcgcgatgtcgtcgctcgcggcaccgccgttcgggcgatgacactgaagcgccacgacctcgccggtaaaaccggcactaccaacgattccgtcgatgcctggttctgtggtttcaatgccaatctggtcggcgtcgcctggatcggattcgaccaacccaaatcactgggcaaccgcgaatccggcgcagtagcggcattgccgatctggatttcattcatgcagaccgcgctcaagaatatgccggagacgccgctcgaaccgccgccacatgttgtctccgttcatatcgaccctgaaaccgggcaacgcagcgataagaactctgctacagaatggttctacagcgaattccagccggaagaaaccccgccgccggaaaacaagcgctcgctcgaacggattttctaaccaatagcgcgcccgatggtacactacacccgttcaggccgatcaaggcaggaaaccagagcggaacagcaacaacgcacccggatcgcccaaaccgctgccgtgctgatcctcgaacacgggctcaccgactggcgcgacgccaagcgcaaagctgcccgccaattgttgttgccggaaaacagcgcgctgcccggtaacgatgaaatcgaagccgcgctctttgaacaccagtcattgttcggcggcgacgctcatgtttcacaactgcgtacccgccgacttcaggcgctggtctggatgaatcgcctcgccgctttctcgccaagactttacggcgcactcgctgaaggctggggcggcgaacaccaggacatccgcctcgaattgatcgccgaagattccaaagcagtggaactgcgattgattgatgaaagcattcgctatcagccccttgccgctgccgcttctgtcaattctgtcaaaagcgccggcgccacccaaagcgttatgctgcgagccgacgatggcgccagtgaagtcctgctgcgtatcgacacgccgatcgcccggcaacagcgcggtaaaccgccgcaccgcacgctggatcgtacggcattaaaagcactgctggagtctgataccagggattagggatcaagaagacgttattgcgagcggcctttagccgcgagcgaagcgtggcgggaagcaatccagaaaaaatctaaaccgcaaagaacgcaaaagaaaaaccatctgcacaaagcgtagcgcataagttgaacaggctgcgagaaaggttctttgaagcccgcccctttaagggttttgcccaccactcctccagtggcgccttcctcgatcaaaatcgtttcgggggcaagctctttcaaagggagttctccctcttcgcggttttgcaccttcgcgtaagaatttttttctttgtgttctttgcaattagacccgacccctgacctctgacaaccactccgccgccgtcaacgcaaaatacgtcaggatcgcatcagcacccgcccgtttcatcgacaacaacgcttccagcacacacgcccgttcatcgagccagccgttctgtgctgccgccttgagcatcgtgtattcgccggagacctgatacaccgccgtcggcacaccgaatgtctccttgacccggcgcacaatatcgagatacggcaggccgggtttgaccatcaccatgtcggcgccttctttcaagtccgcatagacttcccaaagcgcttcgtcgctgttgcccggatccatctgataggtgtatttgttgccgccgccaagattgccagcggaacccacagcatcgcggaacggtccgtagaaattcgaagcgtatttagccgaataggccatgatccgcgtatggatccgctttcgcgcatcgagcgcattgcggatcgcgccgatccgaccgtccatcatgtcagacggcgccacgatgtcggcgccggcctcagcgtggcacagcgcctgtttgaccagcacttcgatagtctcatcgttcatcacataaccggtagcatcgagcaaaccgtcctgaccgtggctggtgtaagggtcgagcgccacatcggtcatcactcccagcatcggaaattcttttttgaggcgacgcaccgtctccggcaccaggccgtccggattccacgcttcgcgagcggtttcgtccttgaggccagcgtcgatcaccggaaataacgccatcaccggcacgcccactcgcacgcaacgttctgcctctttcagcaacagatcaatacttttacgcgacacccccggcagcgaaagcaccgcttcctcgcgcttctcacccaccagcacgaacaccggataaatgaagtcgttcgggcttagcgagtactcacgcacgaggtttcgcgaaaaagcgtcgcgacgcaaacgacgggggcggcggatcggaaattttccggcaaacgcaaaagtcatgaggtactccggcaaaaaacaaggaaaagtaaatgctaaccgtcgaaactgccattggcaatcgtcggtgtaaacctgtgtaaaattctcaactttttctggaactttctcgaaactcttttatcatacgaagagacggtaacgtctcccgctttcctccctgagcgggcggcctgctcttcccccacggtagaacaggctaggccccggatcactccccttggtgccggggcctttctttatctgacacttctgaaattcactaatcgctgctgtgatttatgaccgcttatcacttccggcgcagcacgaatccaaaaacaccgtttgcatcttcgctttgcgccaataatgtattgccggtctgcttcgcgaacaattgaaaatcaccgacgctgccggaatccgtcgccgtaatacgcaatgtctgcccggaaaccatctcgctcaacgcttttttagcgcgcagaatcggtagcggacacttcaaaccgcaagcatcaagttcccggtcgacaggtattccaaacgcggacattccaggcgctgaatgtgatagtttcattgagaaacaagagcgctggcgcgaatgcgctcgaccaatgccgtcgttgatcgttgaaagcggaagggaatagcaacgaaacggcctccatgcgcgatgacctcggcagcgcccgccgtcgtctctgccgaataatcgccgcctttgaccagcacatccggcatcgtctcgataatcagggctcgcggtgtgtcgtcgtcaaacggcaccaccagatcgacgcatgccagcgccgccaacactgccatccggtcctccaacgtattgagcggccggtcactgcccttgttcaagcggcgcaccgatgcgtcactgttgaccgccaccaccagcgccgcgcccagttgccgcgcctgctccagatacgtcacatggccgcgatgcaacacatcaaacacgccgttggtaaacaccagcggtcgcggcaattgcgcaacgcgtaccgacacttcaccagcctcaaccatcttggctggataacgcggcgcaggcaaatcaaccatcagccgttatactcgaaaatgcgaacgacttgcttgacgccgctggtcttgcgcgcaatctcggtcgcctgctcgccttcctctcttttgacgatacccatcagatagacgatgccgcgctcagtcactaccttgacgtgcgttggcgaaaagtcgctatcgacaaaccgtgttttcactttcgacgtgataaaactgtcgttggcgcgcgacgataattcagataattgcccaaccaacaactcgttctgaaccgcgcgcacgcggtcttctttcgcggcgattcggccagcgccttccttggtcgccacatcaggcacctcgccggtcagcagaataatgccgttgtagctggctacgccgacatgaaccttgtcgccatattgctcgttaatcttgaacatgatcgacgagctcatcgtcgcgtcgtcaagcacggagccggtcgtccgccggtcagtcgccaccaccacgccggttgtcgccactccggctactaataccggcgcacaacccgacatcaacaccgcgatcgacgccagcgctgttaacgctaccaacgacatgacccactgtcggggctgtgaaatttttttcatcatccttcttctccaagtaaacgaacatcaatggcatcacacaaacaatgcagaatgagcagatgcacttcctgaatccgtgccgtccgcgtatgcggcacacacagatgcacatcctccgccgataacatctcgccaatcgcgccaccgcccttgccggtcaacgccacgatgcgcatctcgcgttcctgcgcagcgacaatcgcccggatcacgttaccggaattgccggaagttgacaacaccaacaacacatcaccgcgaacgccaaacgcccgtacctgtttttcaaaaacggcgtcaaacgcataatcgttaccgaccgccgtcagaatcgacgtgtcagtcgtcaacgcgagcgcccgcaattccggccgttcgcgctcgaaacgccccaccagttcagcggcaaaatgctgcgcatcggcggcggagccaccattgccacaggccaggattttgccgtcggctaacaggcattccgtcatcaactggccagcgcgcgcaatgtccggtgccagcagtgccgctgcgctctgctttaagcgggcgctgtccagaaaatgatcaacgatcctctgctcgaaattcgtgctttccgtcattgcttactttcttaagccatttccccgaagcagataggttaatgcgaagcgtgcaaaatgtcacgctgccaatgtaaccgctctccgtcgagcgtctccagcagaacagcgtcgaagcgacacggcggctcctgccccagctccgccagatagcgctccgccgcccgccacaaccgctgctgcttttgcgtggaaatgctggccgccgcgccgccgaacgccgacgaaccacgcaacctgacctcaacaaacaccagcgcatcgccatcgcgcgcgatgatgtcgatttccccgtagcgatttctcacattgcgcgccacgacaaccagcccctgttgcgccagaaaagttgccgccagcgtttccgcgtcctgcccccgcttctggtcagcaagtgcgcgcgttcgcgttccttcgtttcgcgttcttccactcatggcgacggagcttccgtcgttccagccggttgcaagcggccatctataaacgctgccaattgtccagcgcgcgtcagcccttctttgcggctgaagcgaatattgccggtcgcaccttcaagctccagcatctccggcgggccgttcacaaacgccgccgccgtctgaaaagcgtcgtaccccagcgcatacaaccgcgccatcgccggcgatgccggtagcgtcggcaacgccttgaaacgcgccgcagagggcgtcaccagccaaggaatctcgacgacccgcaagcgatcaaacgccgccgcttcaaactgctcctgccgctgataaatatggccgctggcgtacgtcggccacgttttcgtttgcgcccgtgccagcgcggcatcattgccttcaaccgccagcaataccgccgacggcgacagcgcctccagccgcgccttcaacgtcgccacaccgtccgccgaaaatcgcacacgttccggcgctgtcacacccaggcgcaaccattcgtcgataaacgcatcggcaaagcgtttcatcagcggcgtttcattgctcaacaccaccggctttccctcacgcccctcaataaaaatctcgcgcgcgagaaaacgtgcgtcgctttccaccgtcaacgtcagcggaaacacattgggcggcagcttcgcgtcctcatcctcgaactgcgtcagcgtaatcgtccagaccagcggcggcgccgccaacagcgccttcagatcgtcacgtaccagcggccctatcatcaccgacgcgccggcctcagccgcctgccggaaagccgccaccgccccaccgtcgtcgtgctcgatcaccaaacatgactccttcgtccgcgccgcctcggcggcagccatgaatcccgccttcaccgcttgcgccgcaccgctgtaatccgacgttttgccaggcaaaataagcgcaatcaaaggcgttttcgcggacatttttgtaaccgcctccggtgatgaagggcgctgcttgatgagcggcacatttgtccgcgcgctttctcgtcctttgccgccacgcgccgcttccacggcttcaagttgctcctgcaccgtcggttgcggcgcagtccatcccttgtcgccggaaggcgacgtttgcgccgccgacggcgcgataaaaagaaacaacacagaaaacaacgctagaatggcgcttaccgccgccacccccatcgccatccatttcctgccgtcaaattcgcgccaaacttctctcacaccaagctccgtcatgtcccacgattccgccccagcttccgattctgcgacgccggctccttcctccgccgcaactcccgctcgcgtctttcgcgccgagaagggtacattatatgtgctcgccaccccgctcgggaatttgcgcgacatcaccctgcgtgcgctcgacatcctgggttctgccgaccacatcctcgccgaagacacccgagtctccgccaaactgctcgcccattacggcatcaaagcgccgctgcgcgcactgcacgaacacaacgaacgcaaaagcgtcgcttcagtgatcgagctcctgcaacaaaatcacagcatcgccctcatcagcgatgctggcacccccgccatcagcgatcccggcgcacggctggtcgccgccgtgcgcgaagccgcgcatcccgtcgtgccgattcccggtccgtgcgcattgatcgccgccatctcggcagcaggattgaacgcagaacatttttacttcgtcggcttcctgcctaccccggccaaagcgcgccgcgtgcagttggaaaaactatcggaaacactgcgcgcgctcaacgccgcgctggtgctctacgaagcgccgcaccgcatccgccataccctcagcgatctcgcacaagcctttcaagaaccgcgcgacctcatcatcgcccgtgaactgaccaaaacctttgaaaccatccagcgtatcccgctcgccgaagccgttgcctggctcgacgcgcatcccgacaccgaacgcggcgaacttgtcctcatcgtcgatacccctgcggcagaacaacaaaacaccgcgccgcgcgacaccagcgccgacgacgcaatactgaaccgctggctgccggcactgctcgaagaactgccgcccgcccgcgccgcccgtgttgctgcgttagcaacaggacttccgcgcggagtgatttacgacaggattaaagttcggcaaatgtaagcgcctaccagcgttttaccggttccaatgtacgaaaacgtgcctaaaaagcgctgttgcgtaaagattgagcgaaaaggcgttcttttcgtctttgcatggtgttaacataaccggagtttctcccgtcgcccgttaattcaaggcacagaaaagagaaagcccggcagttttcacttccgggcggatacgtaaagtctttcgacttcacttattgtagcaacggctctcaccccggattaccacaacggaaaagattgtaaaggagttttgtatgaaaagcaattttttatcgtccacaagagattctcttaccttcggcttcgacatcggcatcgcttcggtcggctggtgcgtgctgggcgagcagcacatcgttgatcttggggtgcgttgttttgacaaggcagaaaccgccaaggaaggtgaatcgctcaacctcgctcgccgcaccgcccgccttatgcggcggcgtttgcgtcgccgcgcatggcggttggtcaaactggtgcgtctgttgaaacgcgaaggagtgatcgacagcatccaatccctgcgccaaccttccgcaaaatcaccctggcagcttcgcgtagaggggctggatcgaaaactcgccccggaagaatgggcgcgtgttctctatcacctctgcaaacatcgtggcttttactggatcagccgcgcggaagaaaagaaggccgaagcagacagcgcgggggaaggcggcaaggtcaagaagggtctgcaagataccaagcggcgcatgaatgaaaacaactaccgaagcgctgccgagatggtgttgaaggaatttcccgatgcgcagcgcaacaagcagggtgaatacaccaaggcgctttcccgcctgctgcttggccaagagcttgtcttgttgttcgagcggcagcgtgagcacggcaatcctcacgcaacgcctgatcttgaaatgcgcatcgccggaaacggcgaccgcaaaagtggtctgttctgggaacagaaaccgccgctgtccggaaatgacctgctgaagaagctgggacgctgcactttcgagaaaagcgaataccgcgcgcccaaagccagctttaccgctgagcgtcatgtctggctcacacggctgaccaatctgcgcgtcgtcgttgatggaaatgctcgtccgctcaatgaagccgagcgcagtgttgcgctgcctctaccctacaatcaagccagtgaccttacctacaagcaattgaaaaatgccctgatcaaggccggcttattgccagaggatgtcaaattttccgggctgacttatccgacgcagcaaaccggcgataaagctaaagacccggagtccgagcggctgatcaaactaccggcctggcaagcattacgtaaaactctcaaagacaaaggacttgaaaccgaatggcagagcatcgccggagccgcaaccggaggacaccccgagcagctcgaccagattgcctgggtgctgagcgtttacaaggatggcgctgaggtagagcaagagctgcgcaagctttccctgccgggcggagagaaaatgatcgaggctctcagcgagatcagcttcgacaaattccacaacttgtccctcaaggcactccgcaaaatcgtcccgcatatggaaaccggactgcgctacgacgaggcatgtgaaaaagccgggtaccaccacagccagttgttcaaagccggagaaggccagcagaaatacctgccgcctttttattccggacgagacaaagatggccgtatggtgttcaatgatgaagaggatattccgcgtaacccagtggtactgcgcgcgctcaatcaggcgcgcaaagtgttgaatgcattggtaagccgttatggatcgcctgccgccgtgcatattgaaatggcgcgggatttgtcgaaaccacttaatgggcacttcacggaaaatggtcgttacattgaaggtcgacgtgatattgaaaaagcacaaaaagaatttcaaagcgaaaatcagaaaaacaaagacgagttcgtaaaactcttcgagtttgaaccaaagagccgagagttcgagaagtatcgactttacaacgagcaacatgcgcaatgtgcctactgccaacaaccgcttgcgcaaaacggcgttgtacacaagatttttaaggctggcgaagcggaaattgaccacgtcctaccttactcgcgcagtttcgataacagcaaaaacaatcgcgtgctggtacatgcggaatgtaaccgtaacaaaggcaaccgtacaccctatgaatatctgacttcatttgcaggaggcgaaaacggagagcgttggcgcagtttcgctgcctgggttgaaggcaataagtcttatcggcttgccaagcgcagccgtttgttgcgtaaaaatttcggcgagaaagaagccggggaattcaaagaccgcaatctcaacgatacgcgctacatctgcaaattcttcaagaactacgtcgagcgtcatctgcaactggccgaaggcagcgacagtcagcgttgcgtcgtgctcagcggacaactcacggcctttttgcgtgcccgctgggggttggccaaggtgcgcagcgacagcgaccgtcatcacgcgctcgacgccgccgtcgttgccgcatgcagtcatgccctcgtcaaacgcctgtccgactattctcggcgcaaggaattggaacaagcccggaatgtcgttgatgcggaaactggagaaattattgacccggcactgttgtcaaaattggagcagcattttcctaagccttgggaatatttccgggaagagcttctgctgcgactgaatacagacgacctcgctttgcttaaaagccgggtagaacattacggctatccgccggaagtcttggaaaatctgcgccccctgttcgtttcccgtgcaccgcaacgccgtaatagtggtgccgcgcacgaggaaaccatctacgcaaaaccgcgacttgcccacaaactcaaggtggaagaaaaaaccaagcaaggagaatcacgccgagcagctactccacaagaactggagagtatggttattgaacgggttggagtattcgacacgacaggccaaggagaaaagaaaaaatatcggcttacggttgatcgactgaaagatattgttgatctcgagcgaaacgaaagaatggtgcacgccttgcatctctggcttactgagcgaggagatgatctcaagcaaccagggacgaaagcacttccgcgtaaaccacaaaaatccgatccggaaaatggaccgtttacaggcccggaaatcaaaactgttaagatgaatggagggaaaaagtctggcattccgatccgtggcggcattgccaaaaacgacaccatgttgcgtgtggatgtgttcagacataaaacagataaaaaatatcaccttgtacccgtatatgtgcaccatacggtggcgaaagaatttccaaatcgggcagtcgtcgctttcaaagatgaaagtgaatggacactcattgatgaggaaaatttcgatttttgtttttctctttaccccaacgatctggtcaaagtcagcctgaaaaatgaaattcgttctggatattacgccggttgtgatcgtgctacaggcgcaatcaacctatgggcgcatgacagaagccaagctatcggcaaggatggattgattcgaggcatcggcgtcaaaacagccttgtgcatagaaaaattccacgttgacactttgggcaacatctacccggccccaccggagaagcgccgtggtctggcgtagtgtgatgatctcccgcccggcgcgtttgcggcgggagcattattcgctggccatcgagcaggaagaaacggcttttatcccatttgaggatatcgctgtgattgtcttgaaccatcgcgagatcacgctgactcatccattgctgtcagcttgcgcagaatatggcattgtccttttttctaccggcgacaaccatcagccgaacggcgtatttcttccttatttgcagcacacgcgaaccgcccgcatgttgcgcctgcaacttgacatcgccaaaccggcagccaagcaggcatgggcggcaatcattcgaagcaagatcaccaatcaggcgcgttgcctgacccttgccaaacgcgatggcgcgagaaggttggaatcgtatgtgcgccgtgtacgctcgggcgatccggaaaactgtgaagcgtcggcgtcggcacattactttccgcagttgttcggcgtcagttttcatcgtaaccaggaacgctggatcaacgccgcgcttgattatggctatgctgtcttgcgcggaacgattgcacgcggactggttgcgcatgggctgctgccatcgcttggactgtttcatgccagcgagcgaaacgctttcaacctcgctgatgacatcatcgaaccattccgccccatcgtcgatttgcatgtcgtcagccagccgctcattgaggagcgcgagttgctgcccgccgataaggtagcgctggtggcgttgctcaatattgatgtcaccatgccgcgcggcgcaacgagcgtgcttaccgcgattgaacaatgcatcgaaagtttcgtgcggttttacgaaggcgctgctgtcgaaacgctggaactcccgctacttgccggtttgcggcagcacatccgtgagcattgaaacgaggcgctacatgcgcatgcttgtctttttcgaccttcccgtcgtcactcgcgccgaacgccgcgcctataccgtgttccgccgttttctcatcaacgatggttacgacatgcttcagttctcggtctatgccagaattttaaatgggcacgatgcggaagaaaaacactatcagcgtttgtcggcaaaccttcctcctgaaggttccatccgggttttaaccgttacggaaaagcaatacgcaggcatgaagttgctggtcggcctgccgctttttcaggaaaaaaaggtcaattcccagcaaatgcttctcttctgaagcgcgtttttaaaaggaaaaccccccgccaacccaagctggacgggggatttcttcaggctaattgtagcaatccggggtgagagagggagctacaaccggttatctgagttgctaccacaagatataattgtagcaatccggggtgagagagggagctacaacacgtttccagactctgtcgtaacaataaacattgtagcaatccggggtgagagagggagctacaactgttctacgcgtcgtagctgctgagtatgcattgtagcaatccggggtgagagagggagctacaacgcttgcgatctatcacacactgaaacaacaattgtagcaatccggggtgagagagggagctacaacggaaaagttgagcgcctgacgttaacagcgattgtagcaatccggggtgagagagggagctacaacggtcggccacgtcagccgcgaagtcgggagattgtagcaatccggggtgagagagggagctacaacttgaagattgttgtagagcatgtccaaacgattgtagcaatccggggtgagagagggagctacaacttcaacgattggcttgagttcgcaaaagtgattgtagcaatccggggtgagagagggagctacaacccgagtaacacgcgcatgtcggcagcgatgattgtagcaatccggggtgagagagggagctacaacccgaagacgaaaggatcatcatgaggatcaattgtagcaatccggggtgagagagggagctacaaccatttttttagacacaacgatgtcgccgacattgtagcaatccggggtgagagagggagctacaaccccgtggctttcggcggctaattgataggtattgtagcaatccggggtgagagagggagctacaacttcaacgctcaaacacgcttgagacatgtcattgtagcaatccggggtgagagagggagctacaacgaagaaacctgtggggcgaaaagcgccagcattgtagcaatccggggtgagagagggagctacaaccctagatgctctatctgtctaacagaatcaattgtagcaatccggggtgagagagggagctacaactgatcgttgtttatagacccaagagatataattgtagcaatccggggtgagagagggagctacaactgatggaacggttgaaaaagaaactttaatattgtagcaatccggggtgagagagggagctacaacataaaaaattgcgcgacgactttatttcctattgtagcaatccggggtgagagagggagctacaactgccaaagatgttgagagctattgcattggattgtagcaatccggggtgagagagggagctacaacgtttcgggaagaatgcacgattctggcgggattgtagcaatccggggtgagagagggagctacaacactcatagtcgcgtaccgtccctgctaaaaattgtagcaatccggggtgagagagggagctacaacagcagggaaatgaacacgccctcggcgtcgattgtagcaatccggagtgagagagaactacaacgcgccgccaacaacgtagtgacaactcacgattgagcaacctcttccgccggttcaacatcaaacggtgtcttgaatatcagcgaaggcagcgccgtagtcagtaccgcatagagcaacaaaccgccgaacagcgcgttggtgatgccgaagcgttcgtgcaagatgctcgccagcaccagcgtaaagaccagtgtcggagccaacgccactgaaatgcgcaggctggcggcagtgctttcgccgaacagtcggcgctcgacccagcccagggcgatgcgcagcggcaacataactatggtcagcgccagaccgatgcccaacgccgtcaggctcaaggcgtcggggtgcacttcaagcccagcgctgaagaaataaagcggcacgaaaaacgatgcgaacagccgtagcgcgtgcatgttgtcgtgcgaggataaacgcggcattcgcttttgcagcagacgcgctatcagtccgacgatgaacgcgcccaccaggtaatacacgcccagttcgtagctgacataagcggcgataacgcccgccaccaccagcagtgaaaattccgatcctggcgcatacggcgcgatccagcggtttaccgcgatgaaaaagaacggcaacgccaccaccatagctaccagggcgatgcccgaaagcgccatattcagcggatcatcggccttgaccagcacgaacagcagcgccaacgccagcagttctccggcgatggctttgctggtgacccagaagcgttcgttatcgtccaggcccagtcgccccagtgtttcgacgatgaacccggtggagggcgtgagcagcgccaacgccaacaatcctgccgcctgccattgcaaatcggtgtagtgccacgccaaccatcccactaccatgagcatgatcacgcgcacgatcaagtgcatcaccagcggccaccgcccgcgcttgagcgacgccagatcgacttccattccggcgaacagaaacaacgacgcaattcccagcgtcgccagcgtcatcagcaacgaatcgtggagtatctcgccggaaaccagcattgccaaaacacccagcgcgaggcaggtcaacggcgcaggaattttccaacgctgcaaagcgcgcggcacaaccagcaacacaaaaatcagcagcagatagatcagttcccggctcatggcgtcagaagttcattggttagggattatttcgctttgctacgcgcagaatgatgggaggagtttagcaaaggtttcctaacggtcagggcgttttcgattggcttgcatatttttttgcgttgccgcccccatccccttcctccgcacgcgggggaaggagcttcatcgcacgtgatcaacctttcctgccgcagacctcttctcgcacgcagtgcggctccattccctcccccgcacgcgggggagggttagggtgggggagtgccggtgtagtaaagcgcacgacagagccaaaactgtttgggctttcctcagttctggctgaaagcacgttgccgctaatggttatctttcaaaaagcagcgtggacaagtaccgctcgccggtgtcggggagaatcgtcacgatggttttccctttgttttccgggcgcgaggcaagttgaaccgccgcccacagcgccgcgccggaggagatgccgacgagcagcccttctgtgcttgcgacatcgcgcccggcctggaaggcgtcttcgactttcacggtgattatttcgtcgtaaatcttcgtattcaatgtttccggcacgaagccggcgccgagtccctgaatcttgtgggggccggcgcgcccttccgacaatatgggcgaatcgaacggctcaactgcaacgactttcactccggaatttctggatttgaggtattcgcccgcgccggtgatggtgccaccggtgccaatgcccgctacaaggatatcgactttgccgccggtgtcttcccagatttcggggccggtcgtttctttatggattcgcgggttggcgagattggcgaactgtccgggaatgaacgagtttggaatttcggcggccagttcttccgctttggcgatcgcgcctttcattccctttgcgccctcggtcaacaccagttccgcgccgtaggccaccaacagcttgcggcgctcgatgctcatcgtttccggcatggtgaggatgatgcggtatccccgtgccgccgcaacggatgccagtccgatgccggtattgccgctggtcggttcgataatgacggagccgggttttaatttcccacttttttccgcttcgttgatcatagccagggcgatacggtctttgacactgccggccgggttaaagtattccagcttgccaatgacgaccgcttccagtttcagtttttttgcgtatccgttcaggcgaagtaacggggtttttccgataagctcggttaagctattggcgattcttgacatttcggggtctcctgtttaaaattgactaaacatatcgttatagtatgttttatttttcagcatgtcaacacctgcggagaaggatgtggctaaaatgacgccggaaacggcctgtattcacgccgtgcgcgacgcgacccattccaccggcgcggtgggggttcccatttatcagtcggccacgtttgcccatccaggcgtcgggcaaagcacggggtacgattattcgcgggcgcaaaatccgacgcgggaacacgtcgaaaagctgctcgccgcgcttgagggtggcgcagaagcgctggctttttcgtccgggatggcggcgatagcaaccctgctggagctgttgtcgcccggcgatgaattgatcgccaccgacgatttgtacggaggctcagtccggctgttcaataacgtctctgcgaaaaacggggtaatcgtgcgctatgtcgatacgtccgatccggcggcagtcagcacggcgatcaccgacaaaaccaaagccgtctttgtcgaaagccccaccaaccccatgatgaaggtgagcgacctggccgcgatcaagaaaacgatcggaaacaaacaaattcttttgatcgcggacaacacttttctgacgccgtatttctgcaacccgctcgcgctcggcgcggatatcgtggttcacagcgccacgaaatatctttcggggcacaatgacacgctggcgggtttcgtcgtcgtccgctcgcccgagatcgccgagaaacttcgccttcttcaaaaaaccatcggcgccgtgttatcgccgtttgacgcctttctcgtcacacgcggaatcaaaacgctcgccatccgcatggaaaaagcgcaagagaatgcgctcaaggtcgcgcactggctcaggaaacaagcaaaggtaacggcggtccattatgtcgggctgcccgatcatccggcgtatgagttgtcgcggcgacaagcgcgcggcttcggctcaatgatcagtttttcggtggacagcgtggaaacagcaagcacgattttgaacaacacagaactgattctgtttgccgaaagccttggcggtgtcgaaacgctgatcacctatccgatgacacagacgcacgctgatgtgccggaagcagagcgtctggcgcgcgggatagatgagaagctgttgcgactttcggtcggcatcgaggcagcggaagatattatcaacgatctggaaagggcgatgcgatgaaatacgattttgataccgtgatcgatcgtcgcggcacccactcgctgaaatacgattttgcccgcgaacggggaaagcccgatggcgtgttgccgctgtggatcgccgatatggattttccggcgccgccggaagttctggccgatattcaaaagagcgtcgctcacggcattttcggttataccgaggttaagagcgactactacgacacagtgatcggctggttcaacgcacgtttcggttaccgcgtgtcggcgaatgaaatcatcaaagcgcccggcgtcgttttcgctcttgcgcaagcggtcagggcctacacccaaccgggcgaagcggtgatgatacaaacgccggtttatccgccgttctatgaagtcatccgcgacaacggcagggcgctggtaacgaaccctcttctctataaagatggaaaatacctcatcgactacgaggacttcgagcgcaaaatcgttgatcatgatgtcaagctgttcattctgtgcagcccgcacaaccccgtcgggcgggtatggacgcaaagtgagcttgaagcgatgaacgagatttgcgagcggcgcggcgtcattatcgtgtccgatgaaattcattgcgatttcgtctggccagggcacacgcacacctgctttggcctgttgaacgaaaacgccgtgatcgcaactgcgcccagcaaaaccttcaatctggcggggttgcaagcctctcatctcttcgtaaaaaacgtcgggcttcgcaacaagttgagagcggaaatcggtcgaagcggctacagccagttgaacaccttggggctggtcgcctgtcaaagtgcctacacccacggtgccgcctggttggaagaattaaatcgctacctcgtggagaacatccgtttttcgcgcgagtttttggcgacgcgcctgccgagaattcggctcgttgagccggaaggaacgtatttgctctggctggatttttcggattatgcgctcacccagaaagagctggatcggcgcatcgcggaaaacgccaaactctggctaagcagcggaacggggtttgggcaggacggcgaggggtttcaacgcatcaacatcgcctgcccgcgggcgacgctggcggaagcgttgagcaggctggaaaaagaattcacatgagagcaaaaacataatgcgcatttcggcaaaaggacggtacgcgcttgctgcgctggttgagatcgcgcggcagacgcaaagaggcgaaatcgtttcggttgtcagtatctccgaacgcctggggatttcaaaaatctttcttgaacaaaccgctgtgtcgttgaagaaaagcggcatcatccaatccatcaaaggcgccagaggcggataccaactcacacgcgcagcgaacaaaatttcggcgctcgacgcgcttgccgccgtggaaaacacgcttctggaaaaaacaggggatacggtttccgcacaatcgcccgccaccgaaactgcgttgagagagaaggtgttcgaccggttggataaggcaattgaaacttgcctctccgacgtcacgattcaggatttgctggaatgcgccgaccggcaaaacagcgaacaggcgttcatgttgaatatgtagaaggagctttgtccgggcggcttgaagcctgtccttacagtcgtccttgattcgacaacgcgcccgctcaaaacataatcgaataacgcgcgtcgattgtgctgtcatcgatgccgaaccgggtcatcatcgaccacttctgtgtcaggcgccaggtcagccgaacggcgtcctgtaagccgttgaggcttttatcgaggccgatggaaagatttttgccgagccgcttgctgacggtgatgatctgtgttgtcgtgccgtcttccatctgcccggcggcgatattgatttcatcgaatacgccgccgaacaattcttcggtcaatgtttcgccggaatctccggccaacatgctgttcagcaaatgaaacagaatcgccgcatcgcctttgtccatgttctcggtgccatgatcgaacaacaaccacgacagcgtttcgttgctcggcatcgacgggtttgaataaagcgttacggtagggcgtatcgccgttcctttgaccgccacgccggcatcgaccgacgaattctcacgaatcgccagaatatcgagcgtcgggttgtcgagcggccccatgaacgaaataatgccgcgacgtatttcgagtttctgcccgtaagcgcgatagacgccttcttccgtgcgcacatttccgaaagcggtcaacgcttgattggggcgagcgcgcagtttcaatgttcccaccaacctggtgtcgataccgtaaccgcgaaagcggaagttgtcgccgagatcaacatcaaattgcacattcgccagattgacgctcggctcctgcggttgttcgccgactaccacgacatcgtcggacaaacccggcacatcgctgtcgcggtactggatactgccgtaattggttttgagattgccgagcaacgaaacaccctgctcgtcgtaacccagatcagcactcccggtcaccaccaaagtcatgtcaggccgccggatcaagcgcaaacggtcggccttgatcgccagcttggcgcgcggttttccttcgcgcagatcgacatcgccagtcatcgtcatttcgccgcgcccccccttgaacgcaaaacgttcgatagcgacactttgctcgttcagcgccagtctcacattaccatcgtccaacataatgccggtttccgtatcgtgcacggaaagattatcgccggtcatcgcgccgcgatagatgggatgccgcaaggtgccactgtgctgcgcatccaaatgaatgcgcccggtcaacagaatgttgccgccaatcagcggcgctattttcgccaaatcgggaacatcgccctgcgcacgcagcgtaaaaggccgatcattcatcgccgttccttccggcgccgtcaacgccatttcaccatcggcgccgattttgccataacgctcgctttcaacagcgccatgaagcgagagccgtgtattcttgatttccgcccgtagcccgagttgcgataaatacaacggttgccatgtcgcacgcgatgtcagcctcaattgcgcgtcgccgcgctcgcggtgaatgtcgagatagccccgcaacgccgaaagcgcttcgccctcctgcgaaaaagaccaacctcccgacaataccagatcgccgcgcaccattgtcgccacgtttttccccgccaacttcaaccattgcgccatctcgacgttttcaatcgttccctcgctgcgccaatgccccggctgccataccgcgctcttcaatcgcacacggctaccgttgccaaccagcactccctctccgatattcaacttgaccttctcccctgccgtctccaccgcaatcggcagcggcgcttccagccgtatcggcgcctgcggatgcttcacgtcaaaacgcgacagcgaaccttgccagcgcgctgacggcatctcccaacgaccgcgcacggccgccgcaacctcgaccggctgc

SEQ ID NO: 2895 - DNA, 21618 bp, synthetic construct
  misc_feature 1..21618: note = Synthetic
  source 1..21618: mol_type = other DNA
ctctcctgtcacaaccaataaggaggcgagccttacccccggcacttgcagtaattagctgtggctgcttccttccggacctgaccagattcactaccctgcaatgcggggagacccgccaattcgtacgacaactcgccaaacctactgcgcgccccgattgcggcgttgcgcggtgctcgaaatcctcatgtacaaaaagtacattccggtttctgcgctgaccagcgacttgctggcgttttctgccagcttaatcgattggccatgctttagcgccgtgcgccttgcactcgggtcgctcgctacggtttagcgagctgtctattgttacttgttacatcgctcgaaccgggatcatcccgatacgcttgcgccattccgccgggccggtgtcgtgcacggagttcccccgtacatcgacagccaccgtcaccggcatgttttcaacctcaaattcgtaaatcgcctccattcccagctccgggaacgcgacgactctcgcgctgcgtattgccttcgaaaccaggtaggctgcgcctcccacagccatcagatagaccgcaccgtgcttcctgatcgactcgatcgcgtccttgccgcgctctgccttgcccaccatgccgatcaggccggtctgcgccagcatcgtctcggtgaacccgtccatacgcgtcgcggtagtcggcccggcgggcccgacgacttcgtcgcgcaccggatcaaccgggccgacataataaatgaagcggtcggtaaaatccacgccggcaggcagtttttcgccgcgccccagcatttcgacgatgcgcttgtgcgcagcatcgcgtcctgtcaacagcttgccggacaataacacggtctcgcccggctgccagtgcgatatttcctcgcgcgtgaccgtatccagattcacccgccgcgcattttcggccggctgccagtcgatatccgggtaatcctcaagcttcggcggctcgaacaatgccacgccgtaaccgtccagttcaaaatgcacatgccgcgtcgcggcgcagttggggatgatcgccaccggtttggaggccgcatgcgtcggatagtcgagtatcttcacgtccatcaccgtggtcagtccgcccaacccctgcgcgcctatgcccagcgcattgaccttgtcgcacagctcgatgcgcaattcctcgatgcgattctgcggcccgcgcgccttcaactcactcatgtccatcggcagcatcaacgcctgcttggccagcagcaccgccttctccgccgtgccgccaatgccgatacccagcattcccggcggacaccagcctgcgcccatctccggcacctgctgcaacacccattcgacgatgtcgtcgccggggttgagcatccccagcaccgccttattctccgagccgccgcccttggccgcaatctccacctcgaccttgtcgccctgcaccaactcgacatgcaccaccgccggcgtgttgtcgccggtgttcttgcgcttccccgccggatctgcgaccacggaggcgcgcaacgtgttgtccggatcgaggtacgcctggcgcacaccggcattaaccatgccgacgatgtccatgtccgcctcccagcgcaccgccatgccgacccggacgaacacgacgacgatgccggtgtcctggcagatcggccgatgaccctgcgcgcacatccgcgaattcgccaggatctgcgccatcgcatccttcgccgcaggcgattgctcgatacgataagcgtcggccagggcgcgaacgaaatccgccgggtggtaataggaaatgaactgcagcgcgtccgcgatgctgtcgataaagtcttgctgccggatgatggtcatggaattagcggatgaaatatgcgggacgattatctgtagccgcaccgggagcgtcaatccgaatcggcgaccgctattgaccgccagcccgcgaatgcgtagggtacgggccgttttgaacatccggaataatagtcttggcgaacatcagcaaatttaccgacaagtgggtgcttgtcatagacgacatggaaggaatgcgctcgcaactgcgcatgtcgctgaccaactcgggatttgcaaaactccatatcgtggggaacatcagggaagcgctggaacgcatggcgaacagccgctacgacgtcatcctctgcgactattcgctcggcgagggcaccgacggacagcagtttctggaacacctgcgcaccaacgacctgatcagccgcaacaccatcttcgtgatgatcaccgcagagcaggcctacgaaaaagtggtggccgcctccgaatgcgctcccgacgattacctgctgaagcctttcaccgcagggcaattcaacgcgcggctcgaaaaactgctggaacgccaacaattcttcgcgaccatcgacaagactaccgacgcgaaggactggacgcgcgtcatcgccgaatgcgacaagtccctgccggccaggaacaaatacttcatcgagttgtgcaagatcaaggccgcggcgctgatgcacagcaaccgtccgcaggacgccgccgacctgtatcgcgaagtgctggcgctgcgccctatcggctgggccagactgggtttggcacgagcgctgggacaactgggcaaaaaagacgaagcgcagcaactcgcgcgtgagatcgtcgccgactccccccagttcatggccgcctacgactttctcggcggccaactggcctcgtccggagacaaagaagcggcgctgaacgtgctgcaaaaggcgcgcgagatatcccccggcacgatgaaccggatacgggaactgagcacactggcggtcagcacgggacaacccgaactggccgaatcggtgatgcgccaggccctgcaaaagcacaagtattcgccggtgcgtcaggtgaacgattacgcgatcctctccaaggcgctggcgacccagggcaaagccgacgaagcgctgagcgtcgtcgcggatgcgcgcaaggatttccgcgacgaagacagccagatcgttctggcggcgaccgaaagcgtcgcccagcgcgccgccggaaacgacgaactggccgaggccgcgctggcccgcgccatggccggagacatcaacatactcccggtgggggcggtcaccgcgattgccgatgcctgcttcgcgctgggcaaggaagacgatgccaacaaactgctgcgccacgccatccagaacaacccggaagacgagacgatcaggagcaaggtccacgacgtgctgaccgcggccggcaaggaagtcaccgaagccgatgcgatgatcgaggaaagcacgcaggagatcatccgcaccaacaacgacggcgtgcgcaaggcggagtccggacaacttcaggaagccatcgacttgctgtgcgaagccgccgaccgcctgccgaacaacctgcagatcgtcggcaatgccgcactggtgatcgcactgcatctggcaaagaacggcgacgacccgaagatgctggcccagtgcttgcgctaccgcgacgccatcatcagaaaatcgccagattaccccagactggcccagatcgacagccagctcagacaactgaagaaataaacggaacaccgatgaacgacctgtacgccgccgtcatccatgacgtgaaaaaccagcttgccgaactcgcgttgcgcctgggcgaacgcgccgatgcgcagcaagaaatgagcatcgcgatgaatgcggcacgacgcctgtcggaaatgctgctggtgatccgtcaggaagccgagctgctgagcgtcaatccggactccgtcgataccggagacttcttggccatcctcgccgcggagtaccgcgaactgtttccggcgctcgccatcgacatcgacaccgaacatgcgcccgccttcgccttcttcgacgatgcgctggtgcgcatggccttgtccaacgccatgcacaacgcctgccgtagcgcgcacagccgcatcaagctcgccgcccgggaacaggacaaaatgctggttctcgaagtcgcggacgacggcccgggattcccggacggaatgctgaagaacgacggcgatacgccggcttccgtcagcaaccgcggcaccggactgggactctatcttgcgaggaaaatcgcggaactgcacaaactggaaggacgttgcggacggattgaactgagcaacgacaagggcgcggtgttccggatgtttctgccctgaacaacggatttcaactgtaggtcgggctccgcccgacatggtgggcagagcccaccctacgccgcccccacaaacactattctccggcgctccccgccagttcgaccacaatagcggcctcgccctctccggcctgatactccgccgccacggcgacacccaccacgcacaccagctcgtcgccgcaatagaccaacggcaggcgttcgcgccgccaggacggaatgccgtgttcctgcaacaggttcttcagactgcgcttggcggcgttcggatgcgggcgcaaggtctcgccgccgttgcgcaagcgtaacgtgaccggcgcgcggcgcagcttttccgcaccgattcccgcgcccggcacttcggcgaaacgcaatcgaacgcccagcgcaggccagtccagttcgggctcgccgttccacggcaacgccagttcgcgctcgatcccgcccaggatcggcgacacatgagcccggtcacgataacgatgcacttgccaagcgccgtattcgacgcataccgccgcatcctgccgcgcgtcgcacagttgatgcagcatggtttctagctgcgcggtctgcggcatcgcagcgccccggcaatgcaaaaaatgacgcaacaggtttttggcgcgtgcaggtgtcagcgcgcgcagcgcggcgacgttcagcgcatcgccctgcatcgccccttcggcatcgatgcgcgccaaatcgtcgagcagttcgctcgcctcggcgaagtgatgcgcactgcgcgccaaggtattccgataggagggaaaacgctcttccagcaagggtagcgcgcgatgacgcagaaagttgcgcggatagctgtcgtcggcgttgctttcgtcttcgacccactgcaatccatgctcacacgcatagtcgagcaacgctgcgcgcgactggtcgagcaaggggcgcagcaaacgatgcgcgtgcccctctcccacgaggggagagggcgcgccaacaggtgtccctccaatgaacggcccttcgaccttgctcaggacaggcattgccgcgacgccgcgtacgcccgagccgcgcagcagttgcagcaacagcgtctcggcctgatcgtcggcatggtgtgctagtgctacgaaatcgcaggactggcgtgcgaatgcggcatggcgcagcttgcgcgccgccgcctcgatgccgtgctcgcgcagcggcgcgatatcgacatgttcgatatgcaacggaatatccaacccggagcagagcccggcgcagaagtccgcccaggcatcggcgttcgggctgatgccgtggtggacatgcaatgcggaaagacgccaggagaaacgcggcgcgagacgatgcaaaatatggagcagtacaaccgaatccatcccgccgctaagcccgaccaggatggagctgcccggagggattagcggttcgagttgtgcggcgatttgatcggcgagcgcaggggcacggcgcgccgtgcccttatattgcgacttccttgaatttgccatagctcatcagcctgctgaagcgatcctgcatcaggctggcgaccggtttgttctgcgcctgcttcagcgcttcctgcaaggccttcttcacgccttgcatggtcgcggcatagtcgcggtgcgccccgcccagcggctcagcaacgatcttgtccaccagcccaagcgtcttcaggcgagtggcggtaatgcccagcgtctcggcggcgtctgccgctttttccgcgctcttccacaggatggaggcgcagccttcaggcgagatcaccgagtaagtggcgtattgcagcatcagcatcgcgtcgccgaccgcaatcgccagcgcgccgccggagccgccctcgccgatcacggtgcagatgatgggcacgcgcagctcggccatttcgtacaggttgcggccgatcgcctcggactggccgcgctcttccgcaccgacgccgggatacgcgccgggcgtgtcgataaaggtcatgatggggatgccgaacttctcggcgagcttcatcaggcgcagcgccttgcggtagccctcgggacgcggcatgccgaagttgcgcaggatcttttccttggtatcgcggcccttctggtggccgatcaccatcacgctctggccgttgaaacgggccagaccgccgacgatagccttgtcgtccgcgtaggcgcggtcgccgtgcagttcttcgaaatcggtgaacaggtgctcgacatagtccagcgtatagggacgctgcggatggcgcgacacctgcgaaatctgccagggcgtgagcttggcatagacatccttggtcaatgtctcgctcttcttcgacagccggctaatttcgtcggcgatgtccagtgcggagtcgtcctgcacataacgcaactgctcgatcttgtcttccagctcggcgatggggctttcaaaatccagaaatgacactttcatatttgctccctacgtaaaacgcggcgcgatgatactacagggcgggctccctacaaaccgaagaaacgcttgacggtcgccagcacctcgttgtggcgatgatcgatttccttgtgcaaagcggcctcatccagattccgcaatacgacatccagctcggcgcggcgcgtcaccagcacatgcgcgacttcttcggcgatgctggggcgcgccagcaggatttcctcgaaggcatccttgtccaggcgatagcactcgacatcggttttggccacgacggtcgcgacgcgcggcgaaccggtcatcaggctcatctcgccaaagaaatcgcccttggtcagcacattcaggctgcgtttctcgccgctcgccgcttcgaggaacacttccgcatcgccgttgatgatgatgaacagccagtgctgcgcaggcgcgccctgcttggcgatggtgttgcccttggcgaaaggcgcatagcggagacgttccgccagcctgcgcaactcgtcctcggtcagttgcgcgaacagctcgacgcgcctgagcgtcctgacgcgcagctccagttcgcgctgatgcaagacctcttcgtgcttttcgttgtccttgatgtaatggacattcttttcctcgacggccagcttgatcccggcgcgctccagcgcggtgtagatatgccagcgcaccgcgccgtcggtcggatcgtccacggccagatcggtcagccagtagcgcagcgcataacgcgcgcagcccttatcgatctccatcagcacgcaactcggcgcaggctttttcgcgacattgttgatctcggcctgctgcaccgcactctccaccgcattgatgacgcgggtcggcgtgatcttcaagtggacgttgaaccacacccagcgccgccactgcaccggctggtcagtgcgccgccccaacaccagaaacttgttcttcatcaactggctgttcgggaacaccaccgtctcccaattgcgcgtctccaccagcgtcgagcgccagcggatatccaccacccgcccggtgatgtcgtcgatcttgatccagtcgccgatctcgacggagttgtcgagctgcaaagccaagccgccgaggatgttacccagcgtatcctgcatcgcgaacgcgaccaccgcggtaatcatcgccgaggtcgcaacgatgctgcccaaatccagcccggcatagcgcaggcgcaccagcccccaggcgacatagccgacgatgacgaagatatcttccgcgatgcgcggcggcgtgacacgcgccaacggcaacaggatgcggaacaccagcagcccccacaggcggatcaccgcaatgccggtgccgatcagtcccgcctcgtgcagcaccgtagcaatcgcagaaaactggagcgcatacagcagaccgccgacgaattgaataaacagacaggcaaggaagaaagccagcgtgttcaacacgctcttgcgtgcatccttgaggagctggaacagcagaaaggccacgcacagcgtcatcgccaacaccggcaacgactcgtcgcgccagaaaaattgcatcgccgtgttccagaaagacatgctcacctcttacgtttaacgtgaaagaacactcgcgggagcaccgggaggtgcggacttcatttcgcggctgccgccgctcctacagggtgcggcggttttcgtgggagcggcttcagccgcgaaggtaacgtgaagtggaacgttaccttcgcgaccaaagtcgctcctacagggcgtttcatcatcaggggcgacacacttgccatgcccgttagcggcggccattctacaccaccgcatatgccgccagccgctgcggacgacgccagagcgcccaggcatcggcccgcgtcagccggatgcggcgcatgccttgctcgctcgggacatcgagttgcaactgagaaatatcgccacgccgcaatgcccgccataacggctgcgcatagtccttttcgaaatcctgcaacgccgcgcgccaaccgtccagatcgttgcgctgcaacgcgttgcgcaatcccatccacaccagcaactgttcgccctcccccgcttccgcccgccattgcccggcccatgcggcaaacgacgcatccgctgccgacgcgaacatcgcggccagctcatcgttcgaactggcaccggcataacgacaaggcgtccgaatgtccgccgcgccgttgccccacagccacaggcagttcaccggcaactcgccgcactcctcccgcaccacgttcagcggatgtccgaacaacagcatctgcatctcgttgaacaactgctgccagcgcgcgccctcgggcccctccggcaacagaccgcggatgtcgcttccgcctgcctgcgacaacggcacggtgcggatatccggctgcacatccagccgcagataccagcgctgcggatgaggtgcggcgaactccatcccctgccccgcaaaatgctcgttcagcgccgcgcacaactgcaccgcctcgtccgccgccacatcggcgagcggatgcaacaccagttgattgcggttcaactgcatatgcgccggatcggcgcgcaaccagcatccctcacccagcccgtcgaatgccgccgagaccgccgcaaccggcgtaccgctatagcccggctcgaaaaacagatcgcacagcaaagtctccggcgacattgcttcccgcatctcgtgatcaccgcgcgccagcattcgctccagcgcaggcagcaccagcccttccgcgactctggaggaaaagtaatcagggagaaataaatcgggaacgatcagatggacgctgcgcatggcggcgattctatcatccgcccgcccatgctccgcgcacgacagctttccaattgacagcgacgatgccgcctcatacagtgcgccctcttgcgcaaccgccgcaatacaaccgcaccgcaaagcacggtgagagcacggcgggcaatcagaccaggaggctggcgcaaacatccttgctcaagttccctccccatgcagggggagggtcagggtgggggtagaaccgttccgcacatgcggatgttatttacaggggataacaattgccggcctccagccacttcattttttatcatgctcaaataattagctgcacttacacgcctaatgtttggcaactatgattcaaatccagagatgccgtcccaaaagagaaagcccagcgggtttccccactgggctttcggatacagactcagccttgcggctttgtctttattgtagcaacggctctcaccccggatgaactactacaacggcttcattatcacggagaacgcaatggcaagcaagcatgaaaatctcggcgcactgactttcggattggacatcggcatcgcttcggtgggctgggcggtgctgggcgaaaatcgcatcatcgatcttggtgtgcgctgcttcgataaggcagaaacagcgaaagaaggcgaatcgctcaacctcgcccgccgcacagcacgactgttgcgccgccgcctgcgccgtcgcgcatggcggctgaccaagctggcgcgcttgctcaaacgcgaaggactgattgcggataccaacgttttccaaaaaccattcaacttgaaagatgccaatgagaaaggcctatccttttggcaacttcgcgtcgatgcgctcgaccgcaaactgagcgccgaagaatgggcgcgcgtgatttaccacttgtgtaaacatcgcggcttccactggatcagccgcgccgaagaaaaggccgcagaaggcgacagcaagagcgagggcggtaaagtcaagcaaggcttggcaggcacaaaaaagctgatgcaggagaagaattaccgaaccgccgcagaaatggtgctgaccgaattccccgaggcacagcgcaataagcaaggagactacagcaaagcgctctcgcgcatcttgctcggcgacgagatgacgcaactgtttaaacatcagcgcgaactcggcaacccacatgccaccgagaaactggaagctgccattctcggtaacggtgaccacaagagcggcttgttctgggcgcagaaccccgcactagccggcaatgacttattaaaaatgctggggcattgcaccttcgagaaggcagaataccgcgttcccaaggcgagcttcaccgccgagcgccacgtctggctgacccggctcaacaatctgcgcatcgtggtcgatggcacaactcgcccgctgaatgaagcggaacgacacctcgctctgctcatgccttaccagcaagcaggcgacttgacctacaagcaactgcgcacagcactaaccaaggctggctatttgcccgagtcattccgctataccggactggcgtatgccagcggtcaaaaagccgatgaaaaagccaaagatccggagtccgccccgttggtaaaactgcctgcgtggcatgagttgcgcaaaacgctggagaaaaaagaactcgcatccgagtggcaaaaaatctctagcgacgcactggatggcaagccgcaacttctcgatcagatagcctgggtgttgagcgtctacaaggatgataccgaagtggaagcagagttgtgcaagctgaacttgcccaatgccgagaaaatgatcgacgcgctgctggatattcgtttcgacaaattcagcaacctctcgctcaaggcgctacggcaaatcgtgccactcatggaacaaggccagcgctacgacgaagccgtcgccaacattcccgagtacggccaccacagccagttgcacgaggttggcgcgggcgaacataaatacctgccgccgttctacaaagagcgcgacaaaaccgggcgcatggtattcaacgacgacatggacattccgcgcaacccggtggtgctgcgcgcgctcaatcaggcgcgcaaggtggtgaatgcgctcatcaaggaatacggctcgccgcatgaggtgcatatcgaaatggcgcgcgatttgtcgcgaccactcgatgaacgacgcgatgtagaaaagctgcaaaaagaattccgcgaccgcaacgaaaaggacaaagcgctattcgcgcaggacttcaatatcgttggtgcagtcaaaggaaaagagttcgagaagtatcaactctatcgtgaacagcagggcaagtgcgcttactccatcgaaccgatggatattcaccgtttgttcgaacagggctatgtcgaaatcgatcacgccctcccctactcgcgcagcttcgacgacagcaagaacaaccgcgtgcttgttctggcaaaggaaaaccgggacaagggcaaccgcacgccctttgaatatctcggaggaaaagacaacagcgaacgctggcggcagttcgtggcttttgtcgaaggcaacaaatcttatcgcctcgccaaacgcagtcgcttattgcgcaaggatttcggcaaggatgaggcgaagggattccgcgagcgcaacctcaacgacacacgctacatctgtcgtttcttcaagaattacgtcgaacaatatctgcaactgcatgaggacagcgatgccaagcgctgcgtggtgttgagcggccagatgacttccttcctacgcgcccgctggggcttagttaaggtgcgcggcgacagcgaccgccaccacgcgctggatggcgccatagtcgcggcgtgcagtcatagcatggtgaaacgtttgtcagactactcgcgccgcaaggagctggaacaagtaagagcaggttttgtggatgtggatacgggcgagattgtgaatcccgccatgttccagcaagtacaggaacatttccccaacccttggccgcatttccgcgacgaagtgaagttgcgattgaatgtggacgacccggcgctgctacacagcgaaatgaatagattcggcacctattcgcccgaagcattgaaagcattgcgcccattgttcatctcacgcgctccacaacggcgcaacagtggagcggcacacaaagacaccatctacgcgcagccggaacgccttgtcgcacaagggggcgtcacgcaaaaggttccgctcaccagcctgaccttgaaagacctcgacaagctgattgacccgcaccgcaacgaaaaactctattcagccatacgaatccgactggaacagcacggcggcaaaggcgacaaggcatttccagccagtaaccccttgcgcaaacccgacagcgaaggcaatccgaccgggccgattgtgcgcggcgtgaccatggtgatagacaaactctccggcattcctattcgcggcggcatcgcaaagaacgacagcatggtgcgagtggatgtcttcaccaaggcaggcaagttccatcttgtgcctgtgtatgtgcatcacgcggtagcaaaggtgctaccgaatcgggctgttgtggcgtacaaggatgagactgaatggacgctgattgatgatggttttgatttctgtttctcgatgtatccaaatgacctgcttcgaataaaactgagaaatgcatcacacctcggatactacgcaagctgcaatcgctcgactggtgcaattaacctttggtcgcatgatcgcaatcaacaagttggcaaagatggaatgattgaaagcattggagtcaaaactgcattgaacgttgaaaagctcaatatcgatgtcctcggcaaccgctaccctgccccgccggagaaacgtcgtgacctggcgtagcgtcgtcatctcccgtcccgccaagctcaagcgggatcatttctcgcttgccatcgagcaggagcaaactgcttgcgtgcccttcgaggacatcgcggtgatcgtgctcaatcaccgcgaaatcaccctcacccatcccgtactgtcggcctgcggcgaatacggcatcagtcttttcgccacgggcgatacgcatcatcccagcggggtgttcctgcctttcctgtcgcattcgcgcgccacacgctggatgcgattgcaactcgatttaccgcgcccggttgcgaaacaaacatgggcaactatcgtgcgccagaagatcgccaatcaggcagcctgtttgcatctcgccgggcgtgaaggtgcggatcggctggactcctatgtgcgtcgtgtgcgctccggcgatgtcggcaatctggaaggacaagccgccgcgttttatttcgtgcaacttttcggcaagggatttcaccgtgagcaggcgcgcttcgccaatgccgcgctcgattatggctatgcggtattgcgcggcacgattgcacgcggcttggtcgcgcatggcctgctgccttccatcggcctgtttcacgccagcgagcagaatgctttcaacctcgccgacgacgtgatcgaaccctttcgcccggtagtggacttgttcgtggcgaagcacatgtcgctggccggcgacgaattaaacccgcaggacaaagcggcgctggtcgggttgctcaatgtggatgtgggaatgccgcgcggaaagatgtcggtgctatccgccatcgaacacaccgtagagagcctggcgcgcatctacgacggaggcagcgaatcgctgctggaattgcctgccctcatcggacttcaacagcaccgactggaatgctgaaatgagcgaggagacacgacgatttatgcgattacttgtcttcttcgacctacccgttgtcaccaaggccgaacgccgcgcctacaccctgttccgccgcttcctgatcaacgatggctacgacatgattcaattctctgtgtatggccgcatcgtgaatggcaacgacgcgctggaaaaacacatgaagcgattggtgaacagcttgccggcagatggttcggtgcgctgcctgaccgtcaccgaaaagcaatatgccagcatgaaactgctggtcggcctgccgctttttcaggaaaaagccctaaaggtcaaccaaatgctgctgttttaagcaccgatttttcaaacagaacgcccgccagattgaagcctggcgggcgtttgcgtgaagcgaagtgtagttcatccggggtgagagagggagctacaacagtcagatttccgtcgcacgagagcgcgagagtgtagttcatccggggtgagagagggagctacaaccggcttgcgatccttgatgacgggaatttcagtgtagttcatccggggtgagagagggagctacaacgacgcaccgagcgcagtcgaaccgtagtagagtgtagttcatccggggtgagagagggagctacaacttgccacggtggttcctttcgttggttggtagtgtagttcatccggggtgagagagggagctacaactgatttcgctgcgttgaataaagccgctgcagtgtagttcatccggggtgagagagggagctacaaccagctcgatcgtcttggcttcgtcggcgaaagtgtagttcatccggggtgagagagggagctacaactcccacaccgacgcccaaactgggtgcgatagtgtagttcatccggggtgagagagggagctacaacaggcgaaagcgcgacatcacgaacggctgtagtgtagttcatccggggtgagagagggagctacaactccgatgccgtgcctgccgccgatagtggtagtgtagttcatccggggtgagagagggagctacaacattgggggcttgctcagaattccgccccgtagtgtagttcatccggggtgagagagggagctacaacaggaggcgcggatgcgtcgtgcattcaagcagtgtagttcatccggggtgagagagggagctacaactcgaggtcttatgggatgaatggatgaactagtgtagttcatccggggtgagagagggagctacaaccgcccatcgcgccgcctgcttgagccgctcagtgtagttcatccggggtgagagagggagctacaacaccttgattggatggagcaagtaccgcgctagtgtagttcatccggggtgagagagggagctacaacccaggtgtcgactgacgcgaccgcgcaatacagtgtagttcatccggggtgagagagggagctacaaccgctcgttcggcaatgcgaagtcggaagatagtgtagttcatccggggtgagagagggagctacaactcgatcatggcatggctgtctagtgcatatagtgtagttcatccggggtgagagagggagctacaactgcactggcgtcggtgcagctagccagacaagtgtagttcatccggggtgagagagggagctacaacggtttcttggttggcgctcatcgggttcgaagtgtagttcatccggggtgagagagggagctacaacttgccgatcaggcgtatgtcggaggtgtagagtgtagttcatccggggtgagagagggagctacaacccgacacgccggacattccgggcaattcatagtgtagttcatccggggtgagagagggagctacaacgcggatccagaaggccgcggcgcaaagtacagtgtagttcatccggggtgagagagggagctacaactaattgtgcatgcgaaaacagattgaacgaagtgtagttcatccggagtgagagagggagctacaacgcgcggtagaccttcatggaaccaaattgtagtgtagttcatccggggtgagagagggagctacaaccagagcgagggttccgcccctcgccgttccagtgtagttcatccggggtgagagagggagctacaacgcaccgccgccagttgtgaccgtttcggatagtgtagttcatccggggtgagagagggtgctacaaccttggagtcatagccccacgtcgggccataagtgtagttcatccggggtgagagagggagctacaacgacgaagtcgtacgcccgcaaggggcgcccgcctccgccgttctcgctacgcgaggtttggcaaaaggatgcctcgcccgccgccttgtggcacacttacgcccgtttccgccattcatcttctattcaccttgcaaccttacgaacttttcatcggcctgcgctatacccgtgccaagcgccgcaatcatttcatttcgttcatttcgctgatctcgatgctgggcatggggttgggggtgatggcgctgatcgtggtgctgtcggtgatgaacgggttccagaaggagatacgcgaacgcatgctgggcgcatcgccgcatctcgaagtggtcgcggacggcgggcggatgcacgactggcctgccgtgctcgaccgggtcacgcagcatccacaggtggctgccgcagcaccctatgtcgccggtcagggcatgttgtcgttcgggcagagcgtgcagggggtaatggtgcgcggcatcgatccggcgcgcgagacggcgatcacggagttgtcgagcaagatcaaagtgggggcgctggaagatttgcgcgagggcgagttcaatatcgtgctcggctccgacttggcgcgcgcgctcggcgtgaagatggacgagaaggtgatgctgatcgcaccgcaggggcagatcacgccggcggggatgatgccgcggctgaagcagttccgcgtggtcggcattttcgagatcggcatggcaccctacgacagcagcctcgcgctgatccagatgaacgatgcgcaaaagctgttcctgctgggcgacgcggtgaccggcatcagcagcaagctgcacgacatcgatctcgcgccgcgcgtcgcacaggagttgcagaacgagttgccgccggaactgtatgccaacgactggacgcaccagaacagcaactatttcaaagcggtgcagatggagaagcgcatgatgttcatcatcctgtcgctgatcgtcgcggtggccgcgttcaacatcgtttcgacgctggtgatggcggtgaccgacaagcaggcggacatcgcgatcctgcgcacgctgggcgcgtcgccgcgcagcatcatgaaaatcttcatcgtgcagggcgtaatcatcggcgtgatcggcacgctgtccggttgcttgggcggcatcgcgctggcgctgaatctcgatgtcgtaatcccgttcatcgaacaatcgctgggagtgcagttcctcgcgaaggatgtgtactacatcaccgagctgccgtctgacctgcgctattccgaggttgctctgatcgcggcgatgtctttcctgatcagcctgctggcgacgctgtacccgagctatcgcgcgtcgaaaacccaaccggcggaggcgttgcgctatgagtaagcaaatggaaaatggaaaaccagaaacgggaaatgtgatttcctgccgcggcttgagcaagaccttcaccatcggcaaacaggacgtgccggtgctgcgcggcgtcgatctcgatgtggcgcgcggcgagcggctggctatcgtcggcgcttccggctccggcaagagcacgctgctgcatctgctcggcgggctggacaacgccagcggcggcagcgtcgatattcttggtcagaatgtgcagcagatgaacgagacgcaacgcggcgagctgcgcaaccgctcgctgggcttcgtctaccagttccatcatctgctgccggaattcaccgcgctggagaacgtcgcgatgccgctgctgatccgcggcatgcaacgcaatgatgctgcgccgcgcgccgcagcgatgctggagcgcgtcgggctggcgcaccgcctcgaccatctgccgtccgagctgtccggcggcgaacgccagcgcaccgcggtcgcgcgcgcgctggtcaccgaaccggcctgcgtgctggccgacgaaccgaccggcaatctggatcgcaatagcgcagaggcattgttcgaactgatgcaacagctcaacgagcaatttaaaaccagcttcatcgtcgtcacccacgatctggaactggctgggcgcatggagcgcagactgcggctggtggatggcgcactgcaggaaatccgggaatcatcggccggataagcaacaacacgtaggggaaccatgcgcaggaaggtgctgttttcctacagcattttaggaatttgctgatatgcattgtctcggggaaattgcactatgcgtctcacacgtttctcctccctgagcgtggtcttaaccaagttaagacattgcccccggccccttcttactgccgggggcttttttttgtgcataccgattagcccttgcccgccagcgccaaaccaccgccaaacgccatacgatgcgcaccagcagatatccggcaagagacagactcagcgcgagcaacggcaagccgagcaataaaggtttcccgagtgcggccatccattgccataacgcgccggcccaactgtcccaatgcatcgccgggaacggcgggggctcggcgacaatgctgttggacacaccgagtacaaatcgtcccaattcgtatgcaagcaaatacaagggcacgatggtaaacggattggtataggccgtgacgaccgccgccagcggcagattgacgcgcagcaacactgcaagcagcaccgccgaaatcatctggataggcccgggaatcatcccgcagaacaaaccgaccgccactccgccagccaccgagcggcgatgcagatgccagaggtcgggatgatgcagccaaccggcaaatggcttgagccagcgatggtgtctgatcgcgtcggatttggaatggaatcggtggaaaaatttacgcatggagtcattctagcaggcgagcccaacctcgattcctgctgcgggcattcgcaatatgtaaataattgtggcggcaatgaactcgcttcgcattcctcggtctcttgtcgggtttcgccataccgggcgatgatgcaaaataccgcgccccccgcaaacaacgttaaccgacaaaaatcaatcatgttgccagcctcgctcaagcgttacgtctatctttccatcgcggccgcccttgccaccatcctgctcaaggggacggcctggtggctgaccggctcggtcggcctgctgtccgatgcgctggaatccttcgtcaatctggccggcgcgctgatggcgctggcgatgctgtcgctggcgatgacgccggcggacgagaaccatgcctacggacacggcaaggcggaatatttctccagcgcgttcgagggcttcctgatcctggtcgccgccggcagcatcgcctatgccggcatcgaccgcctgctccatccgcaggccatcgaatcggtcggcatcggtctggccgtgtcggtcgtagcctcgatcatcaacctcgtcaccgcccgcacgctgatggcggtggggaaaaaacacaactcgatcacgctggaggcggatgcccaccacctgctcaccgacgtgtggacatcggcgggcgtgataaccggcgtcggcctggtgtggctgacaggctggctgtggctggacccggtcatcgcattgctggtggccgccaatatcgtctggaccggctggcaattgctgcaacgctccgcctcgggactgatggacgccgcgattcccgaagagcatatccgtatgatcgaaaccgtgctggacagctatcgcgcacagggactggactaccacgcactgcgcacccgccaggccggcatgcgcgccttcgtctcgctgcatgtgctggtgcccggagcatggtcggtgcagcaaggccacgactggatggaacgcatcgaggccgacatccgcgccgtcgtgccctattcccatgtaacaacccatctggaaccgctggaagaccccttatcgctgtcggacgaaccgctggatcgcccggtatgagaatcgtgggagcggcttccgtgggagcggctttagccgcgataagcagcgttgcatataacgagcaatcgcggctgaagccgctcctacaacgacaacaaaccattcattcactccaaggaaacgttatgactgcaaaaaaagtcaccctcgccctgttgctgcttgccgacgcgacatccgcacaagccgaaacgcccaaggacttcgtcgccaaatacaccgccgaagccggcgccggattcaagccctccgccgcacgcggcaagagtttctttaccaaggaattcggcgtatccaaagacatgccgagctgcaccacctgccacaccaaagacctgaatgcatccggcaagcacatcatcaccggcaaagtcatcgaaccgctctcccctgccgccaacccagaacgtttcaccactaccaaaaaagttgaaaagtggttcaagcgcaactgcaacgaagtggtcgggcgcgaatgcaccccggcagaaaaggccgacttcatccagttcgccatcgaggggggcaaggcatgaaacggtcaatagcattgctgttgctggcgttgggcatgaatgcggcttacgcggacggcagaaaaatggctgtcccggatcacgccaagtggaaagaagaatgcggctcctgccacatcgcctacccaccgaagctgctaaccgcagacaactggcaaaaaatgatgggcagcctgaacaagcatttcggcgcgaatgcggaactggacgccaaggacaacaaggacatcctcgaattcttgaaaaagcatgccggcagcggcgaacgtcatagcgccgccagcctgcgcatcagcgacaccccgtggttcaagcgcgaacaccgctcggtctcgccgaaggaatgggtgcatcccgaggtgaagagcaaatccaactgctcggcctgccaccagaacgtcgcacgcggctactccgaacacgacgtccgcatgccgggcggcaagcgctgggaagaagaggaatacgacgacgattgatcggcgcccctcatacggcatttacctgccgtatgaatcttctcttgtgggagcggctttagccgcgatactccagtgaatccaattgcctatcgcggctaaagccgctcccacgaaacacctctgtctttccattcggttatgcgcgactccggcgcatagccgtctttt

SEQ ID NO: 2896 - DNA, 21537 bp, synthetic construct
  misc_feature 1..21537: note = Synthetic
  source 1..21537: mol_type = other DNA
ccccagccccggctccactggaatccgcccatgacctgtcggtcgatgggcaccaggcgcggacccgccagctgcccatcctcttgttctattcccgcgccgactgcccctggtgcgagcgggcacggcgcgaatacctgctgcccctggcgcgggaaaatccgccccgggccatcgtgcgtcaaatcaatatcgaccaggacaccgcccttgccgacttcaccggcaaagccaccacccaccgccgcttcgcccgggaggcaaaggcgcggctcactcccaccctggcttttgtcggccccgacggccatgccgtggccgatgccatcatcggatacaaacttgccgacttctacggcgcctacatcgaccgcgccattgacgacgcgcgcgccaaactcaaggatcccgccccatgaccccgcctgcccaggacaaagatgaaccgctgcgggaagacatccgcctcctcggccgtctgctcggcgacacagtacgtcaccaggaaggcgacgaggccttcgccgtggtggagcgcattcgcggcctctcgatccgctttcaccgcgacgccgaccacgccgcgcgccaggaactggcgacctacctcgacacgttgagccgcgagcaaagcctgcaggtggtgcgcgccttcacctacttctcccacttggcgaacatcgccgaggaccagcaccacatccgccgttcccgcgcccatgccatcgccggctcgccgccccgcgagggcagcctcgcccacagcattccccgcgccctggctggcggcatcgacccggtgcggctgcgcgatttcttcgacaacgcctcgatccacccggtgctcaccgcccacccgaccgaagtgcagcgcaagagcattctcgactgccagtggaaaatcgcccggctcctcgatgagcgcgaccgcacccagttgacgccggaagaacgggacgaacatgaggaagccatgcgtcgcgccgtgctcaccttgtggcaaacgcgcatgctgcgctggaccaagttgtcggtgatggacgaggtgatgaacggcctcacctactacggcaccaccttcctgcgccaactgccgcgcctgcacaacagcctggaagacagcctcgccaccctgcccggctggcccggcggcgaaatcaagcctttcctgcgtcccggctcctggatcggcggcgaccgggacggcaaccccttcgtcaccgcaccggtactggtggataccctgcgcgcccaaagccgccgcgccatgaccttctatctcgaccaggtgcacaagctcggcgccggcctgtcctccgccgccctgctggtggatgtgtcaccggagctggccgaactggccgcccgctctcccgaccgcaatccccaccgcgatgacgagccctaccgccgcgccatcgccggcatctacgcccgcctggccgccacggcgcggctgctggacggcatggaagccccactccatgccgtcgccgaagcgccggcctacgccaatgtcgccgagttcgccgccgacctggacgtgattcaccgttccctcgaacagagcaattccaaactcctggcccggggccgcttgcgccgcctgcgccgcgccctctcgctgttcggcttccatctggccagcctcgacctgcgccagaattccgacgtccatgcccgcaccgtggccgagattctcgccgtcaaccgccccggcactgattacctgaacctcgacgagaacgcccgcatcgccctgcttcaggaggagctggcgacaccgcgccccctggtctccgacttcgttcgctactccgacgaaaccgagggcgagctcgccatcttccgcgccgccaagcgcatgcacgacacctacggcaaggcggccatcgagaacgtcatcatctccaagaccgatggcgtttccgacattctcgaagtcgccctgctgctcaaggaagcgggcctgctgcggccccacgacaacgccctcgacgtgaatatcgtgcccctgttcgagaccatcggtgacctggagcgtagcggcgcaatcatggaccgcctgttctccctgccgatctacaaccgtctgctcggctcccgcgacgcggtccaggaagtcatgctcggttattccgacagcaacaaggatggcggtttccttacctccggctggtctctctatcgcgccgaaaccgtgctgacgcaggtattcgcccgccacggcatcggcatgcgtctgtttcatggtcgcggcggctccgtcggccgcggcggcggcccgagctaccaggccatccttgcccagcccgccggcgccgtgcagggtcgtattcgcatcaccgagcagggcgaagtcatcgcctccaaatatgccaatcccgaactcggccaccgcaatctcgaaatcctcgccgccgccaccctggaggcgaccctcctgccccacgagcacgacgatccgcgcgccgaatttctcgccgccatgggcgaactctccgacttcgccttccgcgcctaccgtgccatggtctatgaaacaccgggcttcgaggactacttctggcagtccaccgtcatcgccgaaatcgccgctctcaacatcggcagccgcccggcctcacgcaagaagaccaccgccatcgacgatctgcgggcgatcccctgggtcttctcctgggcccagtgccgcctcatgctgcccggctggttcggtttcggcagcgccgtcgccgcctaccgcgacaagcacggtgaatccggtctggccctgttgcgggaaatgaacaaggaatggggcttcttccgcaccaccctctccaacatggacatggtgctgggcaagagcgacatcgccatcgccgagcgctactcggaactggtgcccgatgaggccctgcgcaacgccatcttcccgcgcctcaaggccgagtggcaggcttccattgacgccctgctcaacatcaccggccagagtgaactgttggccggcaaccccctgctggcgcgttcgatccgcaaccgcttcccgtacatggaccccctcaaccacctgcagatcgaattgctcaagcgccaccgcgccggcgaggccgacgagcgcatcaagcgcggcatccaccttaccatcaacggcgtcgcagccggactaagaaatagcggctaagggaacaagcagcatcggcctgggagcgccgactgacaggcgctccatgccattcaactcggcataccctttgaagcagtttgcgggcagatcacaaataggtgttgccgatgtgcgcagcatctactcatcagccatgaccactccgtgccattgctgccagccttggcaactcgcctccaagcctcaatacggtcggtcgttaggcctcccggtcctttcgactttgatttcgataatactgggaaggcccggtctgtccgggatgtatcgagggcaactctatggctttggtgttggcctgaacgggctattgtcgatttagcacaaaagaatatatcgtttcgacattcatccctttcgaggacactccgatgtcaaaactcgcccttctccgcatatctcatgtcacggtcggatgcttgtgcgccgccgtggcggtttctgtccaagcccagagccagagtagcatcaccggaacgggtggcttcgtttcggcgtgcgccttttccaacagcgggtccggattcaatcccggaggcaatcttccggcgctcttcggtgccgccaattgcaattcagacacattcagcggcaacggcagcgtgactgaaagcgcaagctatattaacggacagatatcaaaccaatcccaagggacggtggaactgggcacgcttcatttgagcgccagcaacagtgctccgaacagttcctatttcgccgcagccggtgccaacggtggctggaccgaaaccttggttgccaacgcagcaaaccaggccggccatgccggagtaacggtcgtggcattgaaagtgaccggctcgcttgcggcccacggcttcgcaggcgcctcggcattccaactcaccggatataaggacaagaatcagctgaccatctatggcctgagtgggttatacaactacggttctcaatcgaatccgattggcacggaccgccagatcgccaactggagtgtcgccaccgactactactacgtttcgggtcagggccagaacgacgcctccgccacgatcaacgatacgatcaatttcgccatccccgtcacactgggacaaagcttctcgttcggcgtctacggttacgccctcgccgggatgcgcagtgccagcggcgttccgggcatttcaactgcgggtaccgacttcagccatacggtgacctggggcggcgttgtcggcatctacgactcgaacggccaacttctctccgactactccctgacctccgccagcggttcggattggacgaagcccttcaccgcccccgtacctgaaccagaagcttatgccatgatgttggccggcctgggtttgctgagactcttggcccgacgcaagatgtcggcctaatttcgccaccgacaagaggcagccggccacacacccgacatcaacgtgtgggtcggtaccggcactccacgggtccccttgccgaggttgtccaaatgggcgagtagcgcgactggttccaagacatcgttgccgtggcccctgaggcccattttgttggagccattgtttcgatcggggggctgtgagtgacttcgcagtcctcgatcatctggcactcgctttcgtgagtggctggccaggatcatcgcgaagtcatttggcatcgaccgagaattgaagagggtgatgctgatcgtaggatcagatgtttctccggtaggcgtttgcgaaagtagttttcagggcaccgtgatacggtggggagtcgtattggatcagtcacccaagtaacccattccctccccaacccccgattggtccctctaggggattgcctgcagggcaaaggggagtaagtggcgattcaggcggatagatttcccggatactctgcaacgatggactcccgacgctaatttgctagactggaaatgccatcccccccctggagctggtctccgggagacagtacgcgatcgtgcggcgggcatggcggggaggttaacgtgagcaggaaccgcaaggagggaacaggttctcgggttgccttatggctggcggcaatagttctgtctgccgcgctactgcctgcaaccgccgagggtcgcgaaactgtgctgtgggccgctcttgatttcccgcctttccagattcgcgagggtgagtccaagggcagcggcagctttgatggtctattggacctgctggttaaccagttgggtgacctcgatcacgacgtggtgaccatgaccttcgcccgccgcgaggaggaaattcgccgagggcatcagctatgtaccccgggtcttttccgcactccggcgcgggagggtttgctggaattctcgctgccggccctgatccacctcgataaccgtctggtgttccgcgccgccaacaaagaccgtttcgagggcagccagcccgccgacctggacgccctgctcaaacgttccgacctggtgggcggcatcgtcagcgagcgttccttcgcccccaacatcgacccatcgataaagcaggctgccaagcagccgaatctgctggtgcgccccctcaagtcccatcaaatgttcgagctgctgctgcgcggcgagatcgactacaccatcctgtttccccacgaagccgcctatctggcgcgacagcagcgcgagcggccggatatccgcctgcgtcccatcgccggtaccccaccctacatcttcacccacgtcgcctgcaccaaggggccttggggcgaggcgatgataggccgcatcaatcaggttttgctgcgtcatcagcgtcaggcccaataccgcgccctttccgagcgctggtatgacgagagcgacaagatgctgatccgcaagtactacccactgatgctgacgcccgccgccgcgccatgaatttttggacttcccttaccgggcgcctcttcaagctggtgttcggctggtatcttgccctggccatcgccgtcacctcggtgcaactcgccctcgaatactccagcatcaaccacggcatcaacaacgacctggaatccctcggccgttccttcgcccccagcctcagcgacgccctgtgggccttcgaccaactgcaactcagcgtcatggcccagggtattgtgcagaccagctacgtcaccggtgtccgcatcgaatccgccgacggctatgccctcgccaccgccggcgaattgcctccgatcaatgacattgccggcaccgggctgctggcgccgtaccaacgcaagcatttccccctcgaagtcaccaccccccggggcgaacgcaagcagatcggcgagtttgtactgtattcggaccgtagcgtcgccctggagcggatcaaatacagcttcatggtgatcctgatcaactcgctgattaagaccgctggcctgtggctgattttctatctcgtcatcacccgttccctggcccgccccctggcggacctgacccgggtggtctcccgcgtcgaattcgccgccgataccgtcgagccgatcgccctggactacaaacaccaggatgagctcggccgtctgctcgccaccatgcacaagatgcaggaacgggtcattgccgcccaccagcaggtattggaaaccaaccgccatctcgaagaaaccgtggcccagcgcaccgaagccctgcgcgcgagcgaacaacgcctcaccctggccctggcggcggccaatgaggcctggtgggactgggacctcgccagcggcaacaccttgctcagccccagctaccacaccatgctcggctatgccgagggcgaactgccgtcaacctacgccgcctggcggaaactcgtacacccggacgatctggtcgtcgtcgaagccaggcaacatcaggtgttgatggtcgaccgtagcgactccgtggccgccctcttgcgcatgcgcgccaaggacggcagctggcgctggatcagcagccacgccaccgtggtcagccgtgacggcgacggaaacccgctgcgggtcatcggcaccaatctcgacgtaacccgacaacacgaggccgaggaaaaactgcgcctggcggccacggtgttcgagcacgcccatgaaggcatctgcatcaccgacgcccaggagcgcattctcaacgtcaatccgacctttctcgaactctccggctattccctcgacgaggtgatcggcaagacgccgcgcctcctgaaatccggccaccagagccccgagttctatgccgccatgtggcaggccatccgcaacaacggttactggcagggcgaagtctggaaccgccaccatggcggccaactctacgccgagcgcctgaccatctccgccgtgcgcgaccacgaaggacgcgtcacccactatgtcggcgttctttccgacatcaccaccgccaagcgttacgcggaaaagctggagcgcatcgcccattacgacgtgctcaccggcatccccaatcgcgccctgctcgccgatcgcatgggccaggccatcgctcagaccaaccgcaatcgcagcctgctcgccgtctgctatctcgacctggacggattcaagccggtgaacgaccgcttcggccacgaagccggcgaccgtctgctgatggaaatcgcccggcgcctgcgcgattgcctgcgtggcggagacaccgtcgcccgcctcggtggcgatgagttcgtactgctgttcaccggcctcgccagcgaggatgaatgccgaaccgccctgacccgggtcctggagtccatcaacaccccggtatcccttgacggccaggaagccaccgtctctgccagcatcggcgtcgccctctatccccgcgacgacagcgacccggatgcccttctgcgccatgccgaccaggccatgtacctggccaagcaggaaggcaagaaccgctatcactttgccgaggtctgaaaagtaaaaggcccgacaggcaagcctgtcgggccgggttcggtcactccccgaagggagctaccttattgcagcaacggctctcaccccggaaagctacaatgacgtcattctaaccagaatgggtggcgccatgcaaacggaaaaccagttttacacccttggcctcgatatcggcatcgcctcagtcggctggtgcgttctcggcgagaaccgcatcattgacctgggcgtccgtgctttcgacaaggcggaaacggcgaaggaaggcgaatccctcaatctggcacggcgctccgcgcgccttatgcgccgccgactattccgccgcgcctggcgcttgaagaagctggctcgacgactcaagcagtttggtcttattagcaactgcaacgttctacaagaaaccggtccagccattggctctccctggcaattgcgagtcgaagggctggaccgcctgctgaccaacgaggaatgggcacgggtcatctaccacctgtgcaagcaccggggcttccactggaccagcaaggcagaagagaaaaaggccgacgccgatggcaagagcgagggcggcaaggtcaaacaaggcctcgccggcaccgccaagctgatgaaggagaatggctaccgcagcaccgccaagctgatgaaggagaatggctaccgcagcgccgccgaaatggttctggccgaattccccgaggcccaacgcaacaaggccggcgattacggcaaagccctttcccgcgtcctgcttggcgatgaattggcccagttgttccaacgccagcgggaactaggcaacctcaaggccactgctgacctggaagccgccgtcctcggcaacggcgaccgcaagagcggactgttttgggcgcagaagcccgccctagccggcgacgatctattgaagatgctcggcaaatgcaccttcgagaagagcgaataccgcgcccccaaagccagcttcaccgccgagcgccatgtctggctcacccgccttaacaacctacgcatcattctcgatggcgaaacccgcagcctcaacaacgaggaacgtcgcctcgccctgcccctgccctatcagcaggcgggcgatttcacctacaaacaattgcgcgccgctctggtaaaaaatggcaagctgccggagtccttctgcttcgccgggctggcctacccaagcgcgagacagaagacggaggacaaggcgaaagacccggaatccgccgtgctggtgaagctgccgggctggcaggaactgcgctctaccttgaagaaagcggggctggaaacagaatgggagggcatggccggcgcggccactggaggcaaccccgagctactcgatcaagttgcctgggtcttgagcgtctataaggatgatgaagaggtagaagccgaattgcgcaagctgccgctccccggcggccaggccatgatcgacgccctgaatgaaatccgcttcgacaagttccacgccctttccctcgcaacgctgcgcaacatcgtgcctcacatggacgctggcctgcgctatgacgaagcctgcgaaagggcgggctatcaccacagccaactgcatgttgtcggcgcgggtgaaagcaagttcctgccgccgctctatgtacgccgcgacaaggatggccgcatggtgttcaacgaggacttggacattccgcgcaaccccgtggtgctgcgcgccctcaatcaggcgcgcaaggtggtgaatgccatcatccgccgctacgggtcgcctgctgcggtgcatattgaaatggcgcgggatttgtcgaggaactttgacgagcgcaacaaaatcaggaaggatcaggaagacttccgggatcgcaacgagaaggacaaggctcagtttgccgagaccttcggcatcgttggggcacccaagggcggcgacttcgaaaagttccgcctgtatcgggaacagcagggcaaatgcgcctattccgtcgaaccgatagacctccaccgcctgctggaaccgggctacgtggaagtcgaccacgccctgccctattcccgcagcttcgacgacagcaagaacaacaaggtgctcgtcctcgccaaggagaaccgcgacaaaggcaaccgcaccccctacgaatacctcggcggcgccgaggatagtccgcgctggcatcgcttcgtccagtttgtcgaaaacaacaagatttaccgccaggctaagcgcagccgccttctgcgcaagaacttcggcaaggaagaagccggagagttcaaggagcgaaacctgaacgacacccgctacatctgccgcttcttcaaaaactacgttgagcgttatctgcaattggccgagggtagcgaggccaaacgctgcgtggtgcttagcggccaactcaccgccttccttcgcgcccgttggggcttgaacaaggtgcgcagtgacagcgatcgccatcacgcccttgatgccgccgtggtggccgcttgcagccacggtatggtgaaacggctcgccgactattcccggcacaaggaactggaaaaggtgcgtgagggcttcgtggatatggaaacgggagagatcgttaacccggccatgtaccagcaactacgtcaacacttccccgagccgtggtcccacttccgcgaggaactgcgaattcggctcggcatggctgacggcattaaggatgatccggcacaactgcgcgttgccattgaggcgcttggcacgtatccgcaggaggccttggatgagcttcgccccctatttgtttcccgcgctccacagcgtagaaaaggcggggccattcatgaggatacgattcgatccgccaaattattggatgaaggtaagagctatgtgaagacgcctttacaaaagctcaaacttgccaaccttagcaacattgtgggagcaagctattcacgtaattcgccgctcatcacattacttcgagagcggctggaaatgcacggtgatgatggcaagaaggcgtttgctgaaccagtgtataagccatccaaaaacggcacgggatcgctggttaaggcagtaaaactcgcatcaacgcagaaaggcggaatgttcgttagaggcggcgtggccgagatgggggaaatgcatcatgtcgatgtatacaagagtggcaaccgctacttaattgagccggcgtatgtcgcaagcctagaaaagcgcatcaagccaaccaaccttccagaggattcggtgttcctgttttctctttgcaaaaacgatttcgtcaagatttgccttggcaacgttgcacacgatggctatttcgtcatgtatgaaagtgatggccgtctgactttgagagcgcatgaccagccaaaacccgacaaggcctatttccgcaagggtattggcggcgcctctcgaattgaaaaattccacgtagacgtcctcggcaacatctacccagccccgctggagccgcgtcgtgggctggcgtagcgtgatgatctcccgcccggcgaagctgcggcgggaacacttctccctggccatcgaccaggaggaaacagccttcgtgcccttcgaggacattgccgtcatcgtcctcaaccatcgggagatcgtgctaacccatccggtgctttccgcctgcgccgagtacggcatcgggctctatgccacgggcgacaatcaccagcccaacggcgtgttcctgcccttcctcgctcactcgcgtaccacgcgcctgatgcgccagcaattggacgtatcgcgccccctggcgaagcaagcctgggccaatgtaatccggcgcaagatcgagaaccaggcggcttgtctgaaactcgcagggcgcaagggagtggatcggctcgaatcctatgcgcgtcgtgtacgctctggcgacccggataatctggaaggcctggccgccgccttccacttcgtgcaactcttcggcaacggctttcaccgcgccgaagaccgttgggccaatgccgctctcgactacggctatgccgtcttgcgcggtgccattgcgcgcggtctcgttgcccacggcctgcatccgaccatcggcattttccatgacagcgaacagaatgccttcaatcttgccgatgacttgatcgagcccttccgccccctggtggacttgcatgtggcgaagaacccgcccttcaccgaaggcgatctgtcgcccgccgacaagtcggcgctagtggcgttgctcaacgtggatatgagcatgccccagggccgcatgtcggttctctcggcgatcgaatacgtggtcgaaagtctggtgcgcatgttcgaggagggagacagcaccctcgaactgcccgcgttgattggcctccagccgcacaggttggaatgctgaggccatgggcgcggaaacgcgacgctttatgcggctgcttgtcttcttcgacctgcccatggtgaccaaggccgagaagcgggcctatgtgcagtttcgccgcttcttgctcaacgacggctacgacatgatccagtggtcggtgtatggccgcctcttgaacggctcggatgcccagggcaagcacctgcaacgcctcgccgaaaatcttccgcccgccggctcggtccgctgcatgaccatcacggagaagcaattcgccggcatccgactactcgtcggcatgccgctttttcaggaaaaaaaggtcacgaccgcccaaatgctgctcttctgacggcggattgagaagaaaaaatccccgtccagaccaagcaggacggggatttcaagacagcctgattgtagctttccggggtgagagagggagctacaacagttgtacggcggcggattgcacagctcccgattgtagctttccggggtgagagagggagctacaacgatccaccgcacgacccctgcggggccatccggtgaatcgtgccgcttcgcggccgtcagcaagacatatctgtcggctatcccacctacccaggcagccggaaaaattcccgaatccggttgaggatgttctcgtcgcgactggaacggcgattggcgtcaacaacgtcgttcatgtcctgacgggccttgtcgagttcggcatcgcgagcagcaagcacacgagagatgccttcggcgatggcggggcggccctgcaaggtggcctcgaagccttccttgtcgaggcggtagcattcgacgtcggttttggcgatgacggtggcgcggcgcggttcgccagtcatcatgcccatttcgccgaaaacacagcccggttgcagggtggtcatcaggcgtcgttcgcttccttgggtttcgagccagacctcggcctcgccggaaaccagcacgtagagccagtgggcggtagcgccctggcgggtgatggtgtcgcccttggcaaagggggcatgggccaggtggccggcgagggccgagagttcttcgggcgagaggccatgaaaaagctcgacctgcaccagggcatcgaggcggcggcgcatttcgcgggcagcgagggcctgctggtgggcttcgttttccttgatgatgtggcgggcctcttcgggtatggcgagctgcatacccgcccgttcgagcgcagcaaagacgtgcatgcgcacggcggagtcggtggggtcatccacctgcggatcggtgagccagtagcgcagcgcatagcggccgtagccggggccgaattccatgaggacgccattgggcctcggctcgcgggcgacgttgggaatctcggcttcggcgaacatgcgttcgagggcttcgataaccttggccgggggatgttcgaggggcacgttgaaccatacccagcgccgccaggcgttggtcttgctgccgtagataccgaccacggagaacttgttcttcatcaactggctgttggggatcaccaccttctcgccattgcgggtggcgatcttggtgtaacgccagcggatgtcgatgacgcggcctgaaacattgtccacgatcacccagtcgccgatttccaccgagtggtcgagatgaatggcgaggccaccgaggatgttgccgagggtgtcctgcatggcaaaggcgaccacggcggtaatcaccgccgaggtggcgaccagatgcccgagttcgaggccggcgtagcgcagccggatcatgccccagacgcagtagccgacgatgacggcgatgtcttcgagaatgcgtggcgtctccatgccgacggcgggcatgaaaacacggaacagcagcatgccggcggcgcgaatgagggcgatgccgacgccgatctgcgccacctcgaacaagccactggcgacctgggtccagccgatggcgcgcatcagggaggcgccgacctcgcccagcagacagagaatgaaaaagacgaaggtctgcttcagcacatattggctgccctcgggcagggtgcgccggagcaggccccagagcaccagcgccgcgacgaaaacccaggtttgctcaggccgccagaagtaatcggcggcgttggtgatgatgctgacgccgaaatccatgctcattccttcagcagccccttcaccaacggccattggcgccggctgaccggaagagattcggcgacgccatggagcagtacgttccagtgggcatcgccgtcggcggcggcttttttctcgcagccggcgatggcgcggcgcgccaccagacagttgcgatgaacgcgcagaaagcgctcaccgaattcttcttcgagatggttgagagattcttccagcaggtattcccgttcgccggtgcgggccgtgacgtatttcaattcggccttgagaaacagaatctcgtccacgggtaccagtagaatcttgccgcgttcggtacacgacaggtggtggcggccgccgggcataagatcccgcagggtttccgcgggaatagtccgtggccgaagcttcttcagggcttcggcgaggcgggtggcgcgcaccggcttcagcaggtaatccacggcggccagttcgaaggccttgacggcatactgatcgaaggcggtaacgaacaccaccgccggcaccggcacaccggaagccgccaggccttgcaggtggcgggcgaactcgatgccgtccatgcgcggcatgcgaatgtcgaccagagcgagatcaacaatgcctgtcgccgggacttccagagcgcggagcgccgcaatgccgtcagccgcttcaccaacgacacaggtggcaacgtcctcggccagatcggccagcagatcgcgcaggcgtgtccgcgccggggcctcgtcatccaccagcagaattcgtatcggctccgtcatgcttcccctcttgtcctcttcatcatcccgccgggaagccgtccttacggtacggcagttcaatcagcacctgaaagcgccccgcctgttggcgtgtttccaggcgcgcctcaagatcgtaaaacagcatcagacgctcgcgaatattttccagagccatctgattgccatgcacatgctcggccccggggctcaccggattgccgagggaaatcaggatgcgctcaccgtcgcgggtgaagcgaatttcgatctcccccgctgtctgggaggtttcgatgccgtgatagacggcgttctccaacaggggctggagcaataatggcggcaccagggcctccggtgggcaggcctccacgtcccaacgcacctgcagacgctcgcctagccgcaggcgttccaggccaagatactggcgcgccagagcgatttcctcggacaacggcaccagggtgcggttgtcgcgcatcagggcgcgaaacaggtcggccagttcttcgagggcggtttcggcccggcgcgggtcggagcggatcacgcccaacacggcgttgaggctgttgaacaggaagtgggggcggatccgcgccgtcagggccatcaggcgcgcttccacgagggagggggcatgaagccggtcgcgggcggcaaaatagcccagcaacgacaaagtcacaagggcggcccagagcagcgggcgccacaggccaactccctcctgccagaggttgagggcgacatcgagaacctgaaacacaagaccggcgagcatcatgacgagcaccagcaccagcccgacgccaagccgatagggcaggcgcgccaagggcttggctagggcgcccagggccaccaggctacccagtaccacgggttccacataggcggcggcttcagccaactccaacgccagatacttgaattcacgattccgcagcaggatggcaagggccatcatgccgttgaccccgagcagaatccgcaacatcacgccgagattgcggaagtcaggcaaacgcgagggcagggtgttttcccgtatacttttcatttcggccatggcggcccggaaattcgatgaggatagcgatttcattatgacagaacagcaagccccggctggagaaaacccccaggagaaagtctggtcgggccgtttttccgaacccgtttccgatctcgtgaagcgttacaccgcctcgatgtttttcgaccagcgcatggcgatgcaggatattcgcggctccctcgcccacgcaaaaatgctggcgcggcagaagatcatcggcgccgacgacctgaaggccatcgaatccggcatggcgcagatccgcggcgagatcgagcgcggcgaattcaactggaacctggacgacgaggacgtgcatctcaacatcgagaagcgcctcaccgccctcgtcggcgacgcgggcaagcgcttgcacacgggtcgttcgcgcaacgaccaggtagctaccgacatccgactctggctgcgtgacactctcgacgccatcgacggcctgctggccgagtacatgagctccctgctcaaactggccgagcgccacacggagaccccccttcccggctttacccatctccaggtggcgcagccggtgaccttcggccaccatctgctggcctatgtcgaaatggcccaacgcgaccgtagccgggtgcaggactgccgccgccgcatgaaccgcctgcccctcggcgccgcggcccttgccggcaccacctacccgatcgaccgggagtttgtcgcccgtgaactgggcttcgacggcgtctgcgagaactcgctggatgcagtatcggaccgggacttcgccatcgaattcacctcggtggcgtcgatcatcatggtgcacatctcgcgcctgtcggaagaactgatcctgtggatgagcccgcgcgttggcttcatcgacattgccgaccgcttctgcaccggatccagcatcatgccgcagaagaagaacccggacgtgccggaactggcgcgcggcaagagcggccgcgttttcggccacctgatgggcctgctgactttgatgaagggccagccgctggcctacaacaaggacaaccaggaagacaaggaaccgatcttcgacaccgccgacacggtgatcgacaccctgcgcatcttcgccgacatgatgggcgagagcgtcaacgccgccggcgagacggtacccaacatccgcgtcaagcccgaagccatggctgccgccctgaagcagggcttcgccaccgccaccgatctggccgactatctggtgaagaagggcctgcccttccgcgacgcccacgaggccgtggcccgcgccgtgcgcgccgccgagaccaagggctgcgacctgccggacctgagccttgccgaattgcaggccttctcacccctgatcgccgaggatgtattcggtgtgctgacggtggccggctcactggccgcccgcgaccacgtcggcggcacggcaccgaaccaggtgcgcgctgccatcgcccgcatccgccagcgcctagcgggctgagtcatgcagaacatcggcaagtaccagatcgtcaaggaactgggcaagggcgccaccgccacggtgtatctggctcacgaccccttctccgatcgcgacgtggcgatcaaggcggtgtcggccagcgccttttccggcggcgaggggtccaaggtggcgaagaagctgttcatcaccgaagcttccctggccggcaagctgacccacccccacatcgtccagatttacgacgcggtggccgatgctgatcccagctacatcgtcatggaatatgtgccgggtggcaccctggaaccctacaccacgccggacaacctgctgcccttggtggacgtggtggagatgatcttcaaatgcacccgcgccctggatttcgcccagcgcctcggtgtcatccaccgcgacttgaagcccgccaacatcctgcgcggcaaccagggcgagaccgatgtgaagatttccgacttcggtgccgcccttactgtgtcgtcggaccagacccaggtggccggcatcggctcgccggcctacatgtcgccacagcaggtgcgcgagcaccccctcaaccaccagagcgacatcttctctctcggtgtggtgctctaccaactgctcaccggtaccctgccgttccagggcagcaacaactacagcatcatctaccagatctgcaataccgagccggcgcccccctcttccctgcgcaaggacattcccgccagcatcgatgccatcgtcacccgcgccatgcacaaggacctggacaagcgctacccgacctgggacgccttttccttcgacctcgccgaggttttccgcaacgagcatttggccgaaatgcgggaaaaccgcatcagcgacagcgaaaagttcaacctgctgcgtggcctttccttcttccgtgatttttccgacgtggagttgtgggaggtgctgcatctctccgaatggcgccgggtacatcagggcgacatgctgatgaaggagggcgaccccggcgacagcttctcggtgctggccaagggcgacgtcaagatcaccaagcagggcaagctgctcaacattctttccgccggcgagtgcatcggcgaaatggcctacctgactcctcaaaatggcacccgcggtgccgacgtcacggccctcggcgaaggcactctgattaccgtcaataccgaaaccatcaaccatgcctcccaggccgcgcgggccggcttcgaccgagctttcctgcgcatactggttgaacgacttaatctcgccaacacgcgcctgacctcggcggccctttgagatcgcccacgccatgagcatcgaaaagatcggcaaatacgagatccgcaagaagctaggcgagggggccacctccacggtctatctggcgttcgacccctttgccaaccgcgaggtcgcggtgaaggcgatcttccccgaggtgctcaaggaccgggagaagggcaagctctaccgccacctgctggtgaatgaagcctccctggccggcaagctgatgcacccccacatcgtgcagatcttcgacgcggtgatggacgagaacgatctctcttacatcgtcatggaatacgtgcccggcggtaccctggaacagttctgcgacagtgagcatctgctgcccctggaccggctggtggaaattatcttcaagtgcacccgcgccctcgactacgccttccgtctcggcatcacccaccgcgacatcaagcccgccaacatcctgctggcgaaggccggcaacgtcggcggcgacatcaagatttccgacttcggcgccgccctgttatccagcggcgaccagacccgcacccaggtttccggcgtcggctcgccagcctacatgtcgccacagcaagtgcgcgagatgccgctcaaccatcagaccgacatctattccctcggcgtggtgatgtatcagctactcaccggtcgcctgcccttccaggccgccaacaacttcggcatggtgtaccagatcaccaataccgagccgccgccgccctccaccttccgtaccgaaatccccccgagcatggacgccgtggtggcgcgggccatgcacaaggaggtggacctgcgttacgccacctgggaggagttttctcacgacctggcccagtccttccgcaacaagcagctctctgcccgccgccaggagtttccggatagcgagaagttcgagaccctgcgtaccctgcccttcttcgccgatttttccgacgtggaaatctgggaggtcgtgcgtttctcgaaatgggaggaagtgacgccggaaaccgtggtgatgaaggatggcgaggccggcgacttcttctgcttcctgatcgaaggcgaactcaaggtttccaagcgcggccgcgttctcagcctgctcaattccggcgaggtgttcggtgagatggcggtgatcggccgtacccaccacacgcgtggcgccgacgtcatcgcccagaccggcgccaaggtggtcagcatctccggccaggccctgcgccacgcctccgaggtctgccgcatgcacttctaccagtctttcctcgaagtgctctccagccgcctggcccaggccaatactcggctcgcctcgacctgacgcagcaataccagccgaagcgatggagcgcgaactcatcaagtcggctcccgccgacgccctgccccgcttcgaggcagaagccgccggcctcgcggtcctccgcgccagtgggacaattagagtgcccgaggtaattgcctgcggagtggaacgcgatcaggcgcggctggttctggaatatttcgacctgtgcggtctcgaccgccgcagcggggccgcccttggccgcgccctcgccaacctgcaccgcaatctggacaatcagtttggtgcagcccacgacaattacatcggtgccacgccccagatcaacgcgcccaaccacaactgggcgcgcttcttcgccgactgccgcctgacgccgcaactggattgggcgctgggcaacggcatggatcgcgtattggtagcgcgggggcgtgatctggccgagcggctggccgcattcttcgtcgattacgcgccagcaccaagcctgctccacggcgatttatggtccggcaacgccaacgccctggccgacggcaccccggtgatcttcgaccccgccgtgtattacggcgatcgggaggccgacctcgccatggccgaacttttcggcggctttccggagagcttcttcgccgcctaccgggaggcctggcctctcgacggcggctttgaaacccgcaagaccctctacaacctttatcatatcctcaaccacttcaacctcttcggccccagctatctgggccaggcgaagcggatgatagagaagctgcttggagagctgcgggggtaggcatagaaatcggcgacgctagccacgcgccagaagggccgtaacccctcctctggcagccgcgccaaataggcgtttcagccatgccattcccgtgccccccgtccttcggccttcccaggcaatgcctgcctggaatcgcctttcggcgcggcttgcagacgggttgcttgcaacagatctcaggcgggcacagccaggtcgccgaggacctgctggagttcgccggcctgggccatctcggtcatgatgt

SEQ ID NO: 2897 - DNA, 21052 bp, synthetic construct
  variation 12376..13224: note = note, n is a, c, g, or t
  misc_feature 1..21052: note = Synthetic
  source 1..21052: mol_type = other DNA
accagcgcgttggaatcggtggagccggtgaaattggcggacagcgcttcctgcagcccgatcaggttgtcggcttcgatgccggctttgaggcgcagcacgccggtggcatcgctgccgtagttatccagcccgatggtgtagaacacgtggtcgccgggcttgttgttgaggttgacgatggaatcgccgggcgattggccgggcaggatttgcatctcggcctgattgcggcgcaggcggttgatctggtcgacgccctgctccagatcggtgaggttgagcacttggcccggctcggccgggaaggcccacagcgtgccgatatcggtaatcgcgccgccgttttgggtgggctggcctttgggcgcaagcagcaccggcggtttgccgttgatgagcagcgattggatcttgcccggtacgagcgtgagcaccagcttgccggaggcgaggttttgttcgcccatgtagacgcgggtggtgatcaggccgcgcttgatcaacgcatcggtcaggcggcgcatcagcaggttgatgcgcccgacgccgagcttttgcttgaggaatggcgcggtgatgcggtcgacttcgacctgctgcagcacggtgttgccgatcagctcgatctgcgtgacttcgaaggtggggccattctccggcacttgctcaaccggcgtatccagcgggatatcctgcccggcggcgggggtcggttgcgtgacttcgatattgggcggcgcttgctcgatctgctcttgccgctgccgttcgcgctgctcgttctgcaggcggatggcggggtcttgctgcggtggcgggttgtcggcgcgtgcagccccgctgccagccagtagcagacacagaagggtgcgcgggccgttgcccgcccagttcaaccagccccgcatcagtgccacaaccaggaggtgaggccagtgtggtggctcagggtgaccggatcgcgatgcgcggtgcggatggtgacgacgccatcgctggcctcaacgccgtcggcggcggtcagtacgccgccatcgaccaacactttcccttgcacgctgagcttgccgccggcggaggtgaacatgccgccgtcgtccatcgcataaacctgcgcccactgatcgccgaaccacgtcttccagcccgaatcacgtgagagcgtggtgtacatgggcagtgcggtggcgtgcaccagtggcgcattcagggtgaggttcttgagcgccagcacgcggccaccgatgttgtcgatggattcgctggcggtgagcgtggcattgccggacaccgaaatcaggccgccctgactttgcacggtagaggtggcgctggcatggcagcggaagaaacaggagcggctgtattggatcttgccggtcaggtaggcctgattgaccagtttggtggcggagtcgatctggaggccgccgccgttgaccagaatctggccgccgaggttttgtactcgcttgcccttcatcgtcatgccgctatcggccaccatgtaggccagttgcgacaaggcgagcgagccgtagtcggtgctgaagccatcgttgctcaccgggaacaggcccagccggcggcggctgttgctgaagtcgatgcgctgttcgttgttcgcgccaccaatatgggtgacctgattcgagaccgtgccgccggcattcaccagcagttgtttattactgatgacgcggccggcctgattggtgatgtccccaccagccttgagcgagacgtcgtccgactggccgaagatcaggccgagctgcgtttccgacacggtctgattgaggatgttgccgcccgcattgagggtgattgcgccgagcgatgcggcgttggtggtgtcacgcgtcttgccctggatcaggccgccgaggttggtgatgtcgatcttgctggtgacggtgacgccgccgttgtaggcggtgacgctggcgctttgtgcgccgtcggtgctgaccagtacgtcgttcgcggtgatggcgacattgccggcggcgaggaggtcactgccggtcactgccgtttgctgggcggtcttgatagtgatatcgccgccgtctgatttgagcagcgatttgatctgggccgtcccggcttggtcagccaccttgagtgaatcagccgtgatggcgacgccggcgatgccagacaaggtgctgccgctgacagtggtgccagccgtggtctggatcgacagcgcgccgccggtgctctccagcaggctggcggtattggcgttgttgttcacgtcattgccggccgccagcgcgagtgaacgcgactggatgatgaggttttgcacggcgctgagcttgctgccggacgcggtcaagtcctgggcggtggtgatgccgatgccaccggtgacgctggcggcaacgccattgagtgacagggcggattggccggctgcagtctgggtgatgatcagatcaccggtttgcgtcaccttctggtggctgtcggtcacgcccaccgcgaaatgggtgttggcgagcgcgacttccgccgcttgcaattgcgtgctgccgttggattggatcgtggtcgggtcgccggcatcaaaaccattgctggcaagttgcccggccaccatgaccacattgcccttcgactgcacggccgcgccatccagctggactttgccatcggcctgcaccacgaaatcgccgaccgaggccagcgccttgccggccagatgcacgcctgcgccgaggtcggtgaccatcaactcgatacggcccgaggtgagcgagccggtgcggctgatgtcgatcagtgcagcgccggggttggaggtcttggtggcggcgaaggcgatgtaattggagaggttgtcggtcggggcgacggaggtatcgaactcggccagcgtgctgccggcgaccagccgcgtcaccgacgtggcggacgagaaactattagtcaccggccctgccaccgagagctgcttggcgatcaggtcgagactgagcatagcgccggagaggccatccggcccgatctggatctggccgccggtggtggtcaatacaacgttgcgctgcagcttgccgggtgcggggtggaaatcatcgaacgacaccttgccggtgctcagcaccacgtggccggtgttcacgaacgagccgccgttgacggtaatgccgttggggttggcgaggatcacgttggcccgctgccccaccaccgagatcgcgccctgaatcaggctgggattactgctggtgacctcgttgacgatcattttggcgttgacgccggtgttgacgagatccgccccggccttgcccacgctgaagctggaataggtgttgtgcgacacgccggagacggtcggcgcaatggcgatactggctttgccggccgcgttgtagctgaccgaagtggcggtcttgccgtccacgacgatgtctgccgcgccggcataggttgaggccaccgtgcctgaatagatcgtggcgacggccacggcgatcagttttacggcgaagtgtgcgcgtcttgaatggcgacacgccaagctgctgcccgtcagagccatctgcggcagtaaggaaattttggtcatttttgttagattcttacaatcaattaaattttaaccgatgaacccaataccccgaaatcccgttcatcggatatgttggaaatgtgacattgacaagcaagaacccaccaactagcgagccaaaatttcggtcaattactcgacctcagtagccaatctgatcaccaagcacataaaaatcagatacctaaaccaacagagcacaataaaaccacgcgatttcaagtgcggcgtggcaaatccaaaagatgagcaaccctcactccagccacaaactatgcgttactcaccaagcacacacttgccgactacaggtcttcattctctgaccaacaacgtaaaacaatcacaacatcaggacaatgaattccatcggcattaaggtacaaataaaaatactgaatccaaacatactaaatgattcagaatttaatcactgggtggcctgtacgcacaatgcagcgcatgggtacccactcaggcgtacgggttctggcgctgctgttcatcccagcgcagccaggcctccaggaagaaatgcccgaataccgtcctgaccgctgccctgtattcggctttcgcgtccagagacaactggtggtagtcctgcgaaaacgccttgaatgaagcgtggtacaccggagacatcgggtcgggctttcgttttggcacaggagaaatccgctctttaaatagcaacatcatttatgaaatgcgttcgaaaccaccaccacatgcatgccacgctttggcatccgcgagatggctgcggtcttttgacgaatgggtgcattcggctttggtcgtactggggttgtaggcccagccatagaaaagctgaacacgctggtcacccagcaacttgttcttgcacgtgaagcgataaccgacgacaaaagcggggcgaaaatcggtggataaccgcccacggatgacttcctccgcttgcagcccttccaacgcctcgcaagtcggtccccagtcgttacgcagcaggatttcgccttgggctgccagcgcactatccgagtgtcgatcaccgcatccaatcaacgtgccagcaagcatgttgaaaccccaaaacacatagcccagaccactcttgcgagtacccattcacagcctcaatgcgcacaaagttacttatagtcatcaaatctagcagatgttacgcggattctgtagatacatcgtcatcaacaccgcagccttcgctcaaatacaacagctagggttggcaggtggcaaaagcgagaatcagattcggtatttcagtgcggcaacgtcggaatcagctggaatggtcacaagaggagctggcagagcggtctggcctgcatcggacctatatcggccaagtggaacgtggcgtgcggaatatcagcatcgacaatatggaagcgctggccgaggcgctcatgctgcctttggctgagctgttgcgcagcgactcgtgacgtgccccccaaaaaaaagcgcccaaatatcaccctaatttgttgataccaacatatcacaaccttatcagagcctgacagctaaggcaacttctactgctgagttcaacagttggggttgggtgcgatggcggaagagctggcaatgaagttgggcggaaatattgcgcggcagcggcaagcgctcggtttgacgcagcaccaggtcgcagatcgacttggggtcaatcccgaaaccatttcacggttcgaacgcggagcgaccgtaccatccctacaaaccttggccggattggccgccgcgctggacagtaccttggcgggactgattgacggtgtttcaaccacgcccgatgaattggcacgggaactggctgcagtattgcgcccactcagtgagaaagaccgggtactgctggtgggtctactaaaacagcttgggcagcgcctgaatacgggctgatctgcggaggtttccaccaagaaaaggcatctggcacgacgctgggaaagacgcctggaagccacgaatctatctgtagagctatcaaatggaacaccgccatcccagaagccacttcacacgtgcccttgaaaaaatctgccttcggctagatgacgcgggggccgcacctgttcaatggaaaaacaggtttttacaccggattcacgccccgattgtcactgtctcaaatgtctgggtagttggctcctatgcgcgcggcgcacttacttgcggcgaccttgacttggtcgttgatgcaacggcggtattaaacggcagcccgacacagcttcctccgaccagcgccatatctcgggtattgtttaaaagcccgcgagatgtacgtatttccattggcacaccacaccaaaacacatcgggtgtccccttcccagatgcgcatctcatttggcaagctgcaccgataaaggattggcactccgcaatcgatgcgattcgccccgaccccaacgcgggcagactctcccgaccaactgatttgattccacttcgacgagagcaaattgattgttatgacgaccagctagaggagttgatcgcactgaaatcaactgggattttggattgggagtttatccccgttactgatgcagccatgccagaatcagtaaccgaagatgaaactgatttcattcgaacaacgaaattattctgcgggcagaaaactcaaaaattactcccgcacctgctgaccttattccgaaaccggaaaatcaagtcgcaagaaaaatggcagcgttcctatgacaaaatgaagtttaggaatggcggctgcgacatctttatttattggcaggccatgcatcccgacagaacacttgaatgagctgtctacctttgaggtagcactgatgccgcatctttgtcagcgcggcccaaatggcatttggctgattagccggggagttgagcatcctgttcgaaagcaagtaaaagatattgcggtttttgctctggttgatgaggataataagcctattatttatcactatattgatagatacggggacggaattcgagctgttgatttcttcttaacagaagcggcagcaactgccaaaactcgcgaggaaatagaaacattcggggagtcgggcaaagttcgaaaaatctctggtgatgagcttctgattcaacttgcgctgatcgacgtattacaactcgacgatgaagcctttccattaaccttctctggcctgcggctgttcaacgacgagcgaatagctgataccgaaacagtacttcgggcacttgctggcataagtgagccgtaaattgccgatagctttgcctgcgtgctcaaagaagacggccggcaaggttttgacactgccacagctatacaatttgatgtggtgattgccgatattcagaggccgcataaatctaaatttgaattcgccaaggcattgcttgccgaattcggattacagcttccgattatcgcgctcaccgcccatatcaatttattgcaggaagacccgcgctccaaattgttcagtgcgtatttagcgaagcctgttgcgccaaccgcgctgcttactaccttgcaggaatgagtggatgggtgagatataaaaaaatgttacgttgctcaatgaactagatggcagtcagaacgcgctgcaattgctatcggacgggaggcgtcctcttgggcaaatccggccactttattcctcttgtatggccccgagggctgcacggcctacgtcggtgatgtggcctgactcggtgaccaggccgcgaaggcgaagtacctgtaacgttttttgcagttgcgccatttggcccatgccggataagccatggcttgggctgcgtccggccgtgatgttttgcagcacgaatcgcatggattgggaaagatagggctgtgccataagtatcggccgtttcgtctgtcaagatgcctttgtttcggatcgaagggggccagaggtcaatatcagagcattgctatgttgcgggcttggcgcagcaaccatttcacgctagccctcacatcctgtgagttggtgcttttgttccatgcgactcgatctgatgttgcaaatccgtttgcaggcagctaatttttgaaagaaaaaagaaagcccgctgacgcgggctttcgggtacaactcgtaatcttacgattacagtttattgtagcaacggcactcaccccggaaaactacaacagggccaatctagcacaggaaaaatccatgcaacaagcgcttcgttatgatcttggcctcgacatcggtattgcctcggtcggatggtgtgtattgggtgagcagcgcatcattgatttaggtgtacgcgctttcgataaggccgaaacaccagaaggcgaatcgctcaatgcgggtcggcgctccgcgcgattgctccgccgtcgcttgcgtcgtcgagcatggcggctacttaaacttgcgcgtttactcaagcatgaaggcttgattgcaagcagccaattattccagcgacaggtaccgataacacaatcgttgtggattctgcgagtcgaagcgctagaccgttgcttgggtggcgaagaatgggcaagggtgatttaccacttgtgcaagcatcggggcttctggtttgcacgcacagccgatgccatggcctcggaaggcggcaaagtaaagcaagggttggaacgcacacgggcactgatggagggaaagggttatcggacagcggccgaaatgatgctagccgaatttccagataaccagcgcaacaaacgtggcgattacggtcagtcccttgcccgcgatttactcgccgaagaattggcatgcttgtttgcatgtcaacgcgaactaggtaacccacatgccgcgaccagattcgaatcggcaattcttgctcccgaaaccggcctgttctggcaacaaaaaccagcgttgtccggcgaagccatgctcaatctgattggtaaatgcacgtttgaacacaatgaatatcgggcagccaagcatagctggtctgccgagcgttttgtctggcttacgcgcttgaacaatctacgcatcagcattaacggcgaaagtaggccgctcaatgctgacgaacgcgtagttgcactgaacctgccctatgaactagctagcgtcaaatacaaacaacttaagaccaagctagtaacgcaggggctttggagtgccgacgtacgttttactggactcaattatcgcgatggcagtaaggacccagaagatgccaagctgatcgaactcaagggctggcataccttacgcaaagcgcttgaaaaagggggactcaagactgagtggcaaagcctatccaatcggtattatgagcttgaccaaatcgccacaatcctgagtctttacaagactgacaatgaagttgtccacgagctaggccaattaggcttggctaagccaatcgttaatgcgctatcggttgaaagcttcagcgacttcgttcgcctgtcgctgaaggcgttgtccggtatcttgccacaaatggagcagggcaaacgctatgacgaagcgtgccttgccgctggctatcatcattccatggcggctgaaaagagcctcagtcattacctgcctaagtttgacggtgaagcaccaaacaacccggttgtattacgcgcgcttaatcaggcacgcaaagtggtcaatgccctgatccgcaaatatggtccaccctatgctgtccatatcgaaatggcgcgagatttatcgcgcccattggatgagcggcaaaaaattgaaaaagaccaaaaggaatatgcgacgcgcaacgagcaagatcgtattcgctttgccgaggcgtttggccgcagtcccaccggacgtgagtttgaaaaatggcagctttatcacgagcagcatggcaaatgcgcgtatagcctgacggcactcgatctcaaccgcctgatcgacgatgccacttatgccgaaattgatcacgcgttaccgtactcgcgcagcttcgatgacagcaagaacaacaaggtgctggtactgacggcggaaaaccgcaacaagggcaatcgtacgccgtatgaatacctcggcggggccgtgggtgctcaacaatggctgcgttttgtcacttttgtcagtagcaatcatagctaccgtcaagccaaacgcgaccgattgctgcgcaaacacttcaatacgcaggaagcaacagaattcaaggcgcgcaacctaaatgacacccgttacgcctgccgctactttaaaaattttgttgaaaatcacttggcgctgcacccagaggggggacatcagcgctgtgttgttgttagcgggcaactaacgagcttcctgcgcgcgcgttggggcttggccaaattacgcaaggcaagtgatcgtcatcatgccattgatgctgcagtagtcgctgcgtgtagccacggtatggtcaaacgactatcagactttgcgcgccgcaaggaactggacgcagtgcgtgaaggctttgtcgatctggagaccggagaagtcgtgaatctggctatcctgcatcagctcgataaacacttcccgcgcccgtggctgcatttcgacgatgaattatgcatgcgagccgggcaggatcgcagcactggtcgggtgcgcgacgacttgccattggacgaaatgcgaaagcacctcgccgtgctgggttatgacgaacttgcgctggccaaaataaggccgcttttcgtatccagagcgccaaagcggcgcaatggcggcgcagcgcacaaggacacgatttatgccgcccgctcaacgaacgacaaacctaatcgtgttacacaaaagctgccacttaccgacctaacgctggcgcattttggcgggcaagaatatgacgaaggaggctgctcactgatcgagccgcaccgcaatgcgcggctttaccgcgccttgcacgagcggttgctcgcgcatggcggcaaggcggacaaagctttcgccactccgttctacaagccatctgttaatcacgaacgggagccgctggtacgtggcgtcacgttggtcatcgacaagttgtccggcatcccaattcgtggcggcttggctaaaaatgacagcatgatacgcgtcgacgtgtttggcaaagctggcaagttccacttggtcccggtgtatgtgcatcaccgagtggctaaggcattgccgaaccgtgcgattgtgcagggtaaggacgaagacgaatggacattaatcgacgacagttttgagtttcggttttcggtgtacccaaatgatctgctgcgtattcagcagaaaggcaagcccatgatcgaggggtactacgcaggctgtgatcgagcgacgggtaatcttgcagtatgggcacatgaccgcgatcagcaacagggcaaagatggattgattcgcggcatcggcgtcaaaaccgccgtttcggtcgaaaaattcaacgttgacgtactcggtcgtgtctatcccgccaagtctgaggtgcggcgtgggctggcgtagcgtaatcatcagccagccagcgcggctgtcggtgaaaaaccgccagttgctgctggaacaagagactggtgtcacagccaccctgccgctagaggatttgagtgtggtcgtgctagaaacaccgcgagcgatgatcaccagcgcattgctctccgagctggcaacgcatgatgttgcactgattacatgtgacgaaacgcatcatcccaatggcgtgctgctaccgtatttgccgcatagcagagcacttagggcgatgcagaagcagttggcattgacagtgccgcaaaaaaaacgcgcctggcagagcatcgtgcaacagaagttgcgcaatcaaggggagtgcttgaaccgattcctccctggcgctggcagatttttattcgaccaagccgagcgagtacgttcaggcgaccccgataaccgcgagggcggtggcgcacgctattactttgtcgaactcttcggcagagactttacgcgtgaacaggatgactggatcaatgctgcgctgaattatggttacgccatcatccgggctgccattgctcgtagcttggtcggtcacggattcttgcccgcattcgggctgcaccataagaatcagctcaacgcgtttaacttggccgatgatctgatcgaaccgttgcgtccgttggttgatggcttggtcagagctcaggtgagacagggctgtgatgccctgatcactgcggacaaagcaggcttggcgcaacttctttatgcggatgtacggatgaacgccggtgtgatgaatgtcctcactgctatcgaacacatggtggaaagtttggggcgctattgcgaaaacaccatgccagtcgagctggattggccgattatcctgagttgatgcggatactgctcaatgagccaggagacccgccgtttcatgcgtctgatcgtgttttttgaccttcccacggtaagcaaggcagacaaacgtgcctataccgtttttcatcgattcctcgttcaagacggctatgaaatgttgcaatggtcggtgtatgcccggatcgcaaatggtgaggatgatgtccgaaaacatcagcagcggcttgttgtaaatttgccgaataagggctcggttcggtgcatgaaagttagtgaaaaacagtatgccgcgatggatattttggtcggaacgttgacggtgcaggaagaaaaaatcggtaagcagcaattattgttgttctgatttctggattttttcggctaaaaaaagaataaccctctgtaaaaacagagggttattggttagatattgtagctttccggggtgagagagggagctacaacnnnnnnnnnnnnnnnnnnnnnnnnnnnnnnnnnnnnnnnnnnnnnnnnnnnnnnnnnnnnnnnnnnnnnnnnnnnnnnnnnnnnnnnnnnnnnnnnnnnnnnnnnnnnnnnnnnnnnnnnnnnnnnnnnnnnnnnnnnnnnnnnnnnnnnnnnnnnnnnnnnnnnnnnnnnnnnnnnnnnnnnnnnnnnnnnnnnnnnnnnnnnnnnnnnnnnnnnnnnnnnnnnnnnnnnnnnnnnnnnnnnnnnnnnnnnnnnnnnnnnnnnnnnnnnnnnnnnnnnnnnnnnnnnnnnnnnnnnnnnnnnnnnnnnnnnnnnnnnnnnnnnnnnnnnnnnnnnnnnnnnnnnnnnnnnnnnnnnnnnnnnnnnnnnnnnnnnnnnnnnnnnnnnnnnnnnnnnnnnnnnnnnnnnnnnnnnnnnnnnnnnnnnnnnnnnnnnnnnnnnnnnnnnnnnnnnnnnnnnnnnnnnnnnnnnnnnnnnnnnnnnnnnnnnnnnnnnnnnnnnnnnnnnnnnnnnnnnnnnnnnnnnnnnnnnnnnnnnnnnnnnnnnnnnnnnnnnnnnnnnnnnnnnnnnnnnnnnnnnnnnnnnnnnnnnnnnnnnnnnnnnnnnnnnnnnnnnnnnnnnnnnnnnnnnnnnnnnnnnnnnnnnnnnnnnnnnnnnnnnnnnnnnnnnnnnnnnnnnnnnnnnnnnnnnnnnnnnnnnnnnnnnnnnnnnnnnnnnnnnnnnnnnnnnnnnnnnnnnnnnnnnnnnnnnnnnnnnnnnnnnnnnnnnnnnnnnnnnnnnnnnnnnnnnnnnnnnnnnnnnnnnnnnnnnnnnnnnnnnnnnnnnnnnnnnnnnnnnnnnnnnnnnnnnatctgcgggcggcgcggaacccgtgcctagattgtagctttctagggaaagaaagggagctacaacaattacgcgcggtatgccgacataagcagtgtgacaacaaccttcatccgactcagacttagagcacgtatttgcgatcaagaacagcggccgttcgtcaaaagccgctgctggcgttggagcgcatccgctctatccgacgacttggtagattcggaattttcctgtaactctcggaaaatcccagaattatgagcaccaagccaatattgtcgcaaacgcatgccaataatcgcgccatacaacactgcatcaaacaacgtcaccctcgccttcaaggagagggccggggtgaggatggtccgcccccctttcaaaagcgccccgccagacaggccgacgcgggggtttcggggatcgagtgtctgagggccttggcccgagttttcgattcccgcccgtgacgggctggctggcgggggcatctggcgcttgcgacagacgcttttgcagggtcgcctttggggtggagggggcccaaggaatatgtacagcccgagacaaagtcccttccccgtccgcgcgacggaacgcgctgaaatgcttttacccgcgccaaaggcgctaaaactacaaccgccaaaggccccggccggcaagccgtccgggctacattgccccctaccccttcaaatccaccacaaaccgatagtaatcactgcggaaatacgaatgcgtcagctcgatcggccggctgcgctggtcatagctgacccggatcaaatgcagcaacggcagcccgagcgcaaagccggtgattttcgccaaccgctcacccgtcaccaacgcttcaatgtgctgcttggcggaagccacggcgatttccctggcggccaggtaggcatagagcgagccctcgatccgctccggctccggcacgatgtcttccggcagcgatgagacttccagccccatcaccgtatcgcctgccagccgcaagcgctccagtttggccacgcgtgaggtcgatggaatatcgaggttcgccatttcctcatcgttcggcgtggccagccgcttgccgagccagcgcgaatcggcgacgaagccacggtgcttgagcatgacgctcagattggtgagacgccccagcggctggtcgatcttcggtgtgatgacgaattcgccgttcgggttctgcttgatctggccttcacgcgtcaggatatcgagcgcatggcgggcgctatcagcggtgacgccactgaattcggcaatcacgtcgaccgatggcaggggttcatcctgcacccagaagccggccgcaatagccgccgccagccgctgcttgacgatcagatagtcgggtacgccttcgcggatatccacccgcaatgcggtcaatttgttggccatgtgctctccacccctatcgatttatgttcgtctggcaacgcctctacacgtggccagcggtaatgccggaatgcctctctgatatgccccaacagcaagtcattttgccagggcttggtaaagaatttgtagaccgcgccgctgtttaccgcattgataactgcatcaagatcagcgtggccggtcagcaggatgcgcatggtgtcagggtagagctgccgtaccacgtcaagaaattcgaggcccgacatgcccggcatgttctggtcggaaatgatcacctgcaccgagttgctcgccagcacatcgagcgcctcgctgccgcagcacgcttccagcacgcggtaatcctcatacagcaagatacggcgcaatgccgtgcggacgctggcttcatcgtcaacgagcaacacggtgcgttgccgcacttcgcgggcatcgttcaccggaatctcgaaacgaccacgctgcagcaacgccgcgaaatcgtcggccgggactggccgactgaagaaatagccctgaatttcatcgcagtcatgccgccgcagatagtcaaactgcccctgggtttcgacgccttcggcgatcacgcgcaggttgagctggtgcgccatggcgatcacggcgctggcaatggcagcgtcttctgatttgtgcgtgatctcgctgacgaaggcacggtcgattttcagggcatcgaacggcaggcgcttgaggtaggcgagcgatgaatagccggtgccgaaatcgtctagcgccagcggcaggcccaattgccggaagccatcgagcacggcggtggcggctggcgcatcttgcatgacgatggtttcggtcagctccagcgataggtatttgggcgggatgtcataccgttgcaaggactgccggatgacctgcaacacgttgccgcggcggaactgcagggcggaaagattgaccgctaccgggacgagatcaagcccggcagcatgccagcgggccagttgggcgcagaccgcatcgatcacccattcgcccagcggcacgatcaggccggtttcttcggccagcgggatgaaatcagccgggctgatcaggccgtgttccgggtgctgccaacgcaccagcgcttccgcccccacgatctggccgccggtcgcgctgactttgggttggtaatgcaggatcagctggttttcatccagcgcacggcgcaggtgttcttccagcatgagcttgccagtgaccagcgcattcatttccggcgcgtagaacagcgatggctcgccttgcagttgggcttgtttcagcgctgattcagcgttgcggaacagggtttctgcatctgtaccgtcggtcgggaagagtgcgatgccgccccgtgcggtgatctgcacgttgttgccgggatggctgccaaccagcggggcagagatttccggcagcaagcgatccagcaggagcgtcgccgcatcgctggcttggcgcaagccggatacggccactgcaaaggtatccgggccgacccgggccagggtatagggctcgtgcagtttggcgggcagccgttgcgccacctgccgcaggacagcgtcgccgacatggcggcccaggctatcgttcaaccgtttgaagcgatccaggtcgatcaggatgacggcgagctggtgattcccgcgctcgtccgtcaacagcaattgggccagccgttcattgaacaggcgtgcgttcggcaagccggtgagcgggtcataccaagccaggtaatcaacccgctcagcccgctcgatgtacttgagcgcgaaagaaatatcgcctgccagctcgttcagcagcttgatctcttcggcatcaaagaacccggcttccggcgcatacagcagcatggcaccgatgcaggcgtcgtcgagcaacaagggcagtgcagccaccgaccgcagccgctggccgtccagtgcctggctgctgtcattgcagaacaccgcctgctggctgcgttgcatgttgccgagcagcgcggcttcaagcgtcgcgtcgtacagcacctccggcgacccggcaggcattccctcgcggcgcatcgaggacatcaggcgcagggattcgccagtcagcaggccgatgcccgccaggtcgaaaccaccgtgctcgacggcgatccggcatgcttcatcgaagagcgcctggcgttcgtggatacgcacaatggcggagttgataccggacaacacggcttgaatccggctgagccgggcaatcttggtttgctgttccttgcgctcggactgagtgcgcaaggcggtgatgccgaaggcgatatcgtcagccagctcggccagcagcttcatttcgtcatcatcgaatgcatcgggctcgctggtttcaagcgtcagctcccccagcagttgagcgcccgattgcagcggcaaggccatcgataacggcggaacgtcacccgcttgcgccaccccggcttgcgcggcaatggcaagctgcccggcttcatccgccaaccggatacaggcatggtcgtagtgcgccagaccgatcagcagttggcacatctcgtgcagcaacaccagcggctcactggcgtgcaccagcgcatggttgcactcagccatcaccaggcgggcgcgggagaggcggaatagcgccttggtcgcacgctcgtgcgcaagttgcaattgcgcttgctggatggcattgcggatgatttgcggcaagcgctggatgtgcttgaccgacttgatgacgtagtcggctgcgccacgcttgatggcctcgacggcgacttcttcggaaccggtgccggtgacgatcaccaccgggatatgcacatcgcgtgctttgacgagcgccagcacttgcaggccatcaaagccgaggatgttgaaatcactcagcaccgcatcccagccggcttcgcccaggcgcgcctcgaattcagcagcagtggcggcttcaaccagccgaaacacgccctcctctgcggcaagcgcagcacgcacgagctcacggtcgtagggcgaatcatccacatacagaatgcttagcggcattgccatgacacgctcgcagtccgcgggcgggcatcggccgtctttcgtcccgctccgggccagggagcaacacggccatcgcacgcctacagtttgtcccggccagattcggccaggattctcctttctttaacgattcgcagcccgtacttgtttaccgggcttgcggagcggtcattggtacttttaaccatcctgctgccgggtcaaccgtacccgcccttccggcatgaagtacgtgccgaagcggaccagcccggcctgcttgaggtgacacagcaaggtgaagcccagctgcatgccgtcttccggcgggcgcaaagccacctccaccgctttcaggcgaggctcgtacttcagcagcgtgagctggatttcccgcatcaggcgatggccgcccgcgggcaagtcgcgataaataccggtgaggtcggacaagccgtagtccggcaggtgcttgagcgcgccggcccggctgttgaggatgcgttgcatgctgtccatcacgctcagaatggtcagcgtccgctcatcaaagtcatcgatgctttggccatcagtcaaatgaccggtcaggcgttcgtagaaggcggggccggtgggcatgtcggtctccggttgaggcttgtcagggttgggccggcgtatccggttgcaggcggtagccttgggcgaggatgcgaaacggtgtttcgtctgacagctgttcgcgcccaatcaggagctgccagcccgacggcacatccgtcttgcgaaagaacgcggccacgccgatctgtttggcgtccttatccaatggctcatccaggctcaggctggcgcccggcagcagaatgacttccttgctggcgagcagatcgtcggccaaacggactttgtcttcggtcagcagttgctcatagctagtgctggcaaagcgtttgccgtcacgcagctgatacacccgcaccacgactgacagcggctgtgacttgtcgtcgctgttgagttcttctcgcgccagcagatcgagcttcacagtcttggtctgggcgaaaaacactgatcttgtgagatcgaccgtgccgtctttcaccttttgggcgaggccacagccacctagcgctacggcgaggctcaatgccagacagagcaggaattggagtcggttcatggggtggtccccgtctttgattggtgagtgggagcgatggattgggtcaatgggcaggcgtgtggctggaatagcggccgatgcggatgtccagtgggcgagccgtttgatgcgcacgccccagcaaactcaaacccaaccgtcggcgagggcggatcagcgcacaagcgggcaataaggcgggcaatacccgcagcaccaactccgcatcaaaccgcagcccgagatacacccgcagcatggcgagcagatcgtggtggtcttgcgtgcccggcaacagcgcgagcaatcgatcggcggtgtatggcgcgatcacgatgcggacggtgctgttgcgttcggtcaaggtgcgcccgagcagcaggttgccggtctccagccggatggggccgtcacccaagcgcgtcgcatgcgccatgcgatgcgcaaccggccagaactcctgcactgtcacttcggcatccggcaccagatagcgcactacgcccaccaagccttcggccgggcgggtacgctgacttgccaagcccagcaaggccagccaacgcgcagcgggaatcccctgccgctgcgcaacgtcgccaatgcccaaaccaaccagtcccagcagcgagcgggataccgcgtctgtcgcaccggcccgaaagccgaccgggtagcggtatttgcgccagatgcggtagtacagcgtggtgatacggtggttgaacagatcaagcaagccagcgagcgcatcgctgccttcgcggcgcatcgcgatgtcgtcgaggaagtaatacggcagcaccgcgtcgacaccgtacagaccaagaaaggtggtacgaaccgtgggcggtgcggttgcggtcgggtgcacttcatcttcgaactcgacaccagcaatgtcgctgaccgggaagccaagcgagggtgacggccgaaagcgcaccggctcatgggccggggtatcacgcgtggccagaccgggccggtctggatgaatgagttccagcaactcgcagaagcggtagaaattcattgccgctgcgcggcgcaacagggattcgctcaggcgggcattgggcactgtgcccacatcgacgagcggtgcattcacagcggcgcagccgtcggtttgctgtcggcccattcgatccgcttgccggacggcaatgagatcacggtgagccgggtaaacaggttcatatcggcataggcggcaaagaaccggttgagcagctcgccgaacaggtagaggtcaccttcgcccgcgaaacagtggctatccagcgtcagttcgatactgaccccacgcagcaaggcgccccgctccaatcgctgcaccgaccgatggtccacctgcacgatgccctgcagccggcggcggttgagttcgtcgtccgtccagtcatacaacgccaacgtgccgcgcagcacctcggcgtcgagcagcgatagataattgggggccaagtgtgagagcacgcgccagtggaagcgatcctccattggcggatagatcggcaaggtcggggcggtcaggttgcgtacggtggcgacacaggcactgccaccggccaattccagaatctgcgattcgcgcagcgctttgcgcggcaagaggccattcgtaccggtgacgcgcagggacagcgtttcgaccggcagatcgcgctgtgcttcccacgcatggccgcccaataccagccaggtttcgaacaagccagccgggccgcgtcgcacccggccatgaaagtaacgctccggcgcttcatgacgcagcatgccgccacggtggcggaacgatgaaaacggcacgtactcgtggcgctcgccgctggcgtgatcaaacgcctgcaccgcatcgaccgaataggtttcgacatgcgcaccgtgatgcagcatcggtacgacccggtattcgctggcgtggtgatcgacgcgaatcggctctgcctcgagatcgaacaggttgatcgccggcacgcaatgcagccgcacgttttcggcagtgaacggcatatcgtcggggtaatgctgcgagaggattacttcgatttcgaacgacaccaccgcttccggcaaggcggcaatgtccaagccacatagatcgatgaacaggaatttctcgcggaagctgaagtattccaacaacagctggtagccaccgaaggcgttgtcggccttgggccagagccgttcctgcggcgcgaatccggcgggttgg

SEQ ID NO: 2898 - DNA, 19853 bp, synthetic construct
  source 1..19853: mol_type = other DNA
  misc_feature 1..19853: note = Synthetic
tcacctcaggtttcagcctcgcccgcttccatcccgtcctgcagaaatggcgtgcccaccgaggcatcgactacggtgcccccgtgggcacgcgcgtgaaaacgaccggtgacggcattgtcgaattcgtcggcacccaaggcggctacggcaaggtggtggttctgcgccaccagagccgctacacgacgctctacggccacctttccggattcgcgtctggcctcaggaaagggatgcgtgtggcgcagggcgatgtcatcggcttcgtcggtgccaccggcctcgccaccgggccgcatctgcattacgaattccgcaccaatggcgtatttcagaatccgctgacgatcgcgctgcccagcgcgccgcccttggcgcagcagcagatggcccgcttccgcgatcttgcccaggctcaactggcgcgcatcgacatgattcgcggaaccaatctggccctgctcgactgaattcgcacccatgcccgccgagctttacgtcgggctgatgtcgggcaccagtctcgacggtgtcgatgcagctctcgtcgagttctccacgaataccgtccgcagcgtcgccacccatttcgccccctatcccgacgacgtacgcgccgaggctctggcaattcaaacgcccgggaatgatgaactacagcgcgccgcgatgctggcgaaccggctcgcggacatttatgcggcgaccgtaaacgaactgctcgccgcggcagcaacgccagccggggcggtccgcgctatcggctgccacgggcaaaccgtacgccacgcgcctgccaacggttacacgcttcagcttaacaacgcggcccgtctcgccgaaaaaaccggcatcgccgtcgtcgcggatttccgtagccgcgatatcgccgccggcggacagggcgcgccgctggtgcccgccttccacgatgcctcgttccgggaacccggccgtcaccgggtcatcgtcaatattggcggcattgccaacctcaccgatcttgcaccaggcaagcctgccgtcgggttcgactgcggccccggcaacatgctgctcgatgcctgggcggcccggcatctcggcaccgcctacgatcagggcggccactgggccaaacagggacaggtcttacccgcattgctggcacgcctacgcagccatccgttcttcactgcgtccccacccaaaagctgcggtcgcgaggaattcggcagcacttggctcgacagccagctcgacggctgcgaagcctccgcagatgttcaggccacgctcgccgcgctcacggcgacaacgatcattgaagccgttgccaaatggtgcggcaatcccgcggagctgttcgtctgcggcggcggcgcccacaacgattcgataatggaagccttggccaccggacttcccggcgtcaccgtcggcatcacggacgcgctcggattaccggccgattgggtcgaggccgtcgccttcgcctggctggcctatcgcacgctgcacggcctgccgggcaatttgccggaagccacgggagcccgcggcctgcgcgtgctcggcgccatttatcccgcttgaaaatcgcccttgggcggttgtgcagaccaaccgctcaaacttcttgttacgccgaaacaaaaagtcgaaggggcgccgcagcgccccttcgacagcccgctcgatcaaggctcaagtggcgaatgaagaaccgcagccgcaggtgctggtcgcgttcgggttcttgatgacgaactgcgagccctgaaggccttccgagtaatcgatttcggcaccgaccagatactggtagctcatcggatcgatcaacagcgtgacgccgttcttttccatcgcggtgtcatcttcgttggcagtttcctcgaaggtaaagccgtactggaagcccgagcagccaccgcccgtgacgaagacgcgcaacttcagcgcgggattgccttcttcctgtatcagttccttgaccttgttggccgcattgtcggtaaagacaagcggggcgggcatatctgtaggtgcgttcatgtcgttctctcctgtggggatgctgggcggggaaattatcgatccatccgcacgcccggtcaatgtcaattgctcgaagccagcttgagttccactcccttcgccaggacgccctgatgcaccaagcggccctggacgacggcgcccagatgcatttcgatattattgtattcaacgtcgcctgtgacacgtgcccgcggctgaagttccaggaactccgttgcgtggatcgggccgatcaccgtgccattgataacgacgtgcgaaacggtaatctcgccttcgatgcgcgcatgttcgctgatgacgagggtaccttgctggtcgccgatcgcatgcacattgcccttgacctcgccatcgatgcgcaaaccgcctgcgaatgcgatgtcaccggaaatagtagtaccggcaccgatcaggctgtcgatgcggttctggggcttgcctgatttctggaacagcatcatgggctggcttccttctacaaattgacagtctgggcgacgcggagcgccccaccctgcatcaagcgaatttcgacgctcttgggcttcgccccggccggcagcgtaaacgcgccgtcgatacgtcgaaaatatttgaagacaacggcaaagcggtcagcatcggaatcgttggagcggggaaaaatcatcataccaccagaaccttcggactgtaaggtcacgacggcctggacggtgcccttgaactcgcgtccccgctgctcgccgttctgcgccacaaggaactggtagcggtagcgcccgccgctgccatcggcgaacacgcgcaggcggctgatcgagatcgcgccttccctgccctctccctgagccagccgctcgaataccgcattttcttccttgaggcggttgttctcagcctccagcgtcttcacctgcgcggtcaattgctgttgcgcagtgcgttctatttgcaggctgctttcgccggcgttgctggcggcccgcagcttttcgacttccgcttcgagttcagccgccttagtgcgcaaggcgccgatttcctgggctgattcgctacgatcgaagccggcgattctgcgtccggcatcataaacccagccggccagcgcaagcgcaacagcccccgtcacggctatgcccaaggcctgccaataccaaggcacatgggtacgcaccgtcacgcgcgcggcggtgatgccgaagcggctgcgcaggcggcgcagcttcagggcaagacgggaacttgggtaaggcccgcgcattcgtccagactgaacatcaggttcatgttttgcaccgcttggcctgccgctcccttgaccaggttgtcgatcaccgagagaacgaccaacatgtcgcccccctgtggccggtggatcgcgatgcggcagatattcgcggcgcgtaccgaacgcgtctcggggtgcgatttcggcggcaagatgtcgacgaagggttcctttgcgtaacgattctcgaacagcgcctggaaatcggcttccttagtaatgggggcatagagcgtggcgtggatgccgcggatcatcggcgtgagatggggcacgaaggtgagtccaacgtctcggcccgcagccagcgccagtccctggcgaatttccggcagatggcggtggccttgcacgccgtaggccttgaagttgtcggacgcctccgcgaacaggatatgcgtttccgccttgcggccggcgccggaaactccggacttggcatcggcaatgaggtggtcgagatcgacgcagccggcctcgaccagcggcaggaaacccagttgcgtcgccgtcggatagcagccagggttggctaccaaccgggccgtcctgatctgttcgcgattgacttcaggcaagccatagaccgcctcggcgatcagctctggcgcagcatgggtcatgccataccattttccccacagcgccacgtccttgatgcgaaaatccgccgccaggtcgataatccgtacgccagcggcaagcaggcccgccgcctgctgcatggcgatgccgttgggcgtggcgaaaaacaccacatcgcaacggtcgagcggcgcctctttcggatcggcaaacttgagcgcaacgcggccgcgcagactcgggaacatatccgccaccgcggtccccgcttcgccacgcgatgtgatggcggccagttccacctcgggatgctgggccaggagacgcaatagttcgacacccgtgtatccggtgccgccaacgatacccaccttgatcatgtcgcctttctcctgaagagttgcgaatggtaacgcggatcggcacacaattgaaaaagccgcccgcaggcggcttttccaggggcgcgggcgatcagcgcttcgagaactgcttgcggcggcgcgccttgtggaagccgaccttcttgcgctcgacctcgcgcgcgtcacgcgtaacgaaaccggccttggagagcgcgggcttcagcgtttcgtcgtactcgatcagtgcgcgggtgatgccatgacgtacggcgcccgcctgaccggactcgccgccaccggtgacgttcaccatgatgtcgaaggtgccgacatgctgggtcagttcgagcggctggcgcacgaccatgcggccggtctcgcgcgagaagaaatcgtcgaccggcttgtcgttcacgacgaacttgccgctgccggacttcatgaacacacgcgccaccgcagttttgcgacgaccggtgccgtagtaatagttggctgccatgtcttattcctgtccgatttccagggctttgggctgctgcgccgagtgcggatgatcgccgccggcatagcacttcattttcttcagcatcgcgtagcccagcgggcccttcggcagcatgcccttgacggccttttcgaggacgcgtgccgggaagcgctgctgaagcttggtgaagttcgtttcgtagatgccgccgggaaacccggtgtggcggaagtacttcttgtcctgcgccttgttgccggtgacgcgcaacttctcgacattgacgacgacaatgtagtcgccagtatcgacgtggggcgtgaattcgggcttgtgcttgccacgcaggcgacgggcgatttctgtagccatgcggccgagcaccttgtccgtcgcgtcgacgacgaaccagtcgcgcttgacttcatgcggtttggcggaaaaggttttcatggtgttcctcaacttcactcgcccggcccaaggaagggaaccggtgctttgcggaaagccgcgcattgtattaggaatcttcggcacatgtcaaacccggatggcacacagcgtaaaatcgcgattttgtatctgaggagacatccaatggaatgcaccgttcgctggcacgagggcatgagctttgtcgccgaaaccggcagcggccacatggtcgctatggacggagcgcccgaggcgggagggcgcaacctggcgccgcgcccgatggaactcctgctcgcgggcaccggcggctgcactgccttcgacgtcgtgatgatcttgcagcgcgggcgccaggaaatcagcggctgcgacgtcaagctcaccgccgaacgcgccgagtccgacccgaaggtcttcacccgcatcaacatgcacttcgtcgtcaagggcaagaacctgaaatccgacgccgtcgagcgcgccgtcaaactctcggccgaaaaatactgttccgcctcgatcatgctcggcaagaccgccgcgataagccacacctgggaaatcgtcgcgggctgattcccgccaggccaagacgatacgcggcgccttgtcggactcgacgaccagcgcgtcgatcacggcaaatgccgctttaatgcagggcgtataatccgtgtgcctattccttttcgggagacttcccatgaaaccccgtaccacggtcgccctcgcgctttttgcagccaccctcgccgtccaggccgctccgaacatgcaggccggtctttgggaagtcactacaaagatggacatgcccggtctgcccgccggcatgggccagacaaccgtgcgccagtgcgtgcgccctgccgacctcgaagacccgaaaaagacgataccccaggacgacaagtgccaggtcaaggattaccggctacagggcaacaccgcaagttggcgcatcgaatgcaagggcaagggggcgatgaccggcagcggcaccatcacctatggcggcaacagttactcgggcacgacgaagatgagcatcaaggaaggcgggcagagcatgaatatggcccagaccttttccgccaagcgcatcggcgactgcaagtagcgatcacttcgcatcggggtgcttgccccgtttcagcgcatcgcgcccttcttccggattgccgatgggcgccgtgctcgggcagaaatagtctcggttcaatgcggcatgatgccggttgaccggcttgttctcgatcggtttccactcgcttgcccgggccttggcccaagtgccgtcggcgcggcccgaagcgtagagccggtattccatcgcgccgcagcggatgccctcgaagctgacgttggtggccccgcccgccgtcttgacgaccagcgcaaagcgcaccacgccgtcggtgccgacgctgatcgacttcgcatcgacgaagaaacgattgggcgtcacggcgctgacgtaaaactccaggagatcttcgtccttgggaaacgccggcagcgtcgcctcgctctcctgccacttcggctcgtccggatcttcttcccacttgcggaaaccgatgtcggcataggccgattgcagtcccagcagcagcatgaaaaagaaagcatagcggcggcacatggcgttcaaccggtgtgcccctgagcctgccagcgcggcttgcggtccgccggatgggcaaagatcaggcgcgccagttccgtcagtgccatttcgtaaacctcgcgcttgaattcgatcaccgcatcgagcggcacccagtactcgttccagcgccaggcgtcgaattccggcttgtccgtggcgcgcagcgagacatcggcatcgcgccccgtcaggcgcaacaggaaccagatctgtttctggcccttgtaggtatggcgccactcgcggcggatccaatgcttggggacgtcgtagcgcagccagtcgcgcgtgcgccccagaatgcggacatgctccggcaacaagccgatctcctcgtgcagctcgcgatacatggcctgttcgggcgtttcgcccttcttgatgcccccttgcgggaactgccaggaatgttcgcgaatccgtttgccccagaagacctcgtttcggctgttggccaggacaatgccgacgttcgggcgatagccatcacggtcgagcatgatgatgcaaccttcgaatatatgattgccgatcattgttccataaaccgccgtcgcgtggaaagcggcggcgcggcggtaaaatggcctcttttctccgcacgggacgaagccacatgcgcgccagccagtttttcatctccacgctcaaggaagctccggccgacgccgaggtcgtcagccagaagctgatgctgcgcgccggcatgatccggcgccttgccgccggcatctacacctggatgccgatgggcctgcgcgtggtgcgcaaagtcgagaagatcgtgcgcgaggaaatgaaccgcgccggcgccatcgaactcttcatgcccgccgtgcagcccgccgaactgtggcaggaaaccggccgctgggagaagtacggcccggagctgctgcgcttcaaggaccgccatcagcgcgacttcgtcatcggcccgacccacgaggaagtcatcaccgacctcgtgcgccgcgaaatcaagagctaccgacagttgccgaagcacttctaccagatccagaccaagttccgcgacgagatcaggccccgcttcggcgtcatgcgcggacgcgaattcaccatgaaggacggctattccttccacgcctccttcgaggatctggagcgcgaataccgcaacatgtacgagacctacagccgcatcttcgcccgcctgggcctgcagttccgcgccgtcgccgccgacaccggctccatcggcggcaccggctcgcacgagttccacgtgctcgcagactcgggcgaggacgcgatcgccttctgtccggattccgattacgcggcgaacgtcgaactggcggaggcgctggcacccgccgcaccgcgcgccgcgacggtcgaagccctggagaagaaatcaacccccggcaagatccgctgcgaagacgtcgccgaattcctcggcagcgcgctgacccgcacggtcaaggccatcgccgtcatgcaccagcagggagaaatgagcgagttctcgctgctgttgatccgcggcgaccacaacctgaacgaaatcaaggtcaacaagctgcccgggctcgatcccttccgcttcgccaccgatgccgaggtggaacagttcctcggctgccgccccggctacatcggcccggtgggggtcgatcgcagcaaggtccgcgtcatcgccgaccgcaccgtcgctgccatggacaacttcgtctgcggcgccaacgaggccggcttccacctgaccggcgccaactggggccgcgacctgcccgagcccgacttcgtcgccgacatccgcaacgtcgtcgccggcgacccctcgcccgatggcaagggtgtgctcgacctctgccgcggcatcgaggtcggccatatctttcagctccgcacgaggtatgctgaagccctcaagtgcgccttcctcaacgagcagggcaaggaacagatcatggaaatgggctgctacggcatcggcatcacgcgcatcgtcggcgccgccatcgaacagggcaatgacgacaaaggcatagtcttccccgccgccgtcgcccccttcgaactcgtcatcgtgccgatgggctggggcaagtcggcggccgtgcgcgaagccgccgaaaagctatacgccgagcttgccgccgccggcatcgacgtcattctcgacgaccgcgacgaacggcccggttccatgctcgccgactgggagctgatcggcgttccccatcgcgtcgtcatcggcgagcgcggcctcaaggaaggcgtcgccgaataccagggccggcgcgacgccgaggccgccaagctgccgctcgccgacgtggcggcccacgcccgcgcaaaaatatgcggctgaaattctggctcgccgtcgccgtcctggcggctaccggccaggcctgggccggcgcccagaaatacgaaccgctcgcggccagcatccaggccgcgctgcacgccgcggttgccgaccgcgcctcgccggaaccgaagtttccgcacatccaggagaaaatctcctggctgaccgaaatgtcgcgccgcctggagaagcgcattcccgaccgccaggggcggctcgaattcctcaagaccgtctattacgaggcgcagcgggccggactggaaccgcaactcgtgctcggcctgatccaggtcgaaagcggtttccacaagtacgcggtgtcgtcgtcgggcgcgcgcggctacatgcaggtgatgcccttctgggtcaagctcatcggcagcaaggacaacaacctgttccacctgcgcaccaacctgcgctacggctgcacgattttgcgccactacctggacatcgaaaaaggcgatctcttccgcgcgctgggccgctacaacggcagcctgggccaggccgagtatccgaacatggtgcgcggggcgtgggaaaagcagtggggatgggggccgcgggtgattcaggcagcgcgatgaggttgggcttgccgggtctcgccccggcgggcgagttactttcttgtcacgccacaagaaagtaaccaaagaaacgcgccccgccgccccggccctgcgggctaccctcgctccaaaccgccagcccggccggccgctaaactcgctgcgctcagacaacgcggccggactgccccggtctggcggtcctccgctcggcggggcagagggggatcatcgcaaggcaaaaattaaaaaggcccgacaggcaagcctgtcgggccgggttcggtacgtcgcccaaaggcgactaccttattgcagcaacggctctcaccccggaaagctacaatgacgccattctatccaaaagggatggcgccatgcaaacgaaaaacctgccttacacgctgggcctcgacatcggcatggcctcggtcggcgcggccctcctgctccccgatcaggagcgcatcctggccttgcatgtccgcaccttcgacaaggcggaaacagccaaggaaggcgaatccctcaacaagatacgccgcgattcccggctcacgcgccgccgcatccgccgccgcgcgcatcgcctggtacgccttgcgcgcctgatgaaacgtgtcggcctgattgccgacgccaatccggaagccttcgccctgcccggcgtatcgccctggcacttacgcgctgacggcctcgaccgactgctggagccgaaggaatgggctggcgtgctctatcacctcgtcaagcatcgcggctttcagtccaaccggaagtccgaagccaaagccgacgaaaaggccgggcagatgctctccggtgtcgggcgcaatcaggcactgctcaaggaggcgggctatcgcaccgtcggcgagcttgctgcccgccacgaggattttaaggaggccaagcgcaacaagggtggcagttacagtcacaccttcgctcgcgccgacctcaacgccgaactgaatctgctgttcgagcgccagcgtgcactcggcagccgcctcgccagcgctgactttcaggaaaatgttcgcgatctgctgatggcgcggcgacccacgctttccggcgccaacttgctcaagatggttggcaaatgcactttcgagaagagcgaagaccgcgcgcccaaggccggctaccgcgcggaacgctttgtctggctgggcaagctgaacaacctcaagatcgtcggcagtggcgacgcccgcccgctgaccgatgccgagcatcgcatcgtcatcgacctgcctttcacgcaggccaagctcaccttcaagcaagtacgcaaggcgcttgagcttgaaacccatcaacgtttcaacctgctgtcctatcgtcccgatccgaagggcaaggacaaagacccggaagaaagcacgttctttgaggcgaaatcctttcacactttgcgcaaggcctacgaaggggccggcctcaaaaaagaatggcagcgcgatgcgctcgaccccgaccggctcgatgcgctggcctatgcgctcacctgctacaaggatgacaccgagagccgccagtggctggtcgcgcaagggatcggaacacccatcatcgaagcagttctggccgaatccttcgacaagttcattcacctgtcgcaaaaggcgctgaaggccatcctgccgcacatggaagccggccagcgttacgacgacgctgcgaagtcggccggttacgatcacagccagcccgatgccggtaccggcaagcgggcaacgctgccgccacccgacaaggacacgatccgcaacccggtggtctatcgcgcgctcaatcaggcccgaaagctcgtcaatgccatcgtcgccgaatacggtccgcccgccgctgtgcatatcgaactggcgcgcgatctatccaagcccattgatgagcggcgtgacatcgaaaaaggacagaaggaattccaggcgctcaaggaaaaacttgccgcggcgtttgaagaaacgttccaccgaaagccgagcggactggatttgttgaagtaccggctcttcagggaacaattggatcagtgcccctattgccagaaagcgctcgtcgtcgaccgtttgttcgagcctggctacgcgcagatcgaccacgccctgccctattcgcgcagcttcgacgacggcatgaacaacaaggtggtcgtccatgtcgcctgcaaccaggacaaggggaaccgaacgccctacgaatttctcgacggtgccggcgacagcgaacgctggcaacgcttcgtcgcctgggtgcagggcaacaaggccatccgccaagcgaagcgcaaccggctgctgcgcgtcaattttggtactgatgaagcgaaggaatttagcaagcgaaatctcagcgacacgcgttacatctgccgtgaattcaagcgcaccatagaaacgcaatttgcttggcattccgacgccgaaggtaacgagcgctgtgtcgttctctccggccaactcacctctctgctgcgcgcccgctggggactcatcaaggtgcgcgaggatggcgacctgcatcacgcgctggatgtcgccgtaatcgccgccgccagccgcagtctggtcaaacgcatggcggactattcacgacgaaatgaactggaaatggtgcgcaaccgttatgtcgatccggcgacgggcgaggtcgtcgatgttgctgcgctacgtcagatcgaagatcatttccccaaaccctggccgctgtttcgcgaggaactgctggcacgcctggcacccgaacccaagctgcaactgacctgcgtatccagctacgacgaaggcctgcgcgaaagcatccgccccatccgtgtctcgcgcgcgccgacgcggcgcggcctgggcgcggcgcaccaggagacgatccgctcgcttcgggatggcagccagtcggcaatcaagacgccgctgcgcgacctgaacctgaaagacctggaaaacatcgtcggcttcgagcgcgacactgcgttgatcgacgccatccgcacccgtctcgaagctttcggcggcgaaggcaagaaagcattcgacgacaagcagccgccgctgcgcaagccctcgaaagacccggataaggccccgatcattcgcagcgtgaaactgctcgtcacgcaaaaaagcggcatcccgattcgcggcggcatcgccaacaacggcgccatgctgcggtcggatatttttaccaaagcaggaaagttctacgccgtgcctatatatgtcgcggacgcggttcgtggtgaattgccgcaccgggcggttgctcaagcaaaaccggaattggagtggccgatgatggacgaaagctaccagtttctgttcagcctgcatccgaatgactggatgaccattcgattaaagaacgaagtacgcgaaggctactacgcaggcttggatcgagcgactggaaatataagcctctggctacatgaccgtaaccagaatgttggacaaaaaggactgttgacaggcaatggcatcaaaaccgccctcgccgtcgagaaataccacgtcgacctcctcggcaagctgcatcgtgtgcacaaggaagaacggcagccgatccacatcaagccgggcaagaggtaagtcgtgggctggcgtagcgtggtcattgccaatccggcggcgctgacgctggaggatcgcgcgcttacgattgtgcaaggcaccaacacggcgcgcgtcatgctggaggacatcagcgtgctggtgctcgaccacgcgcagatcagcctcaccgcgccactgctgtccgcctgcgccgaagcgcagattgccgtgctcaccgtcaacgcctcgcatctgcccaatggcgtgctgatgccctatctgccgcacagccgggcgctcaaggtgatgtcggcgcaactggcactgggccagcccgccagaaaacgtctctggcaacgcatcgtgcggttcaagatttccaaccaggcggccatgctcgaccgcgcagccaagaacgacgatgcgcgccgtctgcggcaactcgcccgcgacgtgcgctcgggcgaccccgacaactgcgaggcgcaggcagcgcaaatctactttcgcggcctgttcaatccacaattccatcgcggccagacgcgcttccataacgccgcgctgaactacggatacgccgtggtacgcgccgcgattgcccgcacgctcacgggctacggcttcctgcctgcttttgggctgttccaccacagcgagcagaacgctttcaatctcgccgacgacctgatcgaaccctaccggccgctggtggatgccggcgtgctgactcactacccggaggagcccgaccgcgatctggaacccgccgacaagggccggctcgtcgctttgctgcatgaggatgtaacactctccagccacggcgccagtagcgtcgatggcggccgctgcaccctgctcgcggccatcgaggcgaccgtgtccggcctgtccggaatcgtcctgcacgacacaccgcatgaacgcctggcgctacccgaactggataccggtacggcaccagccgatgatcttgacgacgacgggccatgagcgaagcgacacgccgttatatgcgcctgctcgtcttcttcgacctgcccgtcaccacccgcgagaagcggcgcatctacaccatcttccggcgcttcctgatccaggacggctacgacatgatccagtggtcggtgtatggccgtatggtgaatggcgtcgacgacgcggagaagcacctgaaacgactcggcgacaacctgcccaaggagggttcgatacgctgcctgcaagtcagcgaaaagcagttcgccaacatgaagctcctggtcggtacgaaaaatttccaggaaaaaaaggtcaatgctgaccagatgctacttttctgagatcaaaaaaactgccccgaatccaactccaatcaagaccagagcgggattcggggcgacctattgtagctttccggggtgagagagggagctacaaccatcagccaccaagcgcggcagcaggccggattgtagctttccggggtgagagagggagctacaactgacgatgggccgccgcccttcacgctcgaattgtagctttccggggtgagagagggagctacaaccgcagatgcgcgcacaggccgaagccgagaattgtagctttccggggtgagagagggagctacaactgacggcgccaaggaagaaaagctgctggcattgtagctttccggggtgagagagggagctacaactccggaggcgccgggtaaatcgctgaagaaattgtagctttccggggtgagagagggagctacaacctcatggttggaaggtatgccaaaaccctggcataccttccaaccatgaggttcttgcttcgcaaggtcagcaggaagtcggctaccaaactggcagcgaagttaacaaccgcacgtcatgatacataaagggctgtggatcgtcggaggtactcgtaaaacagaaaaccttcaacccgcgcgcccttcccctctgcaccgccgagcggaggaccgccagaccggggcagtccggccgcgttgtctgagcgcagcgagtttagcggccggccgggctggtggttcgtagcgagggtagcccgcagggccggggcggcggggcgcgtttctttggttcctttcttgccgcgcagcaagaaaggaactcgcccgccggggcgagacccggcaagcccaacctcatcgcattcccggcagcatccccttcatcccccgcatcatcttcgccatgccgcccttggaaaactgcttcatcatcttctgcgtctgctcgaactggttgatcaagcgattcacttcctgaacctgcaccccggccccggcggcgatgcgccgcttgcggctggccttgatgatctcgggcctggcgcgctcgcccggcgtcatggaattgatgatgccctcgatgcgtccgatcgacttgtcgtccggcccgctgcccgcctgctgggcggcaccggcgaactgggccggcagcttgtcgagcaggccggcgacgccgcccatcttgcgcatctgcgcgatctggtccttgaagtcgttgaagtcgaagcccttgccggacttcatcttcttgacgaattcctgcgccttgtcctggtcgacgccgcgctgcgcttcctcgaccaggccgaggatgtcgcccatgccgaggatgcgcgcggccatgcgctcgggatgaaactcctccagaccgttcagcttctcgccgataccggcaaacttgagcggcttgccggtgacatggcgcaccgacagcgcggcgccgccgcgggcgtcgccgtcgagcttggtcaggatcacgccggtcagcggcagggcctcgttgaaggccctggcggtattgacggcatcctggccgagcatggcatcgacgacgaacaggctttcgatcgggttcagcagcgcgtgcagttccttgatctcggccatcatcgcctcatcgatggcgaggcggccggcggtgtcgacgaagagcacgtcgaaatagtgtttcctggcgtaatcgagcgccgcggcggcgatctcggccggcttctggccgaccgccgaagggaagaactcgatgccggcctgggccgagacggtcttcaactgctcgatggcggcgggccggtaaacgtcgcacgagaccgccagcaccttcttcttctgccgctccttgagccacttgccgagcttggcggtagtcgtggtcttgccggcgccctgcaggcccgacatcaggatgacggcaggcggctgggtcgccagattgaggccgacggcctgcccgcccatcagttccgtcagctcgcgatgcacgacgccgaccagcgcctggcccggcgtcagcgagccgacgacctcctggccgaccgccttttccttgacgcgggcgatgaagtccttgaccaccggcagggccacgtcggcctcgagcagggccatgcgcacctcgcgcagcatctcctggatgttgtcgtcggtcaggcgggcctggccgcgcaaggtcttgacgaccttggcgagccgttgggtcaggttatcgagcatggcgggggaatagggtagacttgcgggatgcccccgattctactgcatctcgccgcggcagccctgtactcaggactggcgattctgttctggcgcacgcgctggcgcggcccggtactcgaccagccgatccggggcatcgcgccctgggaacgcgccttgctgctggtcgcggtcatcctgcacggcatcaccctggccggtgaaatattccccggcgatgctatgcgtttcggcttttcggtcgcgctttccatgatcctgtggctggcgatcacgctctactggatcgaaagcttctacgcgcgcatggacggcctgcagatgctgggcctgccgctcgccgccctgtgcgtgctgctgccgccgatcttccccggccagcacctgctcgccaatgccggctcgaccgtcttccgcgcccatttcctgatggccatgctcgcctacagcctgttcaccctggctgccctgcacgccatcctgatggcggtcgccgagaagcgcctgcatcgcggccgcctctcgccactgctctcgggcctgccgccgctgctgacgatggaggcgctgctgttccggctgatccacatcgcctttttccttttgtcgctgacgctcgcttccggcatcctgttttccgaaaccctcttcggcaagccgcttcccttcaaccacaagacggtgttcgccttcacctcgtggctgatcttcgctgcgttgctgacgggccggcacctgcgcggctggcgcggcagaacggccctgcgctggacgctggccggcttcggcgccctgctcctggcctatgtcggcagccgtttcgtcctggaagtaattctcggccgcgcggcctgatagcacggcatggacgaaatcccggtttcggcgctgtcgctcgtcctgctgctgctgctgatcgtctccggattcttctccctggccgagaccagcatgatggctgcgaaccgctatcggctgcgacacatggcggcccaggggaaccggggtgccaaactggccctggatctgctcgggaaaaccgacaagatgctgggcgtcgtcctgctcggcaacaacctgctcaacgccgcggcggcgaccctggtcagcgtcatcgcgatcgaactgttcggcgaggaacaatgggcgctcggcatcggcacgctgctggtcaccttcgccatcctggtgatctcggagatcacgccgaagatcgtcggcgcgacccatgccgaccggctggtcggcgtcgtggcgttcctgctttggccgttgttgcgcatggcctacccggtggtctggttcgtcaacctgttcgcccaggggctgctttggctgctgcggctcaggcccggcgccgacagcggatcgccgcgcctgacccaggaggaactgcgctcggtggtactcgaatccagccacctggttccgacccagcaccgcgccatcctgatcaacctcttcgatctcgagcacatcaccgtcgatgacgtcatgacgccgcgcggagaaatcgaggccatcgatatcgaagccccgctcgaggatatccgttcccagctcgccaccagcttccacacccgcgtaccggtgttcgcgggcgagccgggcaatgtcgtcggcattctccaccagcgccgcctcctgtcttccgcgctggccggggagttcagccatgaagcgctacgcagcgaactcgccgagccctatttcgtcccgtcgggcacgggcatctacgcccagttgcaattcttccgcgacaaccgccagcgcaccgggctggtggtggacgaatatggcgagctgctcggactcgttaccgtcgaagacatcgtcgaagaaatcgtcggcaagttcacgaccggcatgccgggcaacgccgccgccgcgtcgtgggacgaggacggcgcggcgatggtcgacggcagccacagcctgcgcgaggtcaaccgcgtgctcggccttttgctgccgctggatgggccgaaaaccctgaacgggctgatcatcgagcatttgcaggacatccccgaagtgggtgtcgggctcaggatcgcgggggtggcgatggaaatcgtgcagaccgaggatcggcgcatcaagacggtgaaactttaccggccggccgctaccgattgaccgacgtctttacaaaaccccgcatggcgggcatcatcgcccgatacatgcagcatagcagccgatagcggcgtgttcgccgccataatcgattcagggaaagcgtatggcctcagccgacaaagcggacaagaaaaaatccgggcccaaggagtccgtcttcgcctgggaaggcaaggacaaggcgggcaaggccgtgcgcggcgagatgcgcgcgatgacagagaccgtcgtcagcaccacgctgcgccgccagggtatcctgccgctcaagatcaagaagcagtctttcaagggcggcggcaagatcacggaaaaggacattaccctgttcacccgccaactggcgacgatgatgaagtccggcgtgccgctactgcaatccttcgacatcgtcggcaagggccattcgaatcccgccgtcgccaagctgctgatggacatcaaaaccgaggtggaaaccggctcagccctcaatcaggccttccgcaagtacccgctctacttcgacgccctgttctgcaacctggtggaagcaggcgaacaggccggcattctggaggccctgctcgaccgtcttgccgtctacaaggaaaagacgctgaagctgaaggcgcagatcaagggcgccctcttctaccctatcgccatcctggtcgtggctttcatcgtcacggcggtgatcatgattttcgtcgtgccgcagttcaaggaagtattcaagagcttcggcgccgacctgccggcgccgaccctcgtcgtcattgccatgtcggaattcttcgtcgcctactggcacatcattttcggcagcatcggcggcggcattta

SEQ ID NO: 2899 - DNA, 19579 bp, synthetic construct
  variation 3252..3253: note = note, n is a, c, g, or t
  variation 759..760: note = note, n is a, c, g, or t
  variation 17422..17525: note = note, n is a, c, g, or t
  variation 8833..8834: note = note, n is a, c, g, or t
  variation 18651..18698: note = note, n is a, c, g, or t
  misc_feature 1..19579: note = Synthetic
  variation 18120..18121: note = note, n is a, c, g, or t
  source 1..19579: mol_type = other DNA
  variation 1139..1140: note = note, n is a, c, g, or t
gacttgtccgacacgctgatcaaagcgcgttcgattttcatttgttactcaaaagttggagaaacccttgaacaaagaggacatgaatacaagaggaaaggcaaaacaaagcaattactcctgtcctcttgtcccccttgttcatgttttggtttttaattgctcagtcgctcaggccgtgctgcttgagcttcttgcgcagggtgttgcggttgatgcccagcatctcggaggcgcgggtctggttgccctcggcgcggtccatgatataggtcagcaggggtttttccagtgccagcacggccatttcgtaaatgccgaccggatcttcgccgtccagatccttgaaatagcggttcaatgacttgcgcacacaagccgcaagctcgttttcttccatcaagatacttctccctaggcggccagttcgactggctcggtttcgtattgcagagtgttgctggcgcgggcggcctgggaaaagaactcgtccacgctgtccagttgttcctttacggtttccagatggttcatgcgatggcggaagctgctggcgttgatcagccccttcgtgtaccaggaaatatgcttgcgcgcgacgcgcaggccggtgtgctcgccatagaacgcgtacaaatcttcgagatgtgccttcaaaatccggtggatttcggcaacctgcggcggcggcagatggcggccggttttcaggtaatggtcgatctcgcggaaaatccacggccggccctgcgcggcgcnncggcgcggccgatcatcacggcgtcggccctggtgtagtccagtacgaacctggccttttccggcgtggtgatatcgccgttggcgatgacggggatgttcgcttcggccttgaccgcggcgatggtgtcgtattccgcatcgccggtatagccgcaggcgcgggtgcggccgtggatggccagcgccttgatgccggaaccttcggcgattttcagcacattgagcgcgttgcggtgcgaacggtcccagccggtgcggattttcagcgtcaccggtacttccggcacggccgtcaccacggcattgaggatttcttcgaccagcgcctcgttctgcagcagggccgagcccgccatcacgttgcacaccttcttggnnccatgttgatgtcgatgatctgcgcgccgcgctcgacgttgtagcgcgcggcttcggccatcatggccggatcggcgccggcgatctgcacggacttgggctcgacttcgccctcgtggttggcgcgacgccgggtcttgctgctgccgtagagcagcgagttcgaggtcaccatctcggacacggccatgcccgcgcccaactgcttgcacagctggcggaacgggcgatcggtcacgcccgccatgggcgcgacgatcagcttgttcttgaggaggtgggggccgatacgcatagggggtggaattttaccccggctggcatggcgatgggaaactgatcgcgtattttttatgcaattgctttacgcgatcaatatttttttgtgttacaaagctaccatccaaatccaaccacaacgggaggcgccatgggttttatttcggaattcaaggaattcgccgtcaagggcaatgccatcgatcttgcgatcggcgtcatcatcggcgcggccttcggcaagatcgtgtcatcgatcgtcgacgacctgatcatgccgctcgtcggcgccgtttccgggggcttcgatttcagcaacctgttcatcgcgctgaaggacgtgccgcccgacgtcgccatgaccctggccgaagtgaaaaaagccggcatcccggtattcgcctacggcaacttcctcaccatcctgctcaatttcatcatcctggcgctggtgatcttcgtcatggtcaagcaaatcaaccgcctgaagaaggaagccccgccgcccgcacccgccgcgacgccggaagacattctgctgctgagggaaattcgcgacaatctgaaaaaataatttatcccctcgggcgggcgttgccattaggcaacgtccgcccgtcgtttcgtaccgccgctcattgtccggcggggaaaccggctcgcgattgcctagaatgggcaaagcatgggcttttcggagcgcggcatgaaaaaacaattatttgtcctgggccttgctgtcctgctggccgtcggcgcacaggccgccgaagcgcctgacagggcatggggattgctattgggcgggagccgggtcgacagcgacatgagcggcaacaaggatgacgaaatccaccccgtcatcggcatccgctattcccagcgcctgggcaccgccaccaattttttcggcgacctcacctataccgatgtcgacggcgatcgccccggggtcggcgacggctcgatcaccacgctgcgcggcggcatggaatggctgttttacaccaggcccgattacagctggtttgtggccggcggtgtgggggcaaccaatgtctacaccgaggacggccccgactttacccgcccgctgttgtccgtgggcgtcggccagtcctgggcggcgggctccaacgacgccttccgctgggaaatccgcgccgaccagtccttcggcaacgactccctgcccaatgacggcctgaccaattaccaggccatcttcggttatacctggggcatcggcgcgccgctggacagcgatggcgacggaataccggaccgccgggacgagtgtccgcaaacccccaagggcagcaaggtggatatgaagggctgccccctgtaattcacgcaaagaacggaaacaagccgccttcagtgcgcggcttcccagttcggcccgctgcctacttccgccctcaacggcactttgagctgcgccaccccggccatgagttcgggcaggcgcgtgcgcacttcttcccgttcgctttccggcacttccagcaccagctcgtcatgcacctgcatgatcatcctgcttcgcaggcttccggtatccagccagccctgcaccgcgatcatggacagcttgatgagatcggcggcggtgccctgcatgggcgcgttgatggcggcgcgctcggcgccctggcgacgggcgggattcctggaattgatctcgggcaggtagaggcggcgcccgaacacggtttccacgaaaccttgcgagcgcgcctgctcgcgcgtgcgctgcatgtagtcggccacgccgggatagcgcgcgaagtagcggtcgatataggcctgcgccgcgctgcgttcganncatgccgtagatcaggccgaagttgatgaccttggccatgcgccgctggtccgaactcacttcgtcgaggccggtgccgaacacctcggaagcggtcgcggtgtggatgtcgcggtcctcggcaaaggccttgagcaggccctcgtcgccggagaggtgcgccatgatgcgcagctcgatctgggaatagtcggccgacacgataaccgagccctgcggcgcgataaaggcctcgcggatgcggcggccctcctgggtgcgcaccggaatgttctgcagattgggatcggaactcgacagccggccggtgaccgcggtggcctgcgaatagctggtgtgcaccctgcctgtgctgcggttgatcatctgcggcagcttgtcggtgtaggtggacttgagcttggccagcccacggtattccagcagggtcttgggcagcggatagtcggcggccagggtttccagcacctcctcgtcggtggagggctggccgctcggcgttttcttgatcaccggcagcttcatctcggtgaaaaatatttcctggatctgcctgggcgagttgaggttgaacggatggccggccagctggtaggcctggttctccagcttgagcatggcctcgccgagttcgcgcccctgcgctgcgagcttgtcgcggtccagcagcacgccgttgcgctccatgcggaacaggatgtcggccaccggcagctcgatggtttcgtacacatgcttcaaacccggcgcgcgttcgatttgcgggtacagcgcatcgtgcacgcgcagggtcacgtcggcatcttcggcggcgtaccgggtggcggtgtcgagatcgacctggtcgaagccgatctgcttggcgcccttgccggccacgtcctggtaggtgatgaccgacaggctggtgaagcgcgcggccaggctgtcgagatcgtgcggcatgtgcgactcggcgacgtaggactccagcagggtgtcgtgcgcgatgcccttgaggcggatgccgtggttggccagcacatggcgatcgaacttgaggttctggccgattttctgcggccgttcgttttccagccagggtttgagcttggccagcgcagcctcgcggttcaactggtcgggcgcgccgggatagcggtgcgccagcggcagataagccgcctcgccttcggtcacggcgaaggacatgcccaccagttgcgccgtcatcgaatccagcgccgtggtttcggtatcgaacgcgacctgttcggcctggctgattttttccagccaggtgtcgagctgcgcctcggtaaggaggcattcgtagccggcgcggtggtcggcatcggcggttgccgcgacggtcgcgttttccggcgtttcatccgctgcgccctgtgactgctccgatgcgcgcaattcgcgcagccaggtgcggaagtcctggttctcgtagaaggccagcagcttttcgcggtcgggcgcctttttggtaagcgcttcgggctcgaaggcgagatcgacatcggtcttgatggtgacgagcttgcgccccgtgggcagccagtcgagcgccttcctgaggttctcgcccaccacgcccttgatctcatgggcgcgtgcgacgatgtcgtcgaggctgccatattcggacagccacttgacggcagttttcggcccgaccttttccacgccgggcacgttgtccacgctgtctccgatgagcgcgaggtaatcgacgatgcgcgtcgccggcacgccgaatttttcctgcacgcccttttcgtcgagcacttcgttgctcatggtgttgaccagggtgacgtgctcgttcaccagctgagccatgtccttgtcgccggtggagacaatgctcttcacgccgtgcttttccgcgtgcctgaccagggtgccgatgacgtcgtcggcctcgacgccgtcgacgatgacgagcggccagcccagcgcgcggatgccttcgaacaggggttcgatctgcaccgccagatcctcggccatgggcgggcggttggccttgtattgggggtaccattcatcgcgaaaggttttgcccttggggtcgaacacgcaggcgatataatcggccgggtaatccttttccagcttcttcagcatgttgatggcgccatagacggcgccggtcggctggttgtggcggttgcgcaaatccggcagggcatggaaagcccgatagaggtaggatgagccatccaccagcagaagggttttttgggcttcgttcaattcgaaggaaatttctgtgaacaaaaacaagttgcctgaactcgccgatccgcgcgacacggcggaaatcgattactcggcccgcgaatcctggcggctgttcggcattatggcagagttcgtcgaagccaccgaacgcctggccgagatccgcccggcggtatcgattttcggcagcgcgcgcacgccgcccgaccatggctattacctattgaccgaacagctcgcgcgccagctgtcggatgccggcttttccgtcatatccggcggcggccccggcatcatggaagcggccaacaagggcgcctatttcggcaagtcgcccagcgtcggcctcaacatccagctgccgcacgagcagcgcagcaaccctttccaggacatcagccagacttttcaccatttcttcgcgcgcaaggtgatgttcgtcaagttcgctgccgcctacgtggtcatgcccggcggtttcggcacgctggacgaactgatggaggcgctgaccctggtgcagaccggcaagacccgcacaattcccatcatcctggtcggctccgagttctgggcaggactgctggactggttcaagacgtgcctggtgaaggaaggcatgatcgacccgcgggacatgaacctgatccaggtcatcgaccagccggcggacgtggtcgaggccatcttcagtcactacgaaaaacgcggcttcacgccgaccatgagcgaacgcgaaatccagctcaatctgtaagctgccggcgtttttgggctattttgaaagtagaattgccaacggacatcaaccatgaaaaaaaccacgcaaacccttctcgccgtcctcatgctggccagcctgcccgccgttgcggcagacaaggcgccggcgccgcctgccggcagcaccccggttccggacggcgcccccaagcccggtgaaatcgaagagccttcgatcaccatccgcagccgaggcggcgagcgcatcgaggaataccgcctgcgcggcaagctgtacatgatccgcatcaccccgcccacgggggttccctactacctgatcgaccagatgggacgcggagaattcacgcgtcacgaagggccggcggcgcccaccgcagtgccgcactgggtgttgaaaactttttaagaattaagcagcatgagcgaagaactaccgcgccgcgtaccggcgcgcgccggctttgaatgggtgacgggcgcattcaggctgttcatcaaaagcccgctgatgctgggcgcggcgagcgccatttttctcggcgccttgctgattctccaattgatcccttacgcaggcgctgccctggctgaaatcctcacccccatgctgctggccggtttcatgcgcgcctttcgcgccatcgacgaaggctctgagccggaactgccccatttcgccgccggttttcgcacccatgcggccccgctcgccatggtcggcgcaatctacctcggcatcctgcttgccatcctctggctgatgaaactgctgggggtcgattacccggccatgatgcaggcgatacaggaaggcgccagccccgaacaactggcgcaagacctggaaggcaaaggcgccttgctgctgttgggcctcgcgctcgtcatcccggcagtcgccgccacctggtatgcgcctgcgctggtgttgttcggcaatgcgcatccgctgcaggccatgggcctctccctcaaggcctgcgcaaggaactggctggcgctgttggtcaacggactggccctgattccggtattcctgctggccctgattcccctgatcggcatgctggtcgcggcacccatcatgctgggtaccgcctacctgggctaccaggcgatgtttgcttacaaggattcaggggctagggactaggggctcacgccgcgctgagcttggcgtactccagcgccagccatttggtgccggcatcgcgaaacctgacttgcacgcgcgcatcgctgccgcgcccttcgaagctcacgatcaccccgctgccgaacttgggatgcgccacgttctggccgatggcaaagccgcctgcgccctggctgccgccgctgtatgcggcgggcgccggctcctgcgcccaggcggcgctgcgcttgttgagcggcagcagcagattctcaggcagctcggacagaaaacgcgacggcaggccatagcgtacctggccatgcagcatgcgcgactgtgcgtgggtgaggtacagacgccggcgcgcgcgggtgatggccacgtacatgaggcggcgctcctcttccagtccgtcggaatcggcgaagctctgctcgtgcgggaacaggccttcttccaggccggtgatgaacacgctgtgaaactccaggcccttggcggcgtgcacggtcatgagctgcagcgcgtcggtgccggccccggcctggtgctcgccggcctccagcgcggcgtgggcaagaaaggcctccatcacgctctggccttcgtcgttaatcggtgtgggcccagcgtttgcctcctcgtcaaatcggtttggacccggcgtttgccccctctccctcagggagagggttggggtgagggcatcggggagagggttggggtgagggcgcgcctccgggtcctgctcgaacagcgcggcggcgttgaccagttcgttgaggttttccaggcggtcctggccgtccttctcgttcaggtagtaatcggccagccccgacaggttgatgacctgctccagggtttccgccagcgacaggccttcgcaggcttcgcgcattctttccatcagcgtgacgaaggcaggcaggcccttggcggcatcgcgcttgcccgcactttgcgcctgcgccgccagccacaggctcacgccgccggatttggccgcctcctgcaaattttccagagacctcgcgccgatgccgcgcgcggggaaattgacgatgcgcaaaaacgccccgtcgtcgtcgggaaagctcatcacgcgcagataagccagcgcgtgcttcacttcctggcgctcgaagaagcgcaggccgccgtagaccttgtagggaatgcccgaggtgaacagcgcgtgttccagcacgcgcgactgcgcgttggaacggtacaagagcgccatgtcggagagcgcaacgccctcgcggttgagcgccttcacttcgtcgacgatgaagccggcctcgtcctggtcgccgtagccctcgaacacgcggatcggctcgcccgccccctcgtcggtccacaggttcttgcccaggcgctcgcggtttttcgcgatcagttcgttggccgcggacaggatgttgccgtggctgcggtagttctgnncggaaggcgtagatcgactggtcgtcgtcgcccaccgcgaacatggccgtggacggcccggcgaagagcttgagccagcggtactgcagcgggttggtgtcctggaactcgtcgatgaggatgtgcttgaagcgcgcctggtaatggttcctgagcggctcgttgcgcgacatcagttcatacgagcgcaagagcagttcggcgaaatccaccacgccctcgcgctggcactgggcgtcgtaggcctcgaaaatttccgccagccgccgcgtgaactcgtcgtgcacctccacgtctttcgcgcgcaggccggcctccttgttgccgttgatgaaccactgcaccttgcgcggctcgtatttctcggtgtcgacgttcatcgccttcaagagacgcttgatggcggaagcctggtcctgggtatccagaatctggaaagcctgcggcagtccagcctcgcggtggtgcgcgcgcagcaaccggttggcgaggccgtggaaggtgcccacccacatgccgcgcgtattgatgggcaacgcggcggaaatgcgcgtgagcatctccctcgccgccttgttggtgaaggtcaccgccatcaaacccagcggcgacacctgcccggtggaaatcagccaggcgatgcgcgtggtcagcacccgcgtcttgcccgaaccggcgcccgccaggatcagcgcggactggtgcggcagcgtcaccgcttcgcgctgttgcgggttgagggagtcgaggaaggaggcggacatggatacaatgcggctaaccaaacagcaattttaccggatgcagccatgatcaacattctctacttcggcagcctggtcgacgccttcgaccgcgcaacggatgaactggacctgccgcccaacgtgcaagacgtgcaaagcctgctgttctttttgagcctgcgcggcgaagtctgggcccgttatcttcgcaacaaccccgggctcaagatcaccgtcaaccgcaagttcgccgaaggcggcacgccggtcaaggacggcgacgagatcgcgctggtggcgctgggataagcgctggctactgaatttaggctatacagtaaaaagaatatgagggggtagaaatacaaagcccgacagaccttgcgatctgccgggcgggttcgattctttcgaatcttattgcagcaacggctctcaccccggaaagctacaacgattccaactataagggaggcaacggtggaaggcaacacccgcaatttgacatacggtttcgacatcggcattgcctcggtgggctgggcggtacttgcgccggatcacattgtggcgctgggtgtgcgcgctttcgacaaggcggaaactgccaaggaaggcgaatcgctcaacctcgcgcgccgcaacgcacggctgatgcgccgccgcctgtatcgccgtgcctggcggcaaaccaaggtggcgcggcttttaaagcgtgaaggcctgatagccgacgcacagttttttcacaaccaattgcctgcgcccgtttccccttggcacttgcgtgtcgaaggccttgaccgtttgctttcgccggaggaatgggcgcgggtcatctatcacctgtgcaaacaccgtggtttccattggataaaccgcgccgaagagaagaaagcgggcgaagatactaaaggcgagggcggcaaggttaaacaaggcctggccgccactagccgaatgatgcaggaaaaaggctaccgaaccgctgcaaaaatggtgatttccgagttcccggacgcccaacgcaacaaacagggaagctatgacaaggcgctctcccgcgcgctcctggcacaggaactggaaatcctgttccagcgccagcgcgagttaggtaacccacacaccggggatgcgtttcaagtcgccattcttggaaatggcgaccgcaaaagcggtctgttctggtcgcagaagcccgccctctccggcgaaaatctgctcaagatgctcggacgctgcacattcgagaagaacgaataccgcgcacccaaggccagtttcaccgcggagcggcatgtctggcttacccggctcaacaacctacgaatcgtggtcgatggcgtcacccggccccttaatgagaatgagcgccggattgcattacccctgccatataaccaagcaggggatctgacccacaaacaattgcgcgccgccctaatcaaagctggcgcaattgataacaacttccgctttgccaagtttccctatgcgcaaagcgctgacggcaagaccaaagacccggaaagtgctgtgctggtgaaactgcctgcctggcaagaactgcgcaagacactaaaggacaagggtcttgaaactgaatggcagaccattgcaggtacggccctggctggcaatccagaattgctcgaccgtatcgcctgggtgttatccgtttacaaggatgacaacgaagtcgaacgcgaactcggcaagctcggcttgccggggaacaaaccaatgattgatgcgttgggagaaatccgcttcgacaaattcagcaacctttccctcaaagcgttgcgcaagatcgttcctcacatggaatccggcatgcgatacgacgaggcctgcgagacagccggttaccaccatagccagttgttcaagctgggcgaaggcgaagaacactatctgccaccgttctactcgggccgtgacaaggacgggcgcatggtgttcaaagacgacacggacatcccccgcaaccccgttgtactgcgagctctcaatcaggcacgtaaggtgataaatgccctggtccgcaaatacggctcgcctgcatcggtgcatatcgagatggcgcgggatttgtccaagcccttcgatgagcgaagatacatcaagaaagagcaagacgaatatcagaaacgcaaccaggaagacaggacgcgttttacagaacattatggccaggcgcccaaaggccaggaattcgagaagtggcggctttaccgcgagcagcagggtaaatgcgcctattccatcgagcctattgacctcaatcgcctgcttgaacccggctacgtggagatcgaccacgccctgccctactcgcgcagcttcgacgacagcaaaaacaataaagtgctggtgctggcaaaagaaaaccgcgataagggtaatgccacaccttacgaatatctggacggggcgaacaacagcgaacgctggcagcgttttgtcgcctacgtcgagggcaacaaggcctatcgtctcgccaaacgcactcgtctgctacgcaaaaacttcggcactgaagatgcgaaggatttccgcgaacgcaatctcaacgacacccgctacatcagcaaatttttcaagaactacgtcgagcgttatctgaaactggcagacgacagcgaatcgaaacgctgcgtggtgctgtccggccagctaacggcctttctgcgggcgcgctggggactaatgaaaattcgttccgacagcgacaggcatcacgctctggatgctgccgtagtggctgcgtgcagccacagcatggtcaagcgcctctccgattacgcacgccgcaaggagctggaagcggtgcgtgagggtttcgccgatctggaaaccggcgaaatcgtgaatcctgccatgtatcagcaattgcatgagcacttcccagacccctggccccaattccgtcatgagatgaaaatccggcttggactggatgaagacataaaagatgacgccaccaagctcaaggcggcaatggaaagcctcggcacttatcagagcgaagaactcgatgcactgaagccattgttcgtttcacgtgcgccacaacgccgcaacagcggcgccgcccacaaggacaccatctatgcccagccgaagtgcctgaaagaccagggcggggtcactcagaaggtcccgctttccagcctgaccctgaaagacatcgacaatctcatcgacccccaccgcaacgagaagctttacgctgccatccgcaaacgccttgaggcccacggcggaaaaggtgacaaggccttccccgccagcaaccctctgcgcaaaccggataagaatggcgaccccaccggccccattgttcgcgccgtaaccctggtgatcgacaagctctccggcattccggtacgcggcggtattgccaagaacgacagcatgctgcgcgtggatgtgttcaccaaaggcggaaagtttcacctagtgccagtgtatgtgcatcaccgcgtgaaaggacttccgtcgcgggcgattgtggcattcaaggatgaatcggaatggacaccaatcgatgacagcttcgatttttgtttctcgttgcatccaaatgatttggtgcgcgtgaccttaaaaaaggaatcgcatcttgggtactactcaagctgcaatcgttccacaggtgcagtaaatctctggtctcatgatcgaaataaggacatcggcaaggatggattgatcgaaagcataggcgttaaaactgctgttgcgctcgaaaaatttcacgtcgatgtactcggtaatatctatcccgccccgccggagataaggcgtgacctggcgtagcgtgatgatctcccaccccgccatactgcggcgggagaaattcgccctgctgatcgagcaggagcaaaccgcacgcctgcctttcgaggacatcgccatcatcgtcctcaaccaccgagaaatcacacttacgcacccggttctttctgcctgcggcgagtacgggatcagcctgttttccaccggccctaaccaccagcccaatggcgtgttcatgccgtttcttccccatagccgcgccacgcgcatgctgcgcttgcaactcgcccttggccgcccggcagccaagcgtgcctggcagaccattatccaagccaagatcaacaatcaggcgatagcactcaagttgaccgacaaccccggcgccgaaagattggagtcactcgcccggcgggttcgctccggcgaccccgacaatctggagtcacaagctagcggactgtattttcgtgccctgttcggcaacagctttcatcgcggtcagccgctctgggtcaatgcggcattggattacggctacgcggtcttgcgcgcagccattgctcgggggctggtggcgcatggttttctgcccgccctggggctgttccatgccaacgaacaaaatgcgttcaatctggcggacgacatgatcgagcccttccgcccattggttgacctgcatgtgttcaagcattgtgccggccacgatgtggacgaactccagcctgccgacaaggcagcattggtgagtttgctgagcgtggacgtgacgatgcctcgcggaacaatgtccgccttgaccgcaatagaacagtcagtggagtctttggcacggctgtatgaaggcagcggcgaaggagcattggaactgccgcaactcatcgggctggcgcagcaccagtatgagtgttgaaacgaggcgcttcatgcggatgctggtttttttcgacctgcccgtagtcaccaaggccgagcgccgcgcctataccgtgttccgccgttttctgctcaacgacggctacgacatgatccagttttccgtctatggccgcatcctcaacggcaccgatgccgaagccaagcacctgaagcgcctgctggacaacctcccgcccgccggttcggtacgcgtactgacggtgaccgagaaacagttcgccagcatgaaactgctggtcggcctgccgctttttcaggaaaaaaccgtcaacgcccagcagattctgctgttctgaaagcaaaaaacaaagccgcaataccgcgctgagacaggctcagagcggcattgcgacttgggtattgtagctttccggggtgagagagggagctacaacgaaggtgcgcacatcgtcccagatcgggaaattgtagctttccggggtgagagagggagctacaacgccctgcgcctgactgaaagacaggttgagattgtagctttccggggtgagagagggagctacaaccgtgttaagcggctttttataggagaacgaattgtagctttccggggtgagagagggagctacaactttccaggtggtgaagggtgtcccgatgatattgtagctttccggggtgagagagggagctacaacgcgctgaaactcacccgccgcctggttgaaattgtagctttccggggtgagagagggagctacaacgccccaattagtctcgccaccagggtcggcattgtagctttccggggtgagagagggagctacaaccgccatccgaatcaacgtacttgaccgacgattgtagctttccggggtgagagagggagctacaacccaagcagtagcgggtttcgttaatgtccaattgtagctttccggggtgagagagggagctacaacaccttcttctcagtacttccgttacgtcgaattgtagctttccggggtgagagagggagctacaactcgttcatgattcgccccctgttcagagggattgtagctttccggggtgagagagggagctacaacgacggtgcgctgcgcaaactcgtcgaaagcattgtagctttccggggtgagagagggagctacaaccgacattgtggccttgcgctcggacgtgcaattgtagctttccggggtgagagagggagctacaacgcggatgaaggcgcgggcgcggtcgatcgcattgtagctttccggggtgagagagggagctacaaccgcggccggcctggggtgcccagcgagtacattgtagctttccggggtgagagagggagctacaacggccgccacgtgcgcgtgcccgccagcgagattgtagctttccggggtgagagagggagctacaacttcaggtgacgctctctatacccggcattcattgtagctttccggggtgagagagggagctacaacgccatcggcatcaacctccgcctgttcctgattgtagctttccggggtgagagagggagctacaactggcggcggaggcgatgccggtatcaatcgattgtagctttccggggtgagagagggagctacaactgcacagcaggattccagtgcgcgtaataaattgtagctttccggggtgagagagggagctacaacaacaaacgccggcctgagttgcgcttccatcattgtagctttccggggtgagagagggagctacaacgctctgcagccaggttgagtgcgcggattaattgtagctttccggggtgagagagggagctacaaccaccttggtgttggtgaggtaggccagccgattgtagctttccggggtgagagagggagctacaacaaaaaaacggggcgtcctgccccgtttttttgttgcgcccctaacggggctgtctgtaagaagctcaggccttgcggctttgctcgatcatcttctcgatcatgggggtgaggatcagctccatggagtagcccatcttgccgccgggcaccaccagggtgttggcgcgcgacatgaagctgttgggaatcatgttgagcagggtcgggaaatccacgccgcgcggatcggcgaagcggatgatgacgaagctctcgtccggcgtcgggatgtcgcgggcgatgaaggggttggaggtgtccaccgtcggcacgcgctggaagttgatgtgggtgcgcgagaactgcggggtgatgtagttgatgtagtccggcatgcgtcgcaggatggtgtccaccgtggcttctgcggaatagccgcgctcggcatgatcgcggtggattttctggatccattccaggttgatcaccggcacgacgcccacgcccaggtcgacgtagcgggcggcatcgatgccgccgtgggcgaccaacccgtgcaggccttcgtagaagaggatatcggtgccggccgggatgtcttcccagggggtgaactcgcccggcttgaggctggtgttcaggcgcttgttgtgctcggccgcctcgtcatcgctgtggatgtagtagcgcttcttgccgttgccggtttcgccatagaccttgaaggtttcctcgatcttgtcgaagtggttggcatcgggtccgaaatgggaaaagtagtggttgcccttttcggtttcggccttcatgcgctcgcggaactccatgcggcccagggaatgcaggctgtcgccctcgatgatggcggcattgatgtcgtagtggcggaagatgttctcgaacgcgcgcttgacgaaggtggtaccggcgccggacgagccggtcaccgcgatgacggggtgcttcttggacatgtgtcctcctgaatgtgggaacaaccgaatttttagccgtgggagtataccccggccgggcaggccctgtcaccgccgggtataatccggtcctttgattcatttggcttttttcgcccagctccgccgccatgcaggaaaaatacgatccctcacaaatcgagcgcgcagcccagcaaggctgggaacagtcccaggctttccgcgcccgcgaagactcggccaagcccaagtactactgcctgtccatgttcccctatccctcgggcaagctgcacatgggccacgtnnnnnnnnnnnnnnnnnnnnnnnnnnnnnnnnnnnnnnnnnnnnnnnnnnnnnnnnnnnnnnnnnnnnnnnnnnnnnnnnnnnnnnnnnnnnnnnnnnnnnnnnctgggaccgcgaaatcgccacctgcaagcccgactactacaagtgggagcagtggctgttcacgcgtttgttcgagaaaggcctggtctaccggaaaaacgccacggtgaactgggacccggtggacgacaccgtgctcgccaacgagcaggtcatcgacggccgcggctggcgctccggcgccctggtggaaaagcgcgaaatccccatgtatttcttccgcatcacccaatacgcggaagagctgctcggcgaactcgacaacctccccggctggcccgagcaggtgaagaccatgcagcgcaactggatcggcaagagctacggcgtgcgcttcgccttcaggctcgccgagaagagcgccctcgcccccagcccctctccccaagggagaggggagttgttgtgggtctacaccacccgcgccgacaccatcatgggcgtgaccttcgtcgccgtggcggccgaacacccgctcgccgtccgtgccgccgagaacaaccccgcactcgcagcattcatcgaggagtgcaagcagggcggcgtggccgaggccgatatcgccaccatggaaaagaagggcatggacaccggnngcgcggtgatggcggtgccggcgcatgacgagcgcgattttggctttgccaagagctacggcctgccaattaaacaggtcatcgattttctcccctctccctcggggagaggggctgggggtgagggcgcattcacgaccgacgcctggcaggaatggtacggcgacaagacccgcggcgtgtgcgtcaactccggcaaatacgacggcctcgcctacgacgctgccatcgatgccatcgccgccgacctgaaagcattgaacctcggcgacaagcaggtgcagttccgcctgcgcgactggggcatttcgcgccagcgctattggggctgccccattcccatcatccattgcgagtcctgcggcgacgtgccggtgccggaaaaggatctgccggtggtgctgccggaagacgtgaccatcaccggccgcggctcgccgcttgccaagatgcccgagttctacgaatgcagctgtcccaagtgcggcagcaaggccaggcgcgagaccgacaccatggacacctttgtnnnnnnnnnnnnnnnnnnnnnnnnnnnnnnnnnnnnnnnnnnnnnnnnccacaagctgatgcgcgacgaaggcttggtcaaatccggcgagccttttacgaatcttttgacccagggcatggtggtcgcgcccaccttctatcgagacggcgcggacggcaagaagcagtggatcaaccccgccgaggtcgacgtgaaaaccgacgaacgcggccgccccgtgggcgccacgctcaaggccgacggccagccggtcaccatcggcggcaccgagaagatgtccaagtccaagaacaacggcgtcgatccgcagctcctgatcgacacctacggcgccgacaccgcgcgcctgttcatgatgttcgccgccccgcccgaccagcagctcgagtggtccgacgccggcgtcgagggcgcctcgcgcttcctgcgccgggtgtggaactacggccacgccttcgtgagcgagatgcgcgccgcgctgcccgccgagcgcaagctcgccgccaacgcgctgcctggggcggccgccgacgtgcgccgcgagatccacacgcatctcaagcaggcgagctacgacttcggcaagcaccagttcaacaccgtggtctcggcggcgatgaagatcctgaatgcgctggaaaaggcacacaaggatctggccgttaccgaccccgccgcacatgccgaagcggccgaggaaggcttctccatcctgctgcgcctgctgtcgccgatcacgccgcacatctgccacgcgctgtggcaggactgcggcttcggtgccgacatcctcgtcgcaagctggcccgaggtcagcgaggacgcactcaagcaggatgagatcgagctgatggttcaggtcaacggcaagctgcgcggcagcatcaaggtcgccgccgatgcgcccaaggccgagatcgaggcgc

SEQ ID NO: 2900 - DNA, 19535 bp, synthetic construct
  source 1..19535: mol_type = other DNA
  misc_feature 1..19535: note = Synthetic
gcctggaaaaatcctgtgcctcgatcgcctccacttgctgttcagacagacgaaggcgatgtgccaccttgcctatattcataccacgcctgatcctcgcatcacgcaatatctgcccgaaaccggaagcggccgtaccacctgttgttgccgcttcagccggatcaccagcctgagcaggcgaatatggcatcgtacctacaggttccgcctgaagagatacagcttgatctgaggtttcaaccggctctgcatcacggatgagatctgatttctgatcacgagccaatccgtctctttcatctaattcattatctttcatgattcaacctgcctgcacgcgattcccgggcttcccgggaatcaggaaaacgcttctgtagctgaaaagcataattggtttctgcattgacgtctccgtttgctcgtgcaatgcgaacagccagccacaaactgcctggagcgggaggatatgtctgtaaataccggttgattgcagcccaggcttttttcacttcaccacgactgaaatccagttctaccagaccaagctgggccaaaggataacccgggcggataaccagagcctcctgaaagtagctttgtgcccgctcgaagtcattctgcttcagaacgcacaatcctgcgttggtataggttctttctggtgtttcatacaagggatcacgcacagccgccatgaaatgaccgatggcctgttctatcccgtcaggttttcgctgacataagaaccagccgaaattattgcgtatatcaggatcgtttggagtgattccaagtccgcgctcaaagttccattccgcgcgatcatcctcctgcagatccatataaaccagccccagcatgttataagccggagcatagtcggtttttttctgcagtgcgatttcagcttcttctatcgctacccgatactggccacggtgatagtactggcccgcaagttcagtgtgaattttggcactttgcaatgcgcgctgcttcagttcctcgggagtcggcttttcctgaaccggtgcatgtccgcaacccgccagccataccagaaatccgagaactcccgttctaattagcctgttcattttgcctgcatgcttacccaacactggatttatatatctccgattatctggcaactgccggctgaccagttccacacccgctcgtccggcgtgtcttgtcacgcacctgccctgccagttgaccgcaggcagcggcgatatcatccccgcgcgttttacgtactgtcgtaacgatacctgcttgcatcagtacatcccggaaattaccgatggcttctgcacccgatcgctcataaccggaaccggaaaaggcgttaaacgggatcagattgagtttgcatggaacgttcctgacgagttgaaccagttctcgtgccagcgccacactgtcattcacgcctttcagcataacatattcaaacgtaataaaatctctcggagcagctggcaggtaacgctcacaggcggccagtaaatctctgatcggatactttttattgatgggcaccagctggtcacgcaaggcatcattcggcgcgtgcagtgaaaccgcgagcgccactggacaacgctcacgcaagcgatccagagcggggaccagtccagatgtacttaccgttacccggcggcgtgacaaaccatacgcatcatcgctcagcatcagatccagtgccgttaccaggttttcaaaattggccagcggctcacccatccccatcatgacgacattggtaaccggccgcctcgtttccggcttgtctgtctgcactcgtgtggtatccacgggaaacgggtcatgactacctgcttcgagcagccgattggcccaccacaattgaccgatgatttctgcgacgctcagattgcggttgaaaccctgtcgaccggtggaacaaaagctgcatgccaacgcacagcctacctgactggaaacacaaagcgtgccccggctgggctcgggaatgaaaaccatttccactgcatttcccgcccctgtcgataacagccacttgcgggtcccatcccctgcagtgtagtcactgacgatttcaggcaactggacaacggcacattccatcagcttatgacggaacccttttgccaaatcgctcatttccatgaattccgtcttgccggactggtgtacccagcgcaacaactgccttgcccgataaggcttctcgcccatttctccgcagaaacggaccagctctgtcttattgaaatcaagcaggttgatcattgcgcccggttttccaaatcagcaaaggtgtacattatcagcgtgaatgtatttccagagacgggaagaaacaggcgatttcaacggcagccgtttcaggtgcatccgagccatgtactgcattggcatcgatactttctgcaaaatccgcgcgaatcgtacctttttctgctttcctgggatctgtggcacccatcagttcacgatttttggcaattgcgttttcaccttccagcacctggatcatcactggcccggaaatcatgaattcgaccagatccttgaagaaaggtctttccctgtgaatcgcataaaaattctctgcctcgactctcgacaagtgcgccatgcgggcagcaacgactttcaggccagccgcttcaaatcgtgcatagatttgtccgatgacgttctttgctaccgcatcgggcttgataatggacaaagtcctttcaactgccatcaaatacctcataaaaatagttcatcacgagccggtattctaacaaaatctaacaaaaacccttgtatgatttaccaaatcagcagttggagaagagtgcgcaggcacaacctgctacgacaaggctatattgatatcgctctgatcagattgccagagcaagatgagagaaagttgcgatatcccggaataccgggtgatttcagagaggatgacgcattataaaaaaatcaggccggattcaatccagcctgattttctgccaccgtagtttcagatgttacttattctacgacgttaagggtacctggcaggtggatgtttttaggatgaagctggcaccagatcgtgaaagcacctgctttatcagcggtaaagctgatagttttggtttcgcctgctttaatgacttcctgaacaccaaacgcatcaattgaaaatccttcgctgatgggtgatttgttttcaacaacgactttcactgcatcgcctttcttgacgaccagtgtctccggctcattcaacacattgaaagcacggatattttttacggtcacaccttccacgttgagttcaggaatagtggtatcgtaggcgttgataaccacattgaagttgtgttcagcctgtgcagcacccgccagcaacagtgatcccacagcaaaacctgcaagcattgcttttgttgttttcatgattaccttcctctactaaaatttatattttattcagcgaaacatcgttcatcgctcgccggccccaatctgcagcttcctgcaaatcagccaatggacaaaccctctgccaagatattcatacaacgatcccgcctgcagagaaatctatctgtcatgttattagaatcagaccagctaccaaagaacccgtaaccaccgagtcccggcgggagagtctagacaagctaatgataaatgtcaatccagacactaaattaatgataatcattgccgatttctccggcagaaagacaggtgcagacgacgccttgaaatcaccagattttttagaaagtatccgcccggaccccctcaacggattagggtaaaatgctgctgattttttgatacctgcttacctgtgccccatcacattccggagccccacccatgaaaatccaggatttcatccagaaccgcagcaaagaaaattttgccctgcatgacaagtatctgaacagccagatggtcaaagtcctcaaaaccatcgattttgatcgtcattatgtccgggcagaaggcgcatatctgttcgacgagcaggataaccgctatctggatttgctgagtggcttcggtgtctttgcactggggcgcaatcacgcggaaatcgtcgaagcactcaaaagcactctggaggcagatttacccaatctcgtccagctcgacgtatcattactcgcaggactgctggcggagaggctggttaaactgaccccggacggattaaaacgtgtctttttcgccaactcgggtactgaaacagtcgaggcggcgatcaaattcagccgttacgcaaccggaaaatccaaaatcattttctgccacggctgttatcacgggctgagccttggctctctctctgccacgggagatgatcattacaaaaagggattcggcccgatggtgccggattttatcgaaatcccgttcaatgatctcgaagcactggaacaggtgcttgcgcagggagatgtcgccgccttcattactgaaccgattcaaggacacggtgtctggataccggacgataactatctgccggaagcagccagactcacccgcaaatacggcgcactgttcatcacggatgaaatacaaaccggactgggacggaccggcaagtggtgggcggtcgaacactggtctgtcgaacccgatatcctgtgcatgtccaagacgctttccggcggattcatccctgtgggcgcactggtctgcaaggaatggattttcgaccgtgttttcaatcgcatggatcgcgctgtcgttcacggcagtacatttggtaaaaataacctagcaatggccgctggtctggccacactggaagtactggaatcaggaaatctcatcgagcattccgcccgtaccggagcagccatcatggatgcgctgaccccactgacggaaaaatacgaatgcttcaaggaagtacgaggtaaaggcatgatgatcgcgctggaatttaccgaaccgaaaagccctatgctgaagctgtcgtggaaaatgctcgaatctgccaacaagggactgttctcacagttgataaccgtcccgttattcaggcagcaccgggttctgtctcaggtagccggccacggcatgaatatcgtcaaattcattccaccactcatcctgacagaatccgatgttcaatggatcgttactgcggtcagtgatgtcgtggccaatgcacaccgcggaccttcagcggtatgggattttggcaaaacgctggcattcagcgcactgcgcgccaaactacacgcctgagaacccgttcaaaatcccgatcaagggaggtagtacaaggcaaaattgaatgagaaaacggagcatacccggaatatgtgagtattttgagttcgattttaacgctgcaatgcgcccttcagtgggatcttgaacaggttctgtgcaaattcaactgctccataagcaattccctttgctttcggcgttgatgcgttccaccagccggctatgcaactcgagttctgcctgcgtggcaggctgaacgatcagcgcaagattttccaccttgccgactgccgaattatcggcttgtcgcgatgctggcgcatccatttccatcagcaggctttcctgaccacgtgtcattgccagataaacttcggccagcagctctgcatcgagcagagcaccatgcagtgttctgtgggaattatcgatctgataacgctcacataatgcatccagattgtttctcttgcccgggtgcagctcttttgccaggaccagtgtatcgatgatctgcaggcaatgattctgcatcgattcaaatctgatcaggtcgagttcacgattgatgaaccccacatcgaaaggcgcgttatgaatgaaaatctcggcatctgctatgaactccagaaactcgctgcaaacatcctggaacacgggtttatcccgcaaaaattcacgagtcagtccatgtacccgcagtgcgccttcatcactctcccgcccgggattgagatagcggtgaaagtggcgatcggtcaaacgccggttacacacttccactgctgcgatctcgacgatacggtgccccagtgcaggatccagacccgtcgtctcagtatcaagaaatacataccgcatgatttacccgatcaatccgctttttcagacagtaccgacgccaccccacggttggcaagcatatcggctcgctcgttgccatcatggccgttatgccctcgaacccagaaccattcaacctggtaatgccgggacagctgatccagctccttccacaatgcttcattcttcaccggttttttatctgccgtcagccatccgcgttttttccacgaatgaacccactcactgatacccttctgcacatattgcgaatcggtatgcagctgaactcgcaaagattgcccggtatcgggcagtgattccagtgcctgcaaggcacggatggcagccagcagctccattcggttattcgtcgtcacgggctctccaccaaaaaactcccgtatttcaccatcgaacttcagataaaccccccagccccctattcccggattacccttacaggcaccatccgtaaaaatctccaccagctttacaccctcttccaattgcattgcacgtccctgtttgttcacgaagcatacgcaccccgtatttcctgttttcaatcagcccgccaccggccttctcgcgccatggtaccagtggatacttctaaattattcatccgatgccctcgttcgatctgcggaaccactaccgtaccccttttcgcaggcgaatcctcccagcagggcgtgatgacgtgcaaaccacattcatgcttgactgcctgtaaaaaataaactcccccggcaatcggccaccagcgatctccggccgcctccatgaaacgcagacgggaaagccacttttcccgggtacatggcggcacatagcaaccaaactgtcccgcaacgatttcaaaattatgcagctccagccaatcctgcatgcgtggcagagcaatgaaacgaccgcaccatggaaaatccgttttcgatttcgccatgcgctgacgcatcccccaaagactgaacgggttgaatccgctgatgatgactttgccctccgggatcagcacccggtgtgcttcccggagtatctggtggggattcgaattgaactcgagtgtgtgcggcaacagaacgagatcgatgctgctgcttttgataggcagaaaatgaggatgcgcgtaaaccgaagcaccgtcccgtaccccgagtgcgaacttgaaaggcatccggttgttgcgcagaaaatcaaacccggaaaaaccgatctgggtcgcgttataaccaaaaatatccgtcacgacacggtcgaaataacactgctcctgttcaagaacatactgtcccagcgatgtttctaaccactgttgcatgctttgctgcaatacagaatcgaacatattatcaggatgattggttatgatgatgaccagtctgctatctgctacaaggaggcaaaatgatcaacgtttttcctgtccgggcgtttagggacaattatatctggatcgttcacaatcaacagttcgctctcatcatagacccgggcgatgcaacaccggttctcacctggctgagacaacaaaaattacaacccattgcaatcctctgcacccatcaccatcatgatcacacgggtggtatttccctgctggtacagaaattcgaaatacccgtttatggccctgtcagtgagaagataccggggatgactcacccgcttgcagaaggggacaccctcgtgttcccggaactgccactggaacttagcgttctggacgtccccggacataccgcaggccacattgcctgtcatggccagaaccggctgttctgcggggatacgctgtttgcctgcggctgcggaagaatctttgaaggcaacgcacaacagatgtttgattctttacagaaactggccggcctgcctgacgaaactcaagtctattgcgcccatgaatacacgctggacaatatccgcttcgccagggcgatcgacccggataatcccgagctgattgaactggaaagtaacgtggaagaaaagcgggagcgaaatatgcccacactcccctccagtctggctgcagaaaaagccaccaacccgtttctgcgttgcgatcagccggccatcatccagagtgccagccggtatgccggacggcagctcactgatccggtcagtgtatttgctgccatccgtgactggaaaaacaatttccggggggaacaccgatttaccgatgtgatccggtaatctgcctgtccgtctgcatcagacccggcaaccatcggcatcgcaccccggctgtgtatcagactcattaccagccgagtctgtcgaaccggcagccagctcctcatcagatacttcttcagccagcagcgtcccgatcgacacacccagcaataaatcactgacatggccgaatttgtgcaaacgcagatggcccgtcttatccaccagaatggtggtcggcgtcccctgcatgtggtaagtcatcatcgtgtgcggaatcgaatgctgctcattcggcttgtctatcccgatcggaaaacgcagcctgtactcataggcaaaaacttccagtgcattgcgccccatgacctcatgatgctcgaaaaccgtatgcaggccgatcactgccacacgatcaggatcaaactcatcaaaaatccgctgtgtctgaggaataccctgttgaacacatcctggacacaacatctggaaagcgtgcatcaacaccaccttgccgcgcaaggaagccagcgtaaccggttgcggtgtattcagccaacccgaagtgatcagttccggtgccttgattttttcaacggttgtactttttttcatggtcttaacagtgagatacgtgactgaaaacaggaacattttttgctggcgcgatgataacacgcgcagccggccgcactgaagcaatcggagtgggaagcgagctccggtttttgcggatggatttccgcaagcctgcggatacaggttgcctgtcgtttacttaatccggacaggtatcacagttaccaacgacagggcgttatgccatactgaaattcttcaaagtcaggaaattttatatatcgttaatttatttcacggagccaagcaatgaagcaatccatcttttttcttactgcgctgatactgttccatttccatgcttcaagtaacgcaggcacgcttgtcaatggcacctggtcaccgatgggatgcggggagcggccagtagcaccggctgtcagtactaccagcatagcggactataaccgcagcgttgaaacaatcaatgaatggcagaaacgcgcccagcaatacaattcctgtttggtcgacgaagcaaatgtagataatgcactgatcgccagaacagcaaatgatcagcaagtgaaattccgggaagaaatcgaccagattaatgcggaagcagacaaggcaaaggctgttctggacagcaagtgatgcttaagtaatacatggtgggcaataaatattgcccacacaccaccttgctgttcaaaatatacacctgctttatttcatgtatccggtcgccaaggaatttgcagggtagatctgaaagaaccatctcacaaaactggcctggaaattttgcaactgtggacagattgaaccagccaaaagctcttcataaataattgcagcctgattgctatttatttataacctctaaacattattaatacagcaagagcgtaagtgaaatagtggccggatcattccagttttcttgattaagagggactccagataatccgtatcattcaatactgatactgctttataaatgacaaagcccggcggaatattactattccgtcgggcggatacgactcgaatctttcgattcagcttattgtagcaacggctctcaccccggataaactacaacctacgaattatcagggagaattttatgttaggcaagcactataacaagaaaaatttgatgccacttactttcgggctggatatcggcatagcctcggtaggctgggcagtgctggcccctgacagaatcgttgatctgggcgtgcgtaccttcgacaaggcagaaactgccaaagagggtgaatcactcaacaaggtccggcgggatgctcgtctgatgcgtcgccgtttacagcaccgtgcatggcgcttgaccaagttggcaagactattgaaacaggaaggattgatttccgatgccagattattcaaaaagcagcaatcattctctcagtcactctggcaacttcgcgtcgaagggttaacccggctgcttgacaaggaggaatgggcacgggttatttatcatctctgcaagcaccggggttttcactggatcagccgggcggaggaagcggcagcagaaaacgatagcaagggtgaaggcgggaaagtcaggcagggtctcacgaaaaccagtcaattaatgaaggaaaaaaactatcagactgctgctgaaatggtgctggcagaatttcctgaagctcagcgcaataaacagggtgattatgggaaagcgctgtcacgttccttattggcggaagaattgaagatactttttgaatgtcagcgtcatctgggtaattctcatgcgggcacaacacttgaaacccggattctgggcaatggtgataaaaagagtggattgttctggcaacagaaaccggcattggctggagatgccttactgaagatgctgggaaattgcactttcgagaagacagaatatcgtgctcccaaagcaagctttacggctgaacgccatgtttggctgacccgtctgaataatttgcgcatcgtagtggatggtaaaacccgcccgttgaaccaagaggagcgaacggtggttttgaatctgccttatcagcaggctggtgatttcacttataagcaattgcgtaatgtactggtaaaaaatgggctggttgattcattccgttttccaggattgtcttatccaagtgagaagcagcaagccgaagcaaatgttaagaacccggaagatgaaaaattgatcaggctgccggcttggcaggcgttacgaaaaaaactgaaagagaaggagctggaagcagcctggcggcagatttcaaccgctgctttagagggacaacccgagctgctcgatcaaattgctcgtgtactcagcgtatacaaggaagatgaagagatcaccagagaactgcagaagcttgatttacctgataaagacgacgtaatcgaggcattgcgcgaagtcagtttcagagaattccacgctttgtcactcaaggcgctatacaagatcgttccattcatggagacgggcctgcgttatgaccagtcctgcgaagcagcaggctatcaccatagtcagttgtataagacaggcgagtatgaatataaatacttgccacccttttatgccggcagagacagggatggccgcatgctattcaataaaaaactggatatggatatccctcgtaatccggtagtcctgcgagcattgaatcaggcgcgcaaggtagtcaatgcactcattcgcacatacggctcaccgcattcagtgcacatcgaaatggcgcgcgatctgtcgaaatcattcgatgaacgcaaaaaaatcgaaaaggcacaggatgaatttcgcaagcgtaatgaacaggacaaagctgggtttgctgcagaattcaatattatcggtacacccaaaagtaaggaattcgagaaatatcagctttatcgcgaacagcagggtaaatgcgcttattcactggaaccgctggatattaatcgcctttttgaaccgggctatgtcgaggtcgatcatgcgctaccctattcacgcagttttgatgacagcaagagcaatcgagtattagtgctatcacgcgagaaccgcaacaaaggcaataagactccttatgaatatttgaatggtatatccaatgatgaacgctggcggcgcttcgaggtatttgtcaacacaaacaagctgtatcgctcagccaaacgtaaccggttgctcaagaaagatttcgatgaaaaggatgcggaagatttcagggatcgtaatctgaacgatacacgctatatttgccggtttttcaagaattatgttgaacgttacctgcaactgcacgaggagagccaagacaaacgctgtgtcgtggtaagcgggcaattgaccgcattcctgcgcgcacgctgtgggctcatcaagctgcgggaggagagtgatcgtcatcatgcactcgatgcagcagttgtagctgtgtgcagccgtggcatggttaagcgattatccgactactcgcgccatcgtgaactcgatcaggtacgtaccggcttcgtcgatgtagaaactggcgagatagtcaatcttgccatgttgcagaaattagaagcacattttcccaatccatggcctcatttccgtgatgaattaatactacgcctgaaggaagacaatccggaattactgagaaagggggtagaaaaatttgggacgtatccaccagaagcgcttgaagcgttaaagcctttatttgtgtcacgtgccccacagcggcggaacggtggagcggcgcataaggatactatttatggtcaaccggaacggttgcggacagaaggtaatgtcgttcagaaagtgccattagacagtttgacattggataatatgaataaactgatcgacccgcatcgcaacgaaaagctttactcagctattcgtgcacggttggagcagcataatggcaaaggcaataaggctttcccacccgataatcccttgcgtaagcccggtcggcatggcaatccggatggtcctattgtgcgtagcgtcaaacttgtcaataaattatccggtattccggtacgaggtggcatagccaaaaacgataccatgctgcgtgtggatatcttcaccaaagcaggtaaattccatcttgtaccgatttatgtgcatcacaaagttgctggggagttgccgaatcgggccattatagcgtttaaggatgagagtgaatggacattgatcaatgacagtttttcattctgttgctcgctgcacccaaatgatctggtgcgtataaacctgaaaaaggaatcacagtttggatattatgcaggatgcgatcgttcgactggcgctattagtctatgggcacatgatcgtaaccagcaagctggtaaagatggattgattcgaggtattggagctaaaacagcattatccatcgaaaaattccacgtagatgttcttggtcgtgtttatcctgctcccccggagaaacggcgtggtctggcgtagcatcatgatttcccgtcctgcacggttgcggcgtgaacattattcactggcgatcgatcaggaagaaactgctttcgttcctttcgaggatatcgcggtgattgtgttgaatcatcgtgaaatagtactgactcacccagtactgtcggcctgtggtgaatatggtatcagcctgttcgctactggcgctacccatcatcccagtggcgtatttttgccttttctgccgcactcacgtgcgacacgctggttacgcttgcagttaaacttgcctcgtccggctgccaaacaggcatgggcgatgattgtacgtaaaaaaatcgccaatcaggccgcttgtttgcgtcttgcgaatcgtgaaggtgtaggtcgtctggaatcttacgagcggcgtgtgcgttccggcgatagtaataatctggaaggacaggctgctgctttttattttgcaaagctctttggcaagaatttccaccgtaatcagatttatttcatcaatgctgcgctggattacggttatgccgtcatacgaggtacgattgcccgtgctctggtcgcgcatggactactaccctcgttagggttgtttcacgccagtgagcagaatgcatttaacctggctgatgacattattgagcctttccggccacttgtcgatttgtttgcagctaatctggctgtaccggatgatgagatgttgcatccagaaaccaaggcagccttgatcgatttactcaatgtagatatgttgatgccgcggggaaaaatgtccgtactgtctgctattgagcacgtcgttgaaagtttggcacgtttctacgatggaaatgacaaggcatgtatcgagctacccagtctgcttggattgaaacctcaccggctagagtattaaacgtgagcaaggagacccgaagatatatgcgtttacttgttttcttcgatctacctgtagtaaccaaggctgaacggcgtacttatactgtatttcgccgctttctagtcaatgatggttacgacatgatccagttttcaatatatggtcgtatcctgaatggaaacgatgcattggaaaagcatatgaaacgactggttgataacctaccgcccgccggatcagttcgatgcctgagtgtgacagaaaaacagtttgcaagcatgaagctactggttggttctccaccctttcaggaaaaaaaggttaatcccaaacaattattgttgttctaagcagcagttttttacgtaaggtgcccgccctattgtaagcagggcgggcatttacgtagagcctaattgtagttcatccggggtgagagagggagctacaaccaaatatttgatgggaattcagttctggtaaattgtagttcatccggggtgagagagggagctacaaccacggtgaaggaacaggcaccactggtggaaattgtagttcatccggggtgagagagggagctacaaccgtcgttcacgatggtctcaggagacatatattgtagttcatccggggtgagagagggagctacaaccatctgtaggcatcaacgaaccagcatctaattgtagttcatccggggtgagagagggagctacaactaaaccacctacccttcggtcgctacgcttattgtagttcatccggggtgagagagggagctacaacaggattatgaaaacgcagcaaaagcggctgattgtagttcatccggggtgagagagggagctacaactcccacaaaactacatgtccacgaacatccattgtagttcatccggggtgagagagggagctacaactaaggtcaaggagcaggcaccactggtggaattgtagttcatccggggtgagagagggagctacaaccggctcagattgttcaccccacagtctgccgaacaactgaaacagttaatcggatgtggcctgctggatcagcacggaagaaaaccaaagaaagcgcatgtggaagcaaatcgtttcacatagagacaatcttccagaacactctggattttgtttcagtaataaacataagaaacaggacaaaatccaccattcatatcaatagctggccagtccgcgttcgcgcccccagacgactgcagcactccgacggtgtacgccgatcttgtcgtacaccgccgcaacgtggttgcgtaccgtattacgtgacaattgcagtatcgtcgcaatatcggcatcgcttttgccctggcagatcaggctcagcacttccttttcacgcgctgtcagagtcgaaagctccagctttgagtcagttgctccggaatggcgcaattgggcaagtttttccatcacagtttgaccgaaccaggacgtatcttgcatgactgcgtcaatagcagcgatcaattctatttcagtacgcttgcgatccgtgatgtcttcaaatacgcacaacacacacgcatcatcgttaatagtgacaggctctgctgagatcagcgtatccagcatgataccgtccgctccgcgcagtggcacctcgtagttgcggatactcccctcatgcagttcgtcgcgtatacccgccagtatcccggcatcttcccacaggccaatttcagccacggtcttactctgaatttcctcgttcctgtaccccgtaaccgattcaaaagcggcattgaccgctatcacgcgccatactggctcgacgcaaaccatcatcgggatcggagccaggtcaaatgccttggaaaaaccctcttcgctgcgtttcagagactcctcggcctgcttgcatgcatccagatcgataaaggtaaacatcatgcatgcttcattggcaacttcgatcgattgaccagccacaatcacgaatttgtcaatccccccttgcacacgcaatatcgcctcctgttgtgcaatagattcaccctgctgaagtgactggatcgcctgttcgcgatattcagcttcacgcagaacatccagttcgtacaatgatttatcaatgacctgatcactgctgtaacccgtcattctcaggaagccacggttcactttgatgtatcgggtatccgacaaccggcaaaccaccgcaggtgcaggattgactgcaaaagcacgttcaaaacgcccttcagcattgacttgttcggtctcatccctgatcacgatggccacagcctcgatttcatcatgcgctcctgtgaacagcacgctgcgcatgacaagcacacgacggaaatcggagtttttccggcgtagcgttagttccactctgacatcatcgaattcctcgcctgagacggcacgcgccaccggatattgtctggcagcaagtttatggtgattcaggtacatcaacacaaagtgcttatggtactgggcagcagttactccaagttctgcaagctgctcacaaccatgcatggcaagtgcagccttgttagcccaggtaatcttgccactcggatcaatcaggagaactccctcaaccagatgtgagacgagttgctgaagctgttcccgactggtatccggcttgttctgttttgtatccatacgccccctgcaaggcaaatctctagcagaacctgaggtttccatactcaatcaccaaatgataagagaaatgataatggtatagaaatactacattattcagtaaatttgaatcttacttgtctgcatagtgccatgatctaatgaatgcggccggtcaatgaagtagtagtgtactaccgcacgcctggctatcccgtgcagatgttcagtagtcacatacagcaaaagtacgataagcaggtatgtctgatcaataaactagctgacttgtgcatgagctgaaaaactgctggccggctctaatttttgatagaacggaacaaggagaactatcatgaaaatcaaaatcttactctcaatcattactgcaatggccttgttgatacttggtactgaagtagcaacggcacaatctacgggagcgccacctactactgacagcggatctccagaaagtagtcagccgttgaatgatacgatgattaccactaaggtcaaggcagagctggccatcgccgaaggaatcaaaagtggtgacatatcagtcgagacagtcgatggtgtagtcatactcaccggaacacaaccaaacgaaatgctgatcaagaaagccgaggaagttgccaagagcgtcaaagacgtcaagaaggtagatatctccggcctgacagtgaataccaccacagccgattaatcagaccggcagcagttgtttatttttaaacttgattaaaaaggagtcaaaaatgaacgaagacagaatcaaaggtcagtggaagcaattggcaggaaaaatcaaggagcgctggggcgatctcaccgatgacgacttgaaagtcgccgaaggaaacagcgaacgcctggagggcatattgcaagagcgctacggcattgctcatgatgaagccaggaaacaggtcaaaaagtttcacgactctctgtaaggctaatgctgttggcaagcacgaaatacatcgataccggtgtatttcgtgcaatatgctgtttttgtgtacctggcacaaaccataacccaggtaatgttgtaatcgtgatggaaaccagagaaacataatgctgcattacgccatcatttttgatcaccacgcatatccagaatttttcggttttatttgaggctcccagtctgggaatgaatcagaccggattttcaatcaagaccaggagtaaacaaatgctcaagtgggccatcatcttcgcgatcatttcactcatttcaggcgtgtttggtttcagaagcaccagtgctggcacggcatcgatcgcaaaatttctattttttctgttcgcgcttgtcacgctcgtgttgcttgttctcgggcttctcggcattgggatggtagcttgacacagcaaaagcagggctgaacacttgaagtcggcaacaatgtttgcaatgtgaaagcgataaaaactgattatgcggcagttcacagagatccatttttcggctgctgaggatgagcataatcagtcatcagaagaaatgaagcaacagtaccagcattcgctgccaacagtgctgaaacttcattgtcagactcgtgataaacagtatgggattgcgctgcgcagctaatatataaaatgccaggtgactaccattgaaaagtgcgatatttttctaagtgcacatgtggtgcaaactacctgactcaaacattcacttttacaaaggagaaacatcatgacgatatctcgtgtaattgcaatcgtggtcatcgccagcgcttccatggtaatggtttccagctgttcagtcgcacggcaccaggaatccgtaggtgaatatgtagatggctcgattatcacaacagaggttaaagccaagttggcgaatgatcccggtacttcagcagccaatatcaacgtcaaaaccatagaaggtggtgaagtacaactgtccggatttaccaaatcacaagcggaaaaaaaccgtgcaggcgatctggcacgtactgtcaagggtgtcaccagagtacataacaacctggtagtgaagccttgacgaacgccagcgcttgacaaaatcgcggagtagttgttaagtcccactgtgtgatgggatagattgatcgtggccaacaaggatccgtcgagccgaaggcagcaagagaagcgatggagccttcggctgatttgtagtagttgagatctgatctgacagttacccgatttaacgatgtgcctgttggatcagattcagttattcaatgcggtaattttatcgttccatacctcctttgcgtcaattaaagtttgcattggggtgcgcccgcagtacatcttgccttgatgagttcttgcattgttgtaatgcactatccattcatccagatcgtgttgtaactcttcgatcgattggtagatcttgcgccggaatgtcacctggtagaattcctgcaagatggttttgtggaaacgctcgcagatgccgttggtctgcggatgattggctttcgttttggaatgctcgatgtcattgagtgccagatagagctggtaatcatgattttccggcttgccacaatattcggtaccacggtcggtcagcataagcttccccttttagtagacattattgagtagaattttggggcctccttt

SEQ ID NO: 2901 - DNA, 18003 bp, synthetic construct
  source 1..18003: mol_type = other DNA
  misc_feature 1..18003: note = Synthetic
acacgcaggcgcaggtagtagctggtctgcacttcatccatcggcaaaattttcaagtccgccatcgcgttgggctggaacgccagatgcggcacgcgattcagcggatcggcggtgtgcatgcgcgtcacgtccaccaggtcggcaatcaccgcactggcggtcggttcagcacccgcgcccttgccgtaatacagtgtcgcgcccaccgcatcgccctgcaccacgacggcattcatcgcgccttccacattggcgatcaaccgcttcgatggaatgagtgtcggatgcacgcgcagctccacgccttccggcgtgcgcttggtgatgcccagcagcttgatgcgatagcccagttgttcggcatacttgatgtcgatagcatccagcttggagatgccttcgatgtaggcttggtcgaactgcatcgggataccgaacgccagcgcggaaagtatcgtgatcttgtgcgccgcatccacgccttcgatgtcgaaggtcggatcggcttcggcataacccagacgctgtgcttctttgagcacggtgtcgaaactcaagcccttgtcgcgcatctcggacaaaataaaattcgtcgtgccgttgatgatgcccgcgatccattcgatgcgattcgcggtcaagccttcgcgcaccgccttgatgatggggatgccgcccgccaccgccgcctcgaacgccaccatcacgcccttgtcctgcgccgctttgaagatctcgttgccgtgcgtggcgagcaaggccttgttcgcggtgaccacatgctttccattcgcaatcgccttcagcaccagctctttcgccacaccgtagccgccgatcagttcgatgacgatgtccacttccgggtcgctcaccaccgagaacgcatcatcggtcacgcgacaggtaccgcctgtgatttttttcgccaactccagattgcgatctgccacgaccgtgatgcggatgggacgccccgcgcgacgctctatctcttccgcgttgcgttgcaaaacagtgtatgtgccgccaccgaccgtaccgataccgagaagtcctacgttgattggtttcatttattttccttaaaaattatgaggctagtagctactagccagcaggggggcactagcggctacgcgctacccgctcgtttgcgatagttctccaaaaagcgcgcgatccgggcgatggcatcggtcaggtcatccgcattgggcaggaacaccacgcggaaatgatcgggcgatttccagttgaaaccgctgccctgcaccaccagcactttttccgcttcgagcaattccagaatgaattgctggtcgttttgaatcggataaatcttcgggtcgaggcgcgggaacaaatacaacgtggccttgggcttgacgcaggtgacaccgggtatcgcggtcaataatttataggcaaggtcgcgttgtttgcacagccgtccgccgggtacgaccagatcgttgatgctctgatagccgcccagcgcggtctggatcgcgaactgccccggcacgtttgagcacagtcgcatcgaggccaaaatggtcaggccgttgatgtagtcctgcgcgtgtttcttctggccggagatcaccatccaaccgacgcgataaccgcaggcgcgataatttttcgacaggccgttcagcgtgacaaacaatacgtcgtcggccaacgaagcgatcgccgtatgggtcgcgccgtcgtacagcatcttgtcgtagatctcgtctgcaaagatgatcagctgatgctcgcgcgcgatctggatgatctctttgagtatctcgtcggagtaaagcgcgccggtcggattgttcgggttgatgaccacgatggcgcgcgtgttcggcgtgatcttgctgcgcatatcggccagatcggggttccactcctgggcctcgtcgcacacataatggcgcggcgtgccgcccgccagcgtgaccgccgccgtccacagcggatagtcgggcgcgggcaccagcacttcatcgccgggattgagcagcccctgcatgcacatcacgatcagctcggacgcgccgttgccgatatagatgtcatccagaccgacccccatgatcttcttcgactggcagtaatgcatgatggctttgcgcggcgcaaacatgcctttggaatcggaatagccggacgcattcggcatgttcagaatcacgtcctgctggatttcttccggtgcttcaaagccgaatggcgcaagattgccgatgttcagcttgatgatgcgctgaccttcttcttccatctgcttggcgcgctccatcaccgggccgcgtatgtcatagcagacattggaaagcttggtcgatttcagtatgggtttcacgatgttagaatccgattcgaatgagtgggtccgccagggcacttcatcattaaacacagccaccaggctgcttgtttcatgatgaaaagggcgcgattttacccgtgcggacatcacacagcaaatggagaagtgcttgaaactacatctggccaatctgggcgataccaaaatgttcaccgcgcatggcgcggatcatgtcatggtcaaccgcgtgcgctacgaccacgccatcgtggtcaacgcgcaggaagtccgcgaggattggcacgtcgccgatttcggcgcgctgaacgagagccattttaattacttcctacccttcaaaccggacgtgatcctgatcggcaccggtacgcaacaacgcttcgcccatccgcgcctgtatcgcgcgctgaccgacctgggcataggcgtggaattcatggacacccccgccgcgtgccgcacctacaacatcctggtcgccgaagaccgcaaggtgatcgcggcgatcatgttgtaaagacaagttggaatacgtaagtcgtcagttataaacccctacaacttaatttccgcttcttccagaccccagcttacggcttacgtcgcccaactcacatcgaattgaatacatgaccaatcccctgcacaaagtcctccagcaaaccgaacaggtcatcgtcggcaaaccgctacaaatacgctttgcgctggcctgtctgctggcacgcggacatctactcatcgaggacatgccgggcgtaggcaagaccacgctggcgcatgtactggcacgcacgctgggcatgcagttccagcgcatccagttcaccagcgacctgcttcccgccgacatcctcggcgtgtcggtatatcagcgcgacacggcggatttcaagttccatcccgggccgatattcgcgcaaatgatcctcgccgatgaagtgaaccgcgccacacccaaggcgcagagcgcgctgctggaagcgatggaagaacagcaagtgaccatagaaggcgtgacgcgccccttgcccgtgccgttcttcgtcatcgccacacagaatcccatccatcagatcggcaccttcccgttgccggaatcgcagctcgaccgttttttgatgcgcatccagctgggctatcccgacgcacaggcggagcgcggtctgttgtccggcgtggaccggcgcgacctggtcgcacggctcaccccacagatggacagcgcggaactattggccttgcagcaacaagcgcgtcaggtgttcgtttcgcccgccttgctcgattatgtgcaagccatcctcaagcacacccgcgaatcggcgcgattcgcacatggcttgtcgccacgcgccggactcgcgctgctcgctgccgcgcgcgcctgggccttgctggacgggcgcggtgcagtgatcccggaagacgtgcaagccgtattgcccggcgtggccagccaccggttgcagcagacgcagggctcgtcaaatgcaaatagcgacacgctggcgcgcgaactgattgcggcagtagccattccctgacgtgttccccgcgctcaagcaaaccttccgcagctgggcgatgcgccgcaccgtcgagaccggcacggtggtgctcaaccagcggcgcatctacatcctgccctcgcggtcgggtttgggcttcgccgtcgtgctggtactgatgctgctgggcgacatcaattacgacttgagtctgggttatgtgctgacctttctgctggcgatgatggcggtgctgtccatgctgtacgcctttcgcaatctggcccatctgcacatccgtgccggacatgtcgagcccgtattcgctggcgagactgcgcggttcgtttttcacttcgacaatcccggcacgctggcccgccatcagatccatctccaagacgatgccggacgtcgcaccgtgttcgacctgcccgcgcgcggctccgctcccgtaccactcgatattccaaccgtccggcgcggttggctggatagcgggcggctatcgctatacaccgagttccccctggggcttttccatgcctggtcgtacctgcatttcgacgtgcgcgcgctggtctacccgcaacccgccgcactgctgcccctgcccgcgcaatcatcacagaacggcacgggcaagatcatagtgaccggtgacgaggatttttccgggctgcgcagctatgtcgcgggggatgcgctgccgcgcatcgcatggaaggccttggcgcgcgaacaaggtctgcaggtcaaacaattctccgcaccgcaaggccaggatctgtggctggactggtcgcacacgcccacgctcgcgccggaacaacggctgcaagtgctgacgcgctgggtgctggatgccgatgaactcggcttgcaatacggcttgcgcctgccggatggcgagctcgccccgcaaaataatccggcgcatcgggccgagtgtttgcgcaggttggcgttgttcgggttggcgcaccctacgacaaactcggggcgaacggcaaagcaagttaaacgcagtgatatatccgtccgtggtgagcctgtcgaaccatgaacaaatcactcgtctacagcctgaccctgtgcatcctgctggtaatcgcgccgcacgcgggacatctgccactgtgggttagcgcgctatgcgggatgttgctgacctggcgtgcctatctcacgttcagcggcaatcccttgcccgcacgttgggtgctgttactcgtcacgctggcaggcataatggccatcgccgttggtttccatacgctgttcggacgcgaggtcggcgtgaccctgctggtgctgctcgccacattgaagctgctggaattgcgcggcacacgcgacgcgatggggctgatctatctgtcgtgcttcatcatcatcacgaatttcttctactcgcaaagcatctcgaccgcgctgatgatgttcgcgacgctgttcgtcatcgtgtcggcttggctgcgcatccagacaccgcgcatcaccttcaagccgcagttgcgcatcgccgcgatcctgctgctgcaagcggtaccgctgatgctgatcctgttcgtgctgttcccacgcgtgcaaggcccgctgtggggattgccgcaggatgcctacaacagcaccggactgtccgacaccatgtcgccgggcagcttgagtaaattatcgctgtcggaagccgtggcgtttcgcgccacgttcaaatcgatctcgccgcgtcgcgaccagatgtactggcgcggcccggtgctgtggcaatacgacgggcgcacctggacaaccggcacggccaaatacgatttggcaccgagttttgacgcgaccgcgcagaccatcgaatacagcgtgacactggagccgcacaacaagaaatggctgtacgcgctggacgtgccgcaccaactgcctatcggcgcacacctttccagcgacttccaactcctcgccaaacaggacgtcaacgcgcgcctgcgttacgagatgagttcggacctgctctaccacgccaacgtcgacgagtccgcagcccaacgccagcgcgccttgcagctgccaccgcgactcaatccgcgcactctggaactggctgcgagctggcgcgccggtcagagcaacaatggcgagctggtgaagaccgccttgcgtttcttcaaccagcagaatttcgtctacacgctggaaccgcctttactgggcagcaatggcgttgacgatttcctgttccagagcaaacaaggattctgcgaacactacgcctcggccttcgtctatctgatgcgcgccgcgcacatcccggcacgcgtggtgaccggctatctgggcggcgaatataacgcgataggcaactacaccatcgtgcgccaatcggatgcccatgcctgggccgaggtgtggctggcgaatcaaggctgggtgcgcatcgaccctactgctgccatcgcaccggagcgggtgcagatgaatatggcatcgtcactcaaaaacaaagcggcactgccgttcatggcacgcaatccgccgcaatggttgagcaagctgcgcctcaacctcgacgcactctccaaccaatggaatcaatgggtgctgggctacaacccggagcggcaattcgccctgctcacgcgtttgggtatggaagacgtgagctggcagaagatggcgcgcgacctgatgctggggctggccatcctgatcggtgtatttgcgctgttcatgttccgtcatctgttcgcgcgtcaaaccgacccggtacaggtggcctggctcaagctgtgcagccggttagccaaagcgggattgccgcgcgccgctcatgaaggcgcgctggattacgccacacgcgtcgccgccgcccgcccgaaactggccgccaacatgatggacatcgccgaacgctacatgtctctgcgctatggcgagacacgcgacgaggcatcgctgcgcgcttaccgggatgccctacgcgcgttcaagctataatccgcgccaattcaatcgctcatcctcatcatgctcatcacccgccgccttgaattcgatgccggtcaccgcatccccaaccacaccagccagtgcaagcatctgcacggacaccgctacgcaatcgaaatcagcctgtcgggcgacatcattgcgacggaaggacaatccgaacaaggcatggtgatggacttcagcgatgtgaaacgcatcgccaaagcacaagtggtcgacaagtgggatcacgcctttctggtgtatcacggcgacaaagtcgtgtgcgatttcctcgccagcatgccgggacacaagactgtcatcctgaacgtcgtacccaccgcagagaatctggctcagaccgccttcgacctgctggcaccggcctaccaggacatttacggcaaccatctgcgcctggaacaagtgcgtatctacgagaccccgaacaactgggcggattgccaacgcgacacgaatgaagtgaaagtctggacataaagcgcggcttcgttcagaatgcgcaccctcgaaaaggcggtagcatctaagcatctaaaaatttcgagtgtctttacggaagtttgggtgagtggtttaaaccagcagtcttgaaaactgccgacgagaaatcgtccgtgagttcgaatctcacagcttccgccagatcacagtatcacagagtctcaaatattcccataaacccgcactgtgtatagctttagcgggttttttgttgcccaagcgatctcaatcaatctcactcaagcttgcatcttttgtcggtataagccatgctcatataccagcacggttagaatataccagcaaaggggcaatgatggcactgacagagcttgaggttaaaaaaacgaaggcaacagacaaacaacaaaagctatccgacggcggtggcatgtatttgctggcgcatccgaatggcggcaagtattggcgaatggattatcgtttcggcggaaagcagaaaaccttatcgctgggcatatatccagacgtgtcacttagcgaagcacgggatcggcgcgaacaggcgcgcaagttacttgcaaacgatgcagacccaggcgcggtgaagcaggcgcaaaaggccgcgaagattgaagtcgtctccaatagctttgccacgcttgccgctgaattccacaagatcaaatctcccatgtggacagtcggacacgcaaagcaatggatgggcaacttggaaaagtacgcattgcccatcatcggtgatcgccccattgccgagatcgagccgatggaattagtcggcatcatgcgcaccgttgagactaacggcacattcgagacaagagatcgtttgctgcaaaccatcagcgcggtattcaaatacgcaatcgcaacaggccgagccaaatacaatccagcagaaatccgcaaggcactggcagatcgcccaagggttgaacacttcccctgtataacgactgcggaaactcctgcattcctccgcgcagtaacggcctatcaaaacatggccaaggtctcacccattgccatcgctgcgttacgcctgctcatgctggccgccacccgtaccagcgaagtgcgcttttctaaatggacagacttcgacctagaagcgaaatgctgggtgatccctgctgaacaaacaggacgtaaaggaaagggagacaagcggaaagatcacgccgtgccgctatccgatcaagccgtcaagatattgcgcgacctgcaaccagtcacagggcaaggcgaatatgtattccccaaccgcaacaactcatcgcgggtcatcagtgaaaatacggtattgaaaatcatcgagaccatcggctacaaaggcaagatgaccggacacggattcaggagcttggcacgtaccgtactgggtgatatggggcatcgctgggaagtgttagaggcaatgctctcccatgcacttgtcaaccagactgcggcagcatacgtgcgcacctcatactttgaagagcggcgcggcatcatgcaacaatgggctgactatctcgacaaggtcgaagcaggtgcggaagtcataccatttcgcgcatagcgtgtttgcacacgcaaccatcataagcaagtcagaccagccgcagtctggtttatccagtctgcgacaacaccccgcacaagagcatcgctgttgtgtttatcaaacaatcctcagtctggcatcgccagtctgtgaccatatccttacaagtgcgcagcatttgtgaagactcgtttagttcagtgcagcctgtaccgcatccggtgcgcgtttgatgacgtttagcaatactaacgatgccccttgcggtgaacgatctccacgctcccagtggcgcaaggtcgcaaccgagaatccaaaccgcgcagcgaattgctcttgcgtcattcccatgcggcgacgcagtgcagaaacatccacctcttccggcgtgtaagttttcacggcgaccttggcacctttcgcatgcgaaattgcctcattcaatccacgcgcgatactgtcaaaagcttttcccataagtcacctctcaatccaagttgcaaccaaaacatcaaccaacttagccaacccattacggtcagccttgctcaaattcgcctgctcgttcttggcaaacaacgccaccaaataaagcggcatcatttcgctgtggtagtagtagaccacccgaaccccgccactcttgccgcgcccacctctaccccacctcaacttgcgaataccgcccgtgccttcgataagatcacccgatttcggatgcgcggcgagatagctcaacacatcctgccgctctgcgacggttaagagtttctccgcttggcggatgtattcaggaacttcggcaatcgtaatcatggcggatattgtaatccaatggattagtcgatagtaaatgatttttgcaaaaggtcgcgctaaatattcgtcgtttgttgtgcagcaacctagtgatgacgtattctcacgcaaagttgttcgtgttgaatgactgcatttagaaaagaaaaagcccgacaatttgcactgtcgggctttggatacagaacctttcagttctttattgtagcaacggctctcaccccggatgaactactacaacggtgaggattatcagggagaacaggcatgactagcaagcataaaaattcgggcgcactcactcttggattagacatcggcattgcttcggttggctgggcggtactgggggaagaccgcatcattgatttaggtgtgcgttgcttcgataaggcggaaaccgccaaagaaggtgaatcactcaaccttgcccgccgcacggcacgactgttgcgccgtcgcttacggcgcagagcatggcggctcaccaagttggcacgcttgcttaaacgcgaagggctgattgcagataccaacttcttcaaacacaaaatcgagaagaacaccactgcgccaaaatcgtcatggcaattgcgcgtggatgcgctcgaccgcccactgaacaacgaagaatgggcgcgtgtgatctatcacctgtgcaaacatcgcggcttccattggattagtcgcgccgaagccaaaccaatcgagggcgatagcaagagtgaaggcggcagggttaagcaaggcttggctgatactgaaaagctgaagaaggcaaagaactaccgtaccgccgccgaaatggttcttgccgaattcccagaggcacaacgcaacaaacaaggcgattacagcaaagctctttctcgcgtgttactcagcgaagaatttgttctgttgttccaacgccaacgcgagttgggtaaccaacacaccagcgcggaatttcaggaaaaaattctcggcaacggtgataaaaagagcggcttgttctgggcgcagaaccccgcactggcaggcaacgatttgttgaaaatgctgggtcattgcaccttcgagaaaaccgaataccgcgcacccaaagccagcttcaccgccgaactccacgtctggctcacccggctcaacaacctgcgcatcgtggtggacggtacaactcgaccgctgaatgaggcagagcgacacatcgctctactcatgccttatcagcaagcaggcgacttcacctacaagcaattgcgcgccgcgcttaccaaagtgggctttttgcctgagtcgttccgctataccggactagcgtatgccagcaaacaaaaagccgatgagaaatccaaagaccctgaatccgctacgctagtgaaacttcccgcgtggcaggaattacgcaaaacgctggagaaaaaagaactcgcatccgagtggcagaaaatctctaccgatgcactgcacggcaagccgcagctgctcgaccagatcgcttgggtgttgagtgtctacaaggacgatacagaagtggaagccgagctgcgcaagctgaacttgcccaatgccgaaaagatgatcgacgcactgctcgatattcgtttcgacaagttcagcaacctctcactcaaggcactgcgccaaatcgtgccgttcatggaacaaggccagcgttacgacgaggccgtcgccaacatcccggaatacgggcatcacagccagttacaccaagtcggcgcgggcgaacataaatacctgccgccgttctacaaagagcgcgacaagaccgggcgtatggtgttcaacgatgacatggacatcccgcgcaacccggtcgtgctgcgcgcgctaaatcaggcgcgcaaggtggtgaacgcgctcatcaaagaatacggcgcaccgcatgaggtgcatatcgaaatggcgcgcgacttatcacgcccactcgatgaacgacgcgaaatagaaaaactgcaaaaagaattccgcgacaacaacgaaaaaggcaaagctcagttcgctcaagacttcaacattgtgggcgcagtcaaaggcaaagagtttgaaaaataccagctgtatcgtgaacaacagggcaaatgcgcttattcaatcgagccgattgatctgcatcgtttgtttgaaacaggctatgtggaaattgaccacgctctgccctactcgcgcagcttcgacgacagcaaaaacaaccgggttctggtgctcgcaaaagaaaatcgcgacaagggaaaccgcacgccttttgaatatttggacggcaaaagtgaaagtgagcgttggataaagttcgttcgtaacgtcgaatcgaacaaagcctatcgtctcgccaagcgcagccgtttactgcgcaaagacttcggcgaaaaagaagccaaagaattccgcgaacgcaacctgaacgatacccgttacatctgcaaattcttcaagaattacgttgagcaatatcttcaactgcatgaagacagcgaagcaaaacgctgcgtggtgctcagcggccagatgacctctttcctgcgagcccgctggggcttggttaaagtgcgcggcgacagcgaccgccaccacgcgctggatgctgccgtagtcgcagcgtgtagtcacagtatggtcaagcgattatccgattactcgcgctgcaaggaattggaacaggtgcgcgaaggttttgtagatatagacacgggcgagatactcaacccggcgatgttcgatcagatcgaaaagcacttccccaatccgtggcctcatttccgaaatgaactcgaagcgcggttaaagattgacgacatcgcatttctgcgcgaagaaatgaaacgcctcggcacatattcggaggaggctctggaatcactacgtccgctgtttgtctcacgcgcaccgcaacgacgcaacagcggtgcggcgcacaaagatactatctatgcgcaaccggaacgattgaaggctcaaggcggcgtgacgcaaaaagtcgcgctatccaacctgacgttaaaagaccttggagaagtcggcaacgaagaagaaacatgcaagcttgtcgattggcatcgcaacaaaaaactttacaccgctattcgcgctcgtttggagcaacacggcggtaaaggcgacaaggcattttctgccaataacccactgcgcaaacccgataccaagggcaatccaacgggtccggtagtgcacggtgtaacgatggtcatagacaaactctccggcatcccgatacgcggcggtatcgccaagaacgacagtatggtgcgggtggatgttttcaccaaggcaaacaagtttcatctcgtgcctgtatatgtgcaacattccgcaccagtctctaaaggacaaaagagggtactgccgaatcgtgcagtcgtggcgttcaaagatgaagctgaatggactctaatcgacgacagctttgagttctgcttctcgctgcattcaaatgacctggtgcgagtgcagcaaaaaggtaaagctgccatcgtggaactggaagcattaatctctgggcacatgaccgcagcctacaaattggtaaagatgggatgattgaaggcatcggtgttaaaacagctttgagcatcgagaaattcaacgtggacgtactcggcaaccactacccagccccgccggagaaacgtcgtgacttggcgtagcatcgtcatctcacgccccgccaagctgcggcgcgagcaattccggcttgccgtcgaacaggagaaaactgcgttcgtaccgttcgaagacatcgcggtgatcgtcctcaacaaccgcgaaataacactcacccatcccgtgctgtcggcctgtggcgaatatggcatcagcctgtttgccacaggcaacacgcatcatcccagcggtgtattcctgcctttcttatcgcattcgcgcgccacacgctggctgcgtctgcaactcgacttgccgcgccctgtcgccaaacaaacgtgggcaaccatcgtgcggcagaaaattgttaatcaagcaacgtgcatgcaactcatgggatgcgagggcacggatcggctggattcttacgcacggcgcgtgcgctcgggcgatgtcggcaatctagaaggacaagccgccgcgttttatttcgcccaactttttggcaaaggctttcaccgcgaccaagcacgcttcaccaatgccgctctggactacggctatgcggtgttgcgcggcacgatcgcacgcggcttagtggcgcatggtctgttgccgtctctggggatttttcacgccagcgaacaaaacgcttttaatcttgccgacgatgtaatcgagccgttccgaccgctggtggatttgttcgttgccaaatacggctacgcgcaagatgacgaattgcgaccggagcacaaggtcgcattagtcgggctgttgaatgtcgatgtggcgatgccgcgcggcaaaatgtcggtgctctctgccattgaacagacgatcgaaagtttggcgcgcatctatgacggcggtagtgagacgctattggaactaccgatgttgattggattggagcagcaccgtttggagtgctgatatgagcgaggagacacgacggtttatgcgtttgcttgtgttcttcgacttacccgtggtcagcaaagctgaccgccgcgcctacacggtgtttcgtcgctttttgcttaacgacggatatgacatgattcagttttcggtttacgggcgcatcgtgaatggcaacgacgcattggaaaaacatatgaagcgattggtgaacagtctgccacccgaaggttcggtgcgatgtttaagtgtcacagaaaagcaatatgcgagtatgaaattgctagttggcttgccactttttcaagaaaaagctctcaagattaaccaaatgttgctgttctaagattaaaatttttcaagcaaaattccctcctaagtcaagctaggcgggcatttgcgtgagagctattgtaattcatccggggtgagagagggagctacaacattcgccgtgctggccagcatgatgcgccgattgtaattcatccggggtgagagagggagctacaacggtcgccttgatagatcgtcccgaagtggaattgtaattcatccggggtgagagagggagctacaacgcttttgccgagggtttccatgtctacatcattgtaattcatccggggtgagagagggagctacaacgcctggcgaaccttcaatccatcatcctggattgtaattcatccggggtgagagagggagctacaactaatctttagtaatggttaaaggcatttctattgtaattcatccggggtgagagagggagctacaactctggattaagatgtcccacaaggggacatccatccagagttatcgcttcgcgatgcttggcaaaaatggcgaagcgttaccgcccggtagcataaggatcgaagtgaattttttgattcgcgcacaagagtatattgcaaagaccgcccgataaaacgacaggaataaattacttgcggctgtacacaagttttgcttgggctaaacttcacggaactacgcgtcaactactttaatgctaaagccgaacaaagacgcaaccatcaaagcggccatatcgctgacacccgtatacaccaagctatttagggagctacagaaaaatggcgggcgcataatttttctgcccgaaatcgcagccagacaaaatctctttggtttttacgtcatcatgtatgacaacgagttgaaatttagcgcggctttatcgttagcactcctgggtgaagatcaatttcacaagttaaatgccgaactcaaagatgcgtcaaaggaagatcagcaacagtttttggatgcaatcgttgaacaaggcaactgggatgaaatactgaaatcttttcaaattcccaattctccccaagaatgggaagcggcgcaaaaacagttagaactcctaccgtcagaagaacgccaagcactcgaaaaacgaggcgggttcttttggtcatattatttcggaagtttcttcaacacacttgcgctcatggttcatggcgaaaaactaaccaccttagttccacaagccatcaacggcgatgatgatgctttcttaaaagccgctcaaacggatcgcatgcttcttattcaccacccctattttcgtgagcgcaaatttcgcgcacaaaatgagggcgacaaaaagtttttattccgcttggctaatcatgaatccatccctgtcttggtcggcaaaattcaattccccggcctttacatgctgtttggacttctggagtcatttcagtggctggacaaccttggtgcaacggagattttagacatctgtgtgcaagcaaatcttgatcgctaccagaatcgaattgatgacgagtgttatgtatcaaaacgcttgagggaatatcgtcagtggcagaagacgttaaggatgtcaaggatatgaaaaccggttttcgttccgttcctcagttctgcctaagtgcataaattccccaaccgttgcagggcgcattcgcaaacctgccgacggccaggagttttgcaatgccccatcaatccgactcaaacaatccggcaagtttaccagtcagcaacatcaccgaacccgccaccctgcgaccgcacgcccggatacacgcgcagcgtgtaacggacgggcaggagcagggtggcggtgcatctgagggtacgccgcccactaacagagtacccttaaaatacaatcccgaacaatccaagctgttgcgcttcggggtggatagcctgtatctctcctatccgggcgtgatgtccgaggactgggataacaaactcgcccgcctcaaagaacttgcccagcaggaagatgatctcagccagtccatcgcacaggtcacgatttgtgagcatctgttcgaggtacgcgataagggcgcggggcgttttgcttatgtgctggtagataacgcttaccgcatccaagccagcaacgcccgctccaagtccctgccgctggcctacgtgcagatttccagcgagtacctgacacacgccggaatcgaacaggccgaacaagccctgcgccatatcgtccacacgcttggcgtagtgcatgaacccgccaacatcagccgcgtggatttgtacgccgatttctgcgccgattgcgagatggacgcgtttgaaccgctgcgcgattgggtgacacgggtggaaaccctgacgctgcattacagtttcgggcgtttctccggctggagcttcggatcgggcggcgatgttgttgcgcgcctctacgacaaaactctcgaagtcgaaaagaagtcgcacaagttctatttgcacgagctgtggaaggctgccagatgggatggtgagcgtcaggtatggcgcatggaattcgaggccaagcgcaacgcactggtgagcctgcaactacccaagctcgcgcacttgttgccgaatcaggcagcactatggcgatacctcaccaagaactggctgcgcctgactgtgccgacagagacagatagcaaccgcgcacgctggagcaatcatccgctatgggatttcattacctcggcattcgattcaacaaatgagcaagccaaactgcaacgcttcaaccctgcccgcttacccgaagatgagcggctgttcgtgcatggtctgggggcgattacctcgttcatggccagccgtggcatcgaggacatcggcgaagggatcggcgagtatgtgcatcaagccaaggcgtatcacgtcacccgctccggctttaagcccgacgggatggagcgttatgtcgggcgcaaggtgaaggccaagaaccgcctttataacaccgtgctgaatgcacagccgcccgaacatcaatcaatcgaaaccgcccaccagcgggcgaaggatggcggtaatgaataagcacgactacaactgccaagaggctgcacattcgtgcgagacaggaacagcaaatcaacaacaaactgctgactacctattaccgcgcaagaccgttgagaaactttcaggactgagcagggcaacaatttaccgcttaataaaatcaggaaaatttccacgtcccttatccatcggtacgggctcagtacgttggcggcaatccgacgtgatagcttggcaacaatcacttagtccaagctctagcaaatgaaaatttatcagtagtgtccggttaacttagaaacatccgagccaaggttgagtactggcgcgggttgcagggcaatttattttggtgccgatttgaaatcagttta

SEQ ID NO: 2902 - DNA, 16482 bp, synthetic construct
  variation 15252..15386: note = note, n is a, c, g, or t
  misc_feature 1..16482: note = Synthetic
  variation 3077: note = note, n is a, c, g, or t
  source 1..16482: mol_type = other DNA
acaccctctccggtaagcgcaaaacctataccggcgattacaccattgatgagaaggccaagagcgccaccttgaccgagcagggcgtttccaaggttgagaagctgctgaaggtcgagaacctctacgatccccgcaacattgagaccctgcaccatgtcaaccaggccttgcgggcccatgccatgtaccgtcgggatgtggaatatgtggtcaaggatggcgaagtgttgatcgtggacgagtttaccggccgtctgatgcctggccggcgctggtccgatggtcttcatcaggccgtggaggccaaggaaggggtgcggatcgagagtgagaaccagaccctggccaccatcaccttccagaactacttccggatgtacaaaaaactgtccggcatgaccggtaccgccgataccgaggccgaggagttccacaagatttacaagctggatgtggtggtgatccccaccaaccggcccctgttgcgtcctgattatcctgacgtgatctacaagaccgagcgggaaaaatttgacgctgttatcaaggatatcaaggaacactatgaactggggcaaccctgcctggtgggcaccatctccatcgaaaaatccgaggtgctgtcggagctgttacgcaaacaaggggtgccccattttgtattgaacgccaagcaacatgaaaaagaggccgagatcgttgcccaggctggccgtaaggcagccatcaccatcgccaccaacatggccggccgtggtaccgacatcgtgctggggggtaatcctgacggactgttgaagcagtggaagctgaccaaccccgatgccagtgaagagcaggttgccgctcaactggagcagttcaaggcccagtgcgctcaggagcatgacgaggtggtggctttgggaggactgcatatcatcggcaccgagcgtcatgagtcccgtcggatcgacaaccagctgcgggggcgttccggccgtcagggtgaccccggttcctcacggttctacctttcgctacaggatgacctgctgcggatattcggttcagaacgggtggcaaaaatcatggatttcctcaagattgaggaaggggaggccattacccatggcatgatctccaaatccattgagaatgcccagaaaaaggtcgaagcccacaacttcgagattcgtaagcacctgatcgattatgacgatgtcatgaacaagcaacgcgaggtgatctacacccagcggcgtgaaattctggctggtcaggatatccgcgagagttttatggagatgctggacgagaccatcggcgatatcgtcaatgcctatgcctttgaaaaaaccgcaccattggagtgggactgggagtcgttgaccgaggctgccgggcgttgtttttctctgcaactggagctgtcacgtgagatgatcgcgcggcttaacgccgaaagtttacggaatttattacaggaacaggcccatgccatcatcgcccgcaaggccgaggagctgagcgatgaggtgatggatcaactgatccgggtggtgatgctgcaggccattgatacccactggaaggatcacctgctgaacatcgatcacctgaaagaggggatcggtctgcgtggttacggtcagaaagaccccaagcaagagtacaaaaaagaggcctatcatctgttcatggagatgatcatccggatccgcgaggagacggttgaaaaggtcttttgggtccagcttgagcgggaagaggacctcgaagagctggaagaggagcagcttgagaaagggcgcaagctgttccagaacatcatcagcaacgaggaccacagtcaggaaccggcaaaaagctccaaggcggcggggcgtaacgagacctgtccttgtgggagcggcaaaaaatacaagaagtgttgcggtaagtaatggaacggatggtttgaagaggctttgctatgtccctgaaaggttttcaattttctgtcgttgaggcagccatcaagaagccgggccgcaaggacttggccctgatctggtccgaggtgcctgccacggcggtggctgtttttaccaccaatgccgtcaaggctgctccggtgctgctttccatggagcggatcacctgcggacaggctcaagccttggtggtgaacagcggtaatgccaacgcctgtaccggcagccagggaatggttgacgcccgggagactacccgcctgttggctgaaggattgggtgtcgacgagcagttggtgcaggtttgctccaccggtgtgatcggcgtaccgttgccgatggatcgcttgcgggccgcattgccggcactggtagagggacgtggcgctgccaccctggataccttggccgccgccattatgaccaccgacacctttcccaaaacagctgtccgccagggttcggccaacgggtccagctatacggtggctggtaccgccaagggcgccggcatgatcatgcccaatatggccaccatgctggcctttgtgctgaccgatgctgcggtggagccaggtctgctgaaccgtctgttccgtgcggcagtcgatcgttcattcaacgccatcaccattgacggtgatacttccaccaatgatacctgcctgctgatggccaatggcgctgccggtaaccagcagattaccggcgacactcctgaggcgattgcttttgccgcattgctggatgaggtgctgttggacctggcaaagcagatcgtcaaggatggggagggggctaccaagtttgtagagatccgcctgaccggtgccgttaatgatgccgatgccaagcgggccgccttggcggtggccaactccagcctggtaaaaaccgccttttttggccaggatgccaactgggggcggatctttgccgcagtggggtattccggtgcccaggtggaccctgaccgactggcgctctggtttgatgatgtctgcatggccaaggccggtatctttgccggtggtgatgctgagacgcgcggtactgcagtgcttcagcaaaaagagctctgtgtgacggttgatcttggtttgggtgccggacaggccnctggcgctctggtttgatgatgtctgtatggccaaagccggtatttttgccggcgctgatgctgaggcgcgcggtacggcggtgctccggcaaaaagaactctgcgtgacagttgatcttggtttaggagccgggcaggccacggtatatacctccgacctctcccatgactatgtttccatcaacgctgactatagaacctgaggagccctccatgaaggccgtctttccggttgttgtcgcattgttcctcctgtctctggtttctttctccgaggctgccccgctcagggtaacagagttggcagttaccaccaaggtatccaaagggaagccgatagatgcggtgcaccgtatctacaatcgctcggtacgcgccctctatgggtttacccgcacccagtccgaccctccgcaagagacgacagtcacgcatatctggctgcggggggggcacaaagtaaaggaggtcaccatgccggtcaaggggcgccgttggcgtctctacagcaccctggccgtggatgcctccagtatcgggagttggcgccttgaggttcgtgatgccgccgggcagcttctcaaggctgctgacttccagatccattgatgacgttaccccgcatgctgcatacctgtttgcagcgcagccttgttcagctgtgcgggtgtctctgcgttttggtgaccgggctcagcctggtcccagccgttcgagctgaaaccgatccgatcggcgaggctggccgggttgcggtgatcgaattcatgctgcagcaggccatcagccgtggtctgatcagcggtgccgtggtggtggtcggagaccatcagggcattctctatgaaggcgctgttggtgtatccggtttcaatgccgctgctccaccgctgaccactgccgctgtcttcgatattgcctccctgaccaaggtctttgccactacccctgcgattgtcaagctgctggacgacggcaagctgtccctgctggatccggtatcgcgttggtttccagaattcgaaggcagtgatattaccatcctcaatctgttgacccatacctcgggactccatgacgtggggctgaatcgcgctgcacccatgcagagcgccattgaacgagctgctgcccagaatgggcgggttgcggccggcagtcgtttccgttatgccgacatcaattttatcctgttgggtgagctggtgcgccgtatcagcggattgccgctcgaccactatgcccgtcagatgttctatgcgcccctggggatgcagaccgccaattttttgcccccccagagtgcgaaccatgctcccacccttggcggcggacgaggggtggtgcaggatgagaatgcccggatgctgggtggggtagccggccatgccggcctgttcagttcgattcacgacctggcacgttttgctggtatgctgctgagcgggggacagctgaacggtaccagagtgctttcgtcgcgggctgtggaccagatgaccgcaccgtattttttcagtggcggcaagattgtgcgtggtctgggatgggatcacgaatcacctttttcagctcccaagggtactattttttctgaattatcctatggtcataccgggtatagcggtacctcggtctggattgatcccgatgtcgacctgtatgtgctgcttctaacaacccgtcttgattatcagcgtctgcgcagtttcagtaagctgcgcggtgatatttcgaccctcgcggcggctctgtttgtggggcgtgagcgccgggttggccttgaagtgcccatacatacgggtccttgacacctcataaccggtatgctagtgttttccaacttttaaggcatcatcagcaatcctgcacagggaggaaccgatgggtaacatctctatacttctggctgacgatagcattaccatccagaaagtggtcggcatcatttttgccggtgaaggctacaccctgactgtggttgacaatggcgcggctgctgtccagaaggcccaggaactgctccctgatgtattgctgattgatgtgttgatgcccggcatgagcggctacgaggtttgtgaatcgctgcgagcaaatcccgcgttgactgacaagccgatactgctgctgaccggttccttcgaggcttttgatgaagctaaggccaagagttgtggcgctgatgatcacatcaccaaaccgtttgagtcacagcagatcattgccaaggtcaaagaactgtacgcattgggccagcgtcgtgctgccggtgcacctcctgccgcagtgccggagccggaagcgtttgtcgtgcctgcgccagcctttgaaccggctgatcagcctgcgcaggctgcagtctctcctgacgacccctggggggcctttacccaacagccagccgcggcaccggcatttgaacctgacacccttgaggtgaatatggagcagcctgatgtgctggccatggtgagtgaagagccgccggcgtttgccgtggagcgggccgatgatgccaatatcggcgcttcctgggtgccggttgaggagcaaaccttcgagtttgaggagcaggttgcagaaccgccagctgctgtcctggaagtggagcagccggttgtggcgccggaagaaccgccagtggcggcgattgcaccggttgcgatggctgccggtgcagtggcactctccgaagatcaattgcggcaggccctgatgtccgcttccaaagagaccatcgagcggatcgtctgggaagtggtgcccgacctggccgaggccctgatcaaggagaccatccgcaggattaccgacggcaagtaaccattgccacatagcgattgagatggggatggcaacatccccatttcctttttgaggaggaacagatgatcagacaagccattgccaaggcggtcgaatgccaggacttaagcgaaggcgagatgatcgaggtcatgaaccagatcatgtccggtgaatgcaccccggcccaggtcggttcgttcatcaccgccctgcggatgaagggggagaccattgcggagatcaccggtgctgcccgggtaatgcgggagcgggccaccccgatccgggtgggcagaggggtgctggatatcgatcgtgacgatatcaatcttgatcaggagaccatcctggacgtggtcggcaccggtggcgacggcaccaataccttcaatatctccaccacagtatccttcgttgtctcggcctgtggcgtcaaggttgccaaacatggcaaccgttccgtttcttcggcctgcggcagcgccgatgtgattgaaaagctgggggtcaacctggatgttaccccagacatcgttgaacgttgcatcagcgagatcggcatcggcttcctgttcgccccggccctgcatggcgccatgaaacacgccatcgggccccggcgtgagatcggcatccgcaccatcttcaacatcctggggccactgaccaacccggccggtgctgaccgtcaggtgatgggggtctaccgcgaggatctggttgagaagctggccggtgtgctgcaccgcttgggctgcaagcacggttatgtcgtgcatggcaaagacggcatggatgagatcaccctgaccaacgaaaccgctgccgccgaggtaacccctgacggtgtccggctgtttaccatcacccctgaagagttcggtctttcccgctgcagcatgcaggaactgaaaggtggcgatgccgctgccaacgctatcattgtccgggatatcctgaatggcgcccaaggtcccaagcgcgatgtggtgctgctgaatgcggcctatgccctggtggccgcaggccgctgcgcaaccgtgccggaagggatcaccctggctgcgaattccatcgacagcggtgccgcccgtggtcagattgaaaaactggcagcccttacgagtcagctgtaattagtcagagggggggatatgatcaaggatctcaaagaacagtattcaccactttactttctggcagcgctcggggctggcggaatggcggtttctttttacatctacctgttcttcatggtaaagcaccccgatacgccgatggcaacggctgatttcattttccccctgattgcacaaaacaaccttgtgtcagtcttggtactactggatctgggaatgattatcggtctcgccctgcttcatttcaggctcttgttctggaacatccgggagtacgggcttttcaagcagaccgaggcctttgaacagcttaaaacctcaaacaacgaagttggcctgatggccattcccctgacctacgccatgacgatcaacgtctgttttgtcctgggggcgatcctggttcctggtctgtggaacgttgtcgaatatctgttcccctttgccctgcttggattcctgctggtcggcatctacgcccttaaactctttctcgcctatgccacccggatcatcacctccaagagcttcgattttgtcaacaacaacaacctgagccagatgatggccatttttgccttcagcatgattgccgtcggtcttgcggctcccggagccatgagccatcacaaggaagtgtcggccatcggcatctttttttcggtatttttcagctccatttcaattttactgattgttctcaaaggcactctcggcttcaaatccatccttgagcaggggatctcgcgcgaggccagcgtcagtctctggatcatgatcccgatcctgaccttgctgggcatcacttttgtccgttacaccttcggctttgcccataactttgaccatactgaggcagtttcgcgctcatggctttttctacttacctcggcagtgatctccctacaactgatgttcggcctgctcggctattacacacttaaaaaactggactactttgctgaatatatctacggcccgactcgcagcgtcggcagttacgccatggtctgccccggcgtggcttttatggtctacggcttcttctttgtacacctgggactggtgttgaatgatgtgctgcagcagttctccgtggcatatttcatcatcctggcgccgtttgtctatgtgcagttcaagaccctgcttttgatcttccgtctgaacaagaagatgctgggcacaccggtctaagttaggtttcagcctttcgtgctactacaacctgaaagacatcactgatgacaactccagatattttaaagacaatcctggcccataaacgggaagaagtggctgctgccaaacgccagaccaccattcaggagctggcaggccgtatctccgacctcgaagataccgtgcgcggttttgaacggcacctgcgtgaggccgttgccaccggttggaccgccgtaatcgccgaggtcaagaagggctctcccagcaagggtctgatccgcgaggactttgatccgctggagatcgccgagatctaccagaataacggcgccacctgcctgtccgtgctgaccgaagaaaaattctttatgggctcattgcgctatctggccttgatccgtgaacaggtcggcctgccgctcctgcgcaaggattttatctttgatccgtttcaggtctacgaggcccgtgccgccggtgccgacgccattttgttgatcgccgccatgctcgagccgcagcagattactgatctggccggtctggcccgtcagctgcaccttgatgttctactggaggtgcatgacgagggggagatggaggttgcctgcggcactgacatcggcctgatcggggttaataatcgtaacctgcgcacctttgtcactgatctgggcaccaccgcccgcctggcgaagatgctgccggcagaacgtctgctggtgtcggaaagcgggatcagcagccgggctgatatcgaacggctacaggccgatggcgctgcagcctttttgatcggtgaagccatgatgcgggaaacggatatcggggccaagcttcaggaattgctggggtaggggatgcagcagtatgatttacaacgaaagcctgtcgacagtgtgtcggcaggcttttttgtgtctatttggtttgtatgcgacatattcggtcagagccgtatggtaaggtgtaacaatgcatagaattgtagtcgtagatacagaaaccaccgggctgtcggtcaaaaacggcggtcgcgtgattgaaatcggtgccgttgccgtggagaatgggcaggttgtggctgaactggcaaccctgattaacacaggtgcagtgatcaactacggcgcctttcgggtacatggcatctcccaacatatgctgacagataagccaaccccggaaaacgtctggcccggatttgtcgagtttgtgggcgatagtccactggtggctcataacgctccctttgatcgtgcttttgtacagtatgaactgcacctgctgggaatgccgtatgccaacccgtggcactgcaccctacagctttgccgcaggaaactgcctcgtctgtccgaccaccgcctggaaaccgtttatcggcatctgtttggtggactaccggaagatgtacagcgccaccgggcgctggatgatgcccggatggcaacgcgggtctggatggagctgcagcagaaaacctgaaaccctggacgctatagggggagggtttgcgggtagaatattcagtatatcgaaggtcagaacgtaagctggcaatgtgccagaaaggtggcatagttttgaaatcattacagttggcagaggtgtcgcatgtgccaaataaaaagcccgacattgctgtcgggctgggttcggtcgacccagaaggatcgtccttattgtagtaacggctctcaccccggcgaactacaactgatccttatatacccgaagtaatctttcaaatgcaagcggattcattttccagggaaggagcttaaatggaactctcgcctaaacattatgtgcttggattggatattggtatcgcatcggttggtgctgcgttacttgcagatgatcacatcgaagcactgttcgtccgcacgttcgataaggctgaaacagccaaagaaggagaatccctgaataagatcaggcgtgatgcaaggctggtaaggcggcgtctgcgtcgacgtgtccagcgcctgcttaaactgcgccgcctgttcaagcgggttggtttgctaaagcagcagaacgaaatttttgatcatgcggttcttgtttcaccctggcagttacgttccgacggccttggtcgcaaactagcatcgcttgaatgggcaaacgtgctgtatcacctggttaagcatcgtgggtttcaatcgaatcgtaaaagtgagttgaaaaacgatgaagataaaaatatgggtgagatgctttgtagtatagctgaaaatcagacattactggcccattaccggaccgttggtgaaatggtatggaaggatgaacggtttactcttgctaaacgcaacaagggcggtagttacaatcataccttgtctcgcgctgatctcgctgctgaactgaggctgctgtttactcagcagcggcagcttggcaacccgcatgcagctaatgattttgaacaagaggtgatgtcattattgatggagcgtaggccgatgcagaatatcctgcatctggttggcaaatgtacttttgaacctggagaatatcgggcgccgaaggcgtgctactcatcagagaggtttgtctggctgacaaagctgaacaacttgaaaattgcaggtatcggcaccgcacgccctctttcaccggaagaacgccaactgctgatgcccctgccattcagccaatcgaaactgacctataaacaggtgcgtaaaattttgggacttggcgaagctgaaagatttgtcgggcttgactgccgtggcgataaagatcctgaaggtaaaatagcacttttcgaagcaaaagcattccacaagctacgcgacaaatatgaaaaatcagggttggtgacgcaatggcagcgcgatagccgcgactttggccggttgaatgatcttggatacgcacttaccgtgttcaaggaggatagcgaaacaaaggcctggctgacagatcgtggatttgagcctgaagtcattgaagcggtgctggaaatctcgttcacgcatgtcatcaggctttcgctgaaggcgcttgataagattcttccttatatggagcgaggcctccgctatgacgaggccgtccaagaggccggttatgcccaccacagccaaattcagggagagagtaggactaaaactattccagcgatcagccgtgatgatatagccaacccggttgtctaccgctctctcaatcaggcacgtaagttggtgaacgccattgttgaaaagtatggcgctccgcattcggttaatattgaacttgcccgtgaccttaacaaacccctctcagaacggcagcggatcaaaaaagatcaagataaataccgtgacaccaaagagaaagattatgcccagtttatagaaacctttgggttgcaacccagaggcgatgaactgctgaaatggcgattgtatcgggagcaaaacgggcagtgtgcttattcacagaagccgcttgaaatcaccagactctttgagtctggctatgccgaaatcgaccatgcgctgccgtattctcgcagctttgatgatggcctcaacaataaggttttggtacatgccaaagaaaatcgtgacaagggaaaccggacaccttgtgaatatctgcgtggtgcggacgacacccaagagtggcagcagtttgtggcttgggttgtagccaataagaactaccggatggcaaagcggcagcggttgctacgcaaagactttggtgagaaagaggcaaacgagttcagagagcgtaacctgaccgatacccgctatgcctgcaagaaattcaaggaactggtggaaacccatctgcaactggcggatggatcagaaagtaaatgttgtgtggttgtttccggtcagctgaccgcctatctccgcgcccgttggggcttgaataaggtccgttcaaacggcgatctacaccacgccctcgatgctgcggtggttgccggttgtacccgtgcgatggtcaagcggcttgccgattattctcgctgtaaagaacttgcaatggttcggggagaatttgttgatcctgaaaccggggaggtgcttgattctacgggactggcaaaggcagagaaacacttcccgcaaccgtttgaaggttttcgggcagagcttgaagcccggttgtcgccaaaccccggcgcgttactgccatcattggtggatgtaccgccgatacgggtatcccgcgctccaaccaggcgtggcctgggagcagcccatcaagaaaccatccgttctgccagacatctggatgaggagatcagcagtgtcaaggttccacttacagcgctgaggctaaaggatgtacccagaatagctggtggtggagacccacgcaaccaggctttgattgccgctattgaggatcggctccgtcaacatggagacaacggtgagaaggcattcaaagaaccgctgcgtcgtccggcagcgccgggtaaagaagatgttgcgccgcttgtccgtacagttcggttgactgatgtccagaagagtggggtgatcttgcctcatagaggaggtggtattgcaaaaaatgcaagcatgcttcgtgttgatatctttagtaaatcaggaaagttctttgcagtgccgctctatgtggccgacgcggttaagaaagaacttcccaataaggctgttgtcgcctttaagtctgaggcggaatggactgttattgatggtagttacagctttttatttagtttgcacccgaatgactggctaaaggttacattcaaaaaggatgccccaaaggagggctattactctggacttaatataagtactggagctatttccctttgggcgcacgatagaaactcttcggttggtaaaggtggtttcatggagggaattggtattaagactgcgttggctctggaaaagtgccatgttgatatgcttggcgggttacatcgggtgcagagtgaagttagacagccattgcggcgtaagtaggggtgaactatggcatggcgcagcgtggtcatcagtaatccggcccagctttcctgcaagcagggtcggatgcagatagcgcagggaggcgaaaccgtttcggtgccgatggaagatattgccgtgctggtgatggaccatccccaggtgaccctttccgctcatctgctctcggcttgcgctgactgccagcttgcagtgattacggtcaataaaagccatatcccgaacggcatgttccatgcgtatctaccccatagccgcgccttgaaagtcatgcgccaacagcttgccatgacagaacctcagaaaaaaaggctgtggcagaccgttatcaggcaaaagctgatcaatcaggcagcggtactggcgaatgcacatctgcgcactatttctgaagcactttcagggcttgcacaccaggtgcgctctggtgatccagataattatgaagcacagggcgctcaaatctatttttccgctctgtttggcaaaggctttaaccggtctgatgaaatcgctctgaatgccgcccttaactatggttatagcattgtgcgtggggccgttgctcgcagcctggtcagccatggttttctgccagcgtttggtctgcatcattgcagcgaacagaatgcttttaacctcgccgatgatctgttggaaccatatcggccggttgtagaccagtttgtgtatcagaaacatcatggccttattgagcttgattcgagtgtcaaagcgagcttggtagggcttctacaccatgacctgccacgagtagatcatggagaggttactgatacgtcaacagtgctggcgttggttgatgccacggttgtaagtttgggccaggaaatggttgatcagcaaaataggctggtgctgccaatagtgtcaaatgcaccggtatgagccaggaaacccgaaaatttatgcggttacttgtcctgtttgatttgccaaccaccactaaagcggctaagcgagcctatacgctgtttcgccgttttctgatacaggacggttacgatatgatccagtggtcggtatacgggcgtgttgttaacggttttgaccaggcagaaacgcatcttaaccggttggcttgcaatctgccaccatctggctcagtacgctgccttcagatcagtgagaaacagtttgcctctatcaagttgttggtgggagataaaaagttacaggaaaagaagcttgatgcggcccagttactgctcttttaagacaaaaaatacgcccctgaaccgtcgtaagctcaagcttgacaacggttcaggggcaagttgttatagcacgccggggtgagagagggaactacaacccaaccgcaccaactctgaatccttgcttcgttatagcacgccggggtgagagagggaactacaactgcggtagtcgctgtcgctgataggttcattgttatagcacgccggggtgagagagggaactacaaccagctcaaccaggtgcttctcaatccccatgttatagcacgccggggtgagagagggaactacaacaccggtcagcacacccatctcagggatctcgttatagcacgccggggtgagagagggaactacaacgactacgggccagcggctggcggtggtgaagttatagcacgccggggtgagagagggaactacaaccttttgcacgatattaccggccccgctggggttatagcacgccggggtgagagagggaactacaaccgctactcgtagattgtgctgcaatctgtcgttatagcacgccggggtgagagagggaactacaacacaacgccccaggtaaacctgatcaaatcggttatagcacgccggggtgagagagggaactacaacgtgatgatatcgacggcatggtctttgagtgttatagcacgccggggtgagagagggaactacaacatatcccgatggaatcgcttaacccttgcggttatagcacgccggggtgagagagggaactacaacgctcaaacacgccttgctaccgctcaagctgttatagcacgccggggtgagagagggaactacaaccannnnnnnnnnnnnnnnnnnnnnnnnnnnnnnnnnnnnnnnnnnnnnnnnnnnnnnnnnnnnnnnnnnnnnnnnnnnnnnnnnnnnnnnnnnnnnnnnnnnnnnnnnnnnnnnnnnnnnnnnnnnnnnnnnnnnnngagggaactacaactggccgaaggatatgacttgacgcacgttagttatagcacgccggggtgagagagggaactacaacatcgactcagcaaacagccgctgtatgtaggttatagcacgccggggtgagagagggaactacaaccaggcttcgcggtaagtgcagcccttggcggttatagcacgccggggtgagagagggggctacaactcctgttccctctctcaccccgatgcgcaaaatggttgtaaagggtgggtacaaattgtacctaaccttgaggtaatcacctgtcgaaagattgtcgacaggttgaaccacaggctcctgcaaaattatcaaggcaggtggtaagatgctgtcgcccttgcggaattggcttcgaagtcaggtgagtgctgcaaacagcgctccgcaatctagcaggatgttaagtgggggacaggttgtcccccacttaacaatgagccatacgaaattatcgtacggttgaattcaagcccgtgacattttgtcacgggttgtattgccgtcctgggggtacaaaatgtaccccagtagactgagttgtccggagatttcggacaactgtcgaaatattaatcgacagccgtgatgcccaaaaataccagaagcggaaaagatagcagagcttttggggcggtcttacaccgtacgggcgagggaactacagctagattattctagtaaggagtgtgttttgaaaacgatagttccggcaggaataggaataattctttcgattgtcttagcatatttgcaatacagaaataagagcgttaaacggtggctcatgcagaggaagctggaagcatggcaccaagagcagagaaaatgccctgtttgcggaaagcggatgaatccgacacttaccaaggctgaaaataaaaaggtatggtgctgttcagaatggcaaacgtgcaagacctacattgagcatcacacagggcggcgcctatcggcggcagaagttgagcgcaccgatggaaagcgagctttataatagaggggatgagcctagtgtacaagagatagaggggagcccatgaaatgcgagaaatgcggatcaatgt

SEQ ID NO: 2903 - DNA, 16289 bp, synthetic construct
  source 1..16289: mol_type = other DNA
  misc_feature 1..16289: note = Synthetic
taagcgtcactaatgccgccaaagcgcggctggaggcggtacgttcgcaagcggctgtatcgctgaatcaagcgggttatgccaccttggtggcagaaatggatggggtcgtaacgcaagtaatggccgaggcaggacaagtggtcgcgcaaggccaagccgtgatgcgcatcgctaaccctaacgaaaaagaacttgccatcagcgcctcagaatcgaaggttgctgacttccgcaagatcttcgcgcagtctaatgcaaaaaacgctgttaaagatgcagcaaaaaacgcaggcgtcaatttacgcgtggccttatggtcgcagcccggtaaatattatcccgcacgcattcgcgaaatcggcggcgcggcagacccaattacccgcacctatgcgattcgcttgagtctgcaaaatccggatgaggcgatccaattaggcatgaccgcctatgcggtttttggcgccgctaatgaatccgacaccctgagcgtaccgctctcctccatttacgtaaaaggcgatcccaaaggcgatgtggtgggtgtgtggctgattgcggccgatggcaaggtatcgtttaaacctgtcacggtgctgcagtatcgggagaccacggcatttattgagcccctgcaaggaacgggtagcgggatcaaagcaggtgatcttattgtggctgctggtgtccataaattgcgcgaaggtgaaatcgtcaaaccagtcatcgatgcgctgattaaaggcgatggcaaggtttcttatctatctccagatacagcgactgatgtaaccaccatcgcgctgaaacgctaaccaaccaacgaatccattcagattccatctccaaaattcgcgccaacaataatatgaaaaattttaatctttccgaatgggcattgcgtcatcagccgttgattttatatctgattattatcctgggtgtggttggcgcagcttcttatggacgtctggggcaatctgaagatccgcccttcacgttcaaatttatgactattcgcaccgtctggccgggcgcttcggtcgtggatatggatcaacaagtcactgagcggctggaaaaaaaattacaggaagtaccgaatatcaatttcctgcgcagctattcacggccgggtgaatcattgatttttttcgccatcagcgacgccgcgcctgcatcggcagtgcccgagacgcagtaccaggtgcgtaaacgcatcggcgatattcgtcagaccttgccgcaaggtgtggttggccctctgttcaatgatgagttcggcgataccttcggcaatatttttgcgctgacaggcgaaggtttttcatatgccgacaagaaaatatatattgaccggctgcgtcgcgaattactgcgtgtaccggatgtttcaaaagtggacatcattggcgagcaggaagaaaaaatttacatcgaattatccaacgtcaaacttgccaccctcggtattgacggtgccacaatcatcaccgctatgcaggcgcagaacgctgtaacgcctggcggcaccttcgaaaccgccaccgataaaatatttgtgcgcacgactggcgcattgaacagcgttgaagcgattcgcaatttcacgctgcgcgccaatggtcgcgtgtttaaaatcggcgacatcgctactgtcaaacgcggctacattgatccaccattttccaagatgcgttatatgggccatgaagcgatggggctgggcgtgtccatgcgccaaggtggcgatattatttcgctcggcaaaaacgtggacaaggcgctgcacacgcttgaaggcacattgccgataggtcttgaattgcaccgggtcaatgatcaacccaaagcggttgccagcagcattaatgaatttgcacgctccctcactgaagccgtgattattgttttggccgttacatttttcagccttggcattcgcaccggctttgtggtcgcactttcaattccgctggtactcgccgccacctttttgttcatgtatttattcgatgtcggcctgcataaaatctcgctgggcgcgctgattttatcgctcggcttgctggttgacgatgccattatcgcggtcgaaatgatggccatcaaaatggagcaaggttgggatcgcaccagagccgccagttttgcgtacacctcaaccgcctttccgatgctaacgggtacgctggtcaccgccgctggcttcttgcccattggcctggccaaatccggcaccggtgaatatacccgttcgatctttcaggtgacgacgcttgcgctgattatttcctggtttgccgcggtcatttttattccgtacttaggctacaaactattgccggattatcgtgatggtttaccggtggtgaccccgcgcatgcgacgtattgccgataagctggcacgccttccgttgatcggcaaacgtctggcaaccagtattgcgcccagcggcgcaactgatcacagcgccatgcataatcaggcacatgttgatcacgatgtttacgacaagccgttttacaaacgcttccgtacattggtggcctggtgtgtccaatatcgcaaaaccgttattttgattactgtgctgctattcgcggtcagtctctattcgttcaaatttgttcagcaacaattttttccctcatcgacccgggtggaattggtgattgatcttaaattaccggaaggctcgtcatttaccgccactgagcgtgaagtaaaaaaaatggaagcgttgctcgataaagaaaaaaacctttatgaaaactacgcgagctatgtcggcaccggggctacacgcttctactttccgctcgatcagcagctacctgcagccagtctggcgcaatttgtcgttacggccaacagcgttaaagcgcgtgaagaattacggctgcatctgctgagcaagctggataccgaatttccggcgatccgcacgcgtgtgtcacgtcttgaaaacggcccacccgtcggctttccgattcagctccgtgtatcgggcgaagatattccgactatccgcgccaatgcgcggctggtagccgaggtattgcgtgctaaccccagcaccagcaatgtgcagtttgattgggacgagcgcgccaaggtcatcaagcttgagattgatcaggacaaagcgcgtctgctgggtatttcaacccaagagctatcgatctttgtaaacaccgcgttgaacggggtgcaggccaccactttccgcgagcgcgataagcagattgaaatattgattcgcggccccgataacgaacgagcccgtatttcgctgcttgaaagcctttccgtaccgacgcgctctggtcgggcagtgccgctatcgcaaatcgccacgattcgttatgaatttgaggaaggcattatctggcgccgtgaccgtttacccaccatcacagtaaaggccgatattagcgcagccaatgtgcaggctgcgaccgtggttgcagacgtaacgcctgaattgaacaaactgcgcgccaatctaagcccgggaaatcgtatcgatattggcggcgcggtggaagagagcaggaaagctggcgcctcaattgcggctggcattccactttttatctttgtcgtgctgaccgtcctgatgatccagctaaaaagttttcaacgggtgattttggtggtgctcaccgcgccgctgggcttgatcggggtggtcgctttcctgctgatatttaacaagccgatgggctttgtagctcaattaggcatcattgcgctgttcggattgattatgcgtaactcggttattttaattgatcaaatcgagcaggatattggagcaggtcataaaccttttgatgcgattattgatgcaacggtgcgccgcttccgaccaattgcgttaactgcgttggcggctatttttgccatgattccgttaatcaggtctgatttttttggccctatggcggtcgcgattatgggtggcttattcgtcgcaacgttgctgacgctgctgttcctgcctgcgctttatgcggcctggtttcggattcaacctgccacaccgggtaaagaaattaacccgagccacgcccaatctgccgcacttggctgaacatttttcaccgggcaggctgaatcaggcacgctacaataggcaaatgttaaatacattcgcctatttttttattgattatttttctaactttttttagttatttatttttatgcggctaataattgcgttcgtaatgggtgtgtccgcttgggcatcaagcggtacggcagcggacgcacagctgccgctgccagtcacgcctgttaatgctgcccaagtgttgccgccggcgttgccacccacacaactgccatcgcttcccgccgtccccaagccccgtctcaagatcgggcttgcactgtctggcggcggcgctcgtggtgcggcgcatgtcggcgttatcaagattctcgaagagcttaaaattccgattgactacattgcaggcaccagcatgggcgcgctggttggggcggcgtatgcatcaggcaccccgatcaaagagctggaacggcgcttggccactgtagactggaatgatctgtttacagacatcagcccacgcgctgatcgcagttttttgcgcaaagaggaagaccaggcacgcttgttaaaactggagctcggcgtaaaagaaggcgtgctcagcctgccgcctggcgcgatttccgggcaaaagctggacacgctcttttcaatcatcacccgcaactctgctggctatactgagtttgataaattgcccattccgtttcgcgcggtcgcgactgatgcggaaaccggtcgcatggtgattttcaagcgtggccgtctggcggacgtgatgcgcgcctctatgtcagttccgggcgcgattgcgcccttcaccatcggcgacaaaatttatctggatggcggcctaacccgaaacctgcccattgatatcgtgcgtgaaatgggtgccgatattgtcattgccgtgaatattgcaggccccttactgaagcgcaatgaactgcaatccatttttggcgtatcgctacagatgatcaatattctgactgatcaaaatgtgcgtaattcaatcgagacgctgaaaaaagacgacatccttatttcaccgccgctggatacgattggctccaccgatttcaattttgccgtggatgccatgactatcggtgccgccgcaacgcgcgaaattgccgacacactgcagcgtttaagcgcgcccgattactatccggcctttcgcctggctcaattacagcaaattcaagtgccggttgcgttgagtaccaaaattgcagaggtacgggtggccgggctggatcgcgctaatgccgatgagctcaagcgcacactgggtatcaagccgggtgattcaattgatttcaaacgcatcaacgacggcattagccgggtatttggcaccggctattttgaacgcgttaattatggcctgatcagcgaaggtgatggtgctgacgcgcgacagattctgaccgtgactgcgcgtgaaaaacaatggggccccaattatctgcgctttgcgctttccatggccgccgatacagccggcgaaggccgttttaatttgttactgcgctatcaacaaacccagttcaacagggctggtgctgaatggcgcaacgacttacagattggccgggaccggcgtatcgcctccaatttttttcagcctttcagtatcggcagctttgccaatatctccgctggggcagagctaacgcggcgccccatcgatatattttctgccggtcgtcgtatttcgcaatatgatgtttcgaccagcaccgttagcgttgatttagggctcgacattggccgcagcactatcgcccgcctgggactggtacgcggcaacgacagcgccgacgtgaacatcggctcgtttgcgtttcccaatgtaaagctgaaacagggcggcataaaactgcgcgtgctctacgacagcctggatgatgcaaattttccgcgcgcaggtagcaccgccagttttgattattacgccagtataaaatcgttggccgcaacgcgcgattaccgcaagctggaattcaatttcaccgaccactattcattcggcgatcacactttgtcgctggccggccgctacggtacgatcattggggcgaagcagtcgatcccgatttttgatcagttttcattaggaggatttttgcagttatcgggctatttgcccggagagctgattggcgaatctgttgccatggcgcgcgcctcctactatcgacgagtgggcaattcatcaaatatgctgggccgcaatctatacgtcgggttttcgactgaattaggtcgggttgcacaaaatttccaaaccctgtcgaataataaaatcaagtattcactcggtttgtttgtcggcgttgataccttttttgggccgctatatttaggctatggccgttcgcgagagcatagcggtatcttctatttctttctcggtcagccctgatatttttcggccattatcgaaaaccatttgaaggtcatggaatggtcataaaacgttaagggggctgtcatctgcggccattattctcagcatagtttttggtagtagcctcctcctccgcccggcttaatctgtgtgcaagcaggttatgactcataagcggatttgtaagcggcgaacttctccaagttcgccgttttttttcgcgcaaaaaaaaaccctgaataaagttgtcatgaaaacgtcaacgctttgcagcgttgccgacacattcatcgcgtaacttacgagaaacctcgaaaaataaaaccccatattctcaaggaaaactattcatgcttgcttcttttcccctgtgcggcgccacaaaatctgcccacaccgcaaagccaagcccaaagcaacatgacgcccgcgcagaattgcccgcctctgcgtttgaaatgcgcatagctacgagcgatgatgaaattgaagaagcgcaacgattacgttatcaggtttttttcgaagagttgggcgcacgtgcaaagtcaaaacgatcactattggatgctgacgaatacgatgccgactgcgagcacctgattgtgcgtgagcacgcaacgcagcaagttgtcggctgctaccgcatcatgcgaccggacattgcggccaaacgccgcagctattatgccgacagcgaatttgatctgtcacggctccatcacctgcgcggcagtatggttgaagtaggccgcgcctgtattcatcccgattaccgaaccggcagcgtaatcatgctgctgtggtcaggcatcgccaaattcatgcttgaaaatagttacgaacatttgattggctgcgcgagcgtgagcctggccgatggcggtgccaatgcattatccattcatgccaaagccagcaacaactggctatcaccgcctgaatatcgggtgttcccacgccacgcattcccgcttagaggtcaggcctcgcttgatccacagatcccgccattgatcaaaggctacacccggctaggcgcgtggattggcggagaccctgcatgggatcccgacttcaacacggcagatttttttgtgctgctatcactttcccgcatgcccaaaaaatatctcaggcatttcatgaacgcggcttgattagcgccgccatccatcaaccgcccagaatacgactggcatcaaggctggaaaattagcccagccagcagtcgttagcgacggcggcctgctatgccaaataatagggcattgatggcaggccgcctggtatccaagcgccgcgttgccttctgcgttcctgatgcgctgcacacgggttgcagatgggcttcaaatgcgttgcacatacaacaagtttttcatgaccctcccctctctcactgcccctgacggcggaaagatgatctagaatcggtcatctctgtagcgcgttttgaaaggtgttttgtgcttaacgtattcgtcctcaataaccgtcgtctcaaccagctccaggttgatacactcgaagatctgaaaaattcagaacctatctggattgatctggtttcgcctaccgaaactgaaaccggctggatcaaatccctctacgactttgccctgccttcggtcgaagacatgcaggacatagaagccagcgcgcgattttttgagggtgaaaatggcgagcttcacttacactccgatttcttgctcgaagtcgatgaagaatcgcgcaacgttcccgttgcgtttattctcaaaaacaatactttgctgagcctgcatctggaagacctccccgtgtttcggctggtgcgcatgcgggcccgcacccggcccggctatatagaagacgctaaagaagtgctgctcgatctttacgcaacagacgctgaatattcggctgatgcactcgaaggcgtctacgccgagcttgagaaaatcagccaaagcgtactcactaccaagatcaccgatcaggaagccgcaagcgtgctcgcccgcgtcgctgctgaagaagatttaaacgggcgcattcgccgcaacgtgatggatacgcgccgcgccgtctcgtttttgatgcgcaaaaaactattgcagggcgaccaggcggaagaagcgcgtcagattctgcgtgatatcgattcactcgatagccacaccgctttcctgttcgataaaatcaattttctgatggatgccaccgtcggcttcatcaacatcaatcaaaataaaatcatcaaacttttttccgtcgcctcggtggcgctgctgccaccgaccctcatcgccagcatctacggcatgaatttcaagggctggttccctgaactggaatgggcctacggctacccctacgcgctgggcctgatggtggtctcggtgatcgtgccgttcgcgtatttcaagtacaagggctggctggactagataaggcgctctcgcgccaatcttttccatatagaaaaaggacttcacgtttgaacgctttgtcaggttgcgcagctacctgacttaaattgaggccgcatgcgacgcttgccggaaaaacttggtgagtttcaccatttcagttccggtaatttcgttaagtccggattcgctgatcttgtagccatttttcgcgtaaagcccaatcagtttatggttcctggctgacgtccaagtggaaaatatattgagatcgatcgtgtggaaccattgctcgccagccagcaacaattggtttgctacgcctcttttccgataagcgggtgcgacataagttgtggcgatcaggccaaattggttgccaccttcgtcgacttcacgcctcaatatagtatgaccaatgacctcatctgtattcagggtggccaccattacctttgccaaaacttccgccccagtcacatgccagagaagccgctgtcgtatccattcttgcgagtgcaacttgtcagcaaccgcctcgccttcaacttcaattagtgtgtcccgcatacgcttggcaatcaagtcgatctcgcaatgggaatccatatcgatatcccgaatgcgaagcgtttggtcgttttgggcagatacggaagggttcatggaggcaaagcagcctgaatgttggatacaagaaaggagtgttgccattggcacaattgcgccatgcttgcctaaaatttaggcagtacctaagtcttacgtgcagcgtcgggtagcgttctcgccaatacccgaacccgaccaacgggcatattcagtgccatcaatgtagcactggattcggcctaatcttatttttaagcacaagcaaagtagcggctttacagccttttttactccaaaccccccgccagtgctagactttgcatagcgcaaaaattaaaagcccgatggggttttaatccatcgggcgggtacatcaaatcgatactttgatttaatttattgtagcaacggctctcaccccggaagactacagccacaagaataagggagatcacgatgagaatcaagcatgattttgggccgctcacgtttgggtttgatattgggatggcatccgtggggtgggcggtattgaatgccacgcagattgttgatctcggggtgcgctgctttgataaagcggaaaccgcaaaagaaggtgaatcgctaaacctcgctcgccgaatggcacgcctcactcgcaatcgtctgcgtcaacgtgcgtggcgactgaccaaactggttagagttttgaagaaagcgggactcatcgagggtaaagaaacgctatacgcacctcgccctgacctcgataatccgtgggtgctgcgtgtcaacggattggatcgcaagctcactgttgacgaatgggcgcgcgtcatttatcacctgtgcaaacatcgcggttttttttggcaaagccgcgccgaagagaagaaagctgaaggtgatgccaaaggtgaagggggcaaagttaaacaagggcttgcacgaaccagggcgcttctcgctgacaaggactatcgcagcgcaggtgagatggttcttaacgagtttccggatgcgcagcgcaacaagcgtggcgattacaacaaggcgttgtccagagtgctgcttggtgacgaatttcgcttactgtttaatcgacagcgtgaattgggaaacgcgtacgcaacggctggtttggaaaaagaacttattggaacagcagagcacagaagcggcttattttggctgcaaaagcccgccctatcgggcgaaaagcttctcgcgatgctaggcaaatgtacgtttgaaaaaaacgaataccgcgcgcctaaagccagctttacggcagagcgccatgtgtggcttacccgcctcaccaatgtgcggcttatcgatgatgggcgtacacggagcttgaacgaaattgagtggcgcacggcattgacgctgccctacgaatcgcctgagaaatttacttacaaacatttgcgcaaagtgctggtaaaacttggggcgtctgaatcatttcgattcgccggcctcgcctacccgagcgcacggcaacgagatgaaggcaaagcaaaagatcctgaaatcgaaacgctggtcaagttgcccgcgtggcatgaattgaaagccgcattcaagaaggcagaacttgaaagcgaatggcagcaaatttcgactgcggcaattgaaggcgaccccaaaacactggacgaaattgcatggattttgagtgtttacaaggaagacgatgaagttgtgcgcgagcttagcaagctcaatttgccaaacgcagaaaagatgattgatgttttattggatattcgcttcgataaatttcattcattgtcactcaaagccctgcgtaatatcttgccgcatatggaacgtgggctacgatacgacgaggcatgcatcaaggcgaattaccaccacagccagctttttaagttgggagaaggaaaccaaaaatatctgccgtccctctacaaaggtcgcgacaaaaaaaaacgcatgatctttaacgaagaaattggcgatattccgcgcaaccccgttgtgctgcgcgcgctcaatcaagcgcgaaaggtgctcaatgcgctcgtgcatacgtatggctcgccgactgcggtgcatatcgagatggcgcgtgaattgtcgaagccgtttgatgaacgtcgagatattaaaaaagatcaggatgaataccgcgctctcaatcaaaaagataaatccacatttgccagtgaatacaacatcgtcggctcaccgcgaggaggtgattttgaaaagtggaagctttatcgggagcaaaggggcaagtgcgcatactcgttagccactattgatatcaatcgcctacttgaagaaggttacgttgaaatcgaccacgccctgccctattcacgcagctttgatgacagcaaaaataacaaggtgcttgcgctcacgcgtgagaaccgcaacaaagggaataaaacaccttacgaatatcttgacgggtcgagcaatagcgagcgctggcgtcaatttgtgggctttgtggagtccaataaagcctaccgaatcgccaaacgttcgcgattattacgcaaggattttgggctcgaagagtcaaaagaattccgcgaaagaaacctgaacgacacccgctacatctgcaagttttttaagaatcaagttgagcagtttttaaagctgcatgacaaaagcgagcaaaaacgctgtgtggtgctttcggggcaactcacttcgtttctgcgcgctcgctggagcttaataaaagtgcgcgacgaaagtgatcggcatcatgcgctggacgcagtggtgatcgccgcatgctcacacagcatggtcaagcggatgtcggattattcacgccggcgtgagttgcgtcaagtttcagagggctttgtggatgtcaccacgggcgaaattccgaaccctgtcatgtacgacaagctaaaggaacatttccccgatccgtggccgcattttcgcgacgaggtgcaggtgaggttgaaaatcgatgacaccaaattgctgcgtgaagaactggcgcggtttggcagctatgcacctgaagtcatcaatcaaataaatggcgtgtttgtgtcgcgagcgccgcagcgacgaagtggcggcgcggcccataaagaaacaatctacgctagagctcgccaggcacacgcgttgtgggtcaccgagaaaggcagcaaatcaagccgccccgcttcaggaaaggaactatcgaacctcgtcattgagcgcatcgggctggaggagaaagaccagaaaggcaagtttaagattacgctaaacaacttggatttgatcgtagatcccgtacgaaacgagaagcagatttattcgctgcgccaatggcttgaaggtcgcgacagacgcgaagcggaggccaaactcatcgaagcgaatacaggtcgtggaaaggagaagcggtctttaaccgcagaggaagaggcacaaatttttgagttacgcggctacccacggaaaccactcaaaagcgacccggaacacggcccatttacggggcctgaaatgaaaaccgtcaaactaaacgtagggaagacaactggcatcaccgtgcgcggaggcgttgcggcaaacgccacgatgctgcgtgtagatgtgtttacaaagggggggaaatttcatctcgttcctatatacgtgcatcaccgtgcgaagggactgccaaatcatgccattgtttcaggcaaagatgaggatgagtggacgttgatcgatgaaagttttgcatggtatttttcgctttatccgaatgatcttctacgagttgcgcaaaaaggtaaagccgctatatcggggtacttttcaggctgcaatcgtcgtaatggctctattgacctttgggcgcaagatcgaaataaattaattggtaacaacggcttaatagaatcaatcggagtgaaaactgccttaacagtcgaaaaattccacgtcgatgttttaggcaatatcttccccgcccaaccggaacctcgccgtggtctggcgtagtgtcgtcattaaccaacccgcaaagctcaagcgcgagcatttcgcgctggtgatcgagcaggaatcatctgcgcgggtgccgtttgaagatattgcggtgattgttttgcatcatcgcgaaatcattattacgcatccggttttatctgcctgcgccgactacggcatcgggcttttttcgacgggcgacaaccatcagccgaatggcatatttttaccctaccttgcgcacagccgcgccacgcgcatgatgcgcttgcagttggcgattgatcgcccgctcgccaagcgggcttgggcggagattgttcgtgccaaaatttctaatcaagcgcgttgccttaagctcacgcattctgcgcgtgtcgatgatcttgagtcgctggcgcggcgcgtccgctcaggtgacccggataaccttgaagcacaggcaagcgcgatttattttcgtgcggtgttcggcgtcaaatttgatcgttcgcagggcatgtggactccatttttcgtggtgcaattgcgcgcggcctggtggcgcacggtttcatgcccagcattgggctatttcatcgcagtgagcagaacgcatttaatcttgccgatgatgtgattgagccatttcgccccatcgttgatttacacgtcgccaaaatccggcctgcggatgacgctgcacagctttctccttcaaacaaggcggatttaatcgcactcctcaatatcgacgtgcgcaccccacgaggcgtcatggcggcactttcagcgattgagcatagtgtggaggcactggcccgcttatacgagcctgcacatgcgccgcagcgtccgcatgcacgtgctcgaagagcgatccctttaggcaggcgcaccgcaactgatgatgtgctgagtaatgcaaccaatggtgacagtggcgatgccgaagtcgatagcgcatcaacgcttgaatggccggaacttatcggcctaaccccgcatcggcgcgagatgtaagtcgatgagctcggagacgaggcgattcatgcgattgctcgtgttcttcgatttacctgtggtcagcaaaaccgatcggcgtgcttacaccttgtttcgccgattcctcctgaacgacggctatgacatgctgcaattctcggtctatggccgcatccttaatggcaccgacgcggagaaaaaacacatgcaacgattagtcgataacctgcccgaagcaggctcaatccgtgtgctgagcgtgactgaaaagcaatttgcctcaatgaaaatactcgtcggcatgccactttttcaggagaaaaaagtcaatgccgcacaaatgctgcttttctaaattgcccatttttagaaaaagaaaacccgcaaggcccaagagccatgcgggtttccagtcagtctattgtaggcttccggggtgagagagggagctacaacgtcatcggccacttccccaacttgatcacaattgtaggcttccggggtgagagagggagctacaacgagacaggttgctgtaaacgtggctgcatcattgtaggcttccggggtgagagagggagctacaaccaaataacggcaactgtccaacaagcctatattgtaggcttccggggtgagagagggagctacaacgaatttaccaaaggcaccgacaaggcccaaattgtaggcttccggggtgagagagggagctacaactttgcgtacaacgaagggattcatgcatacattgtaggcttccggggtgagagagggggctacaactgcggttgattttcaatacattagccaaaaattgtaggcttccggggtgagagagggagctacaactgccgagttatcagtcgcccgttacgggaaattgtaggcttccggggtgagagagggagctacaactgccaggagtcacgtaatatcaggcgcaatattgtaggcttccggggtgagagagggagctacaactgcgcggatcttcattagatcgcccttcgcattgtaggcttccggggtgagagagggagctacaacatcacaggtgaaacgatgttaatgcgcagaattgtaggcttccggggtgagagagggagctacaacgatgacggatcaactcaccattgtggaatcattgtaggcttccggggtgagagagggagctacaacataccgcgcacggtgagcgctgcgcccagaattgtaggcttccggggtgagagagggagctacaactataccgctgtgagtttgtccagatcaataattgtaggcttccggggtgagagagggagctacaacgacaccgtatcgtttaagtgacgcacaatgattgtaggcttccggggtgagagagggagctacaacgtaatggccttgcctaaaggtacagttgtgattgtaggcttccggggtgagagagggagctacaacggactgaaatgcccataaaaggctgattttattgtaggcttccggggtgagagagggagctacaaccggcttatcaagatggcgatgcaatacgttattgtaggcttccggggtgagagagggagctacaacctgtgttgaggctacgaaacaacttaattaattgtaggcttccggggtgagagagggagctacaacctgtgttgaggctacgaaacaacttaattaattgtaggcttccggggtgagagagggagctacaacctgtgttgaggctacgaaacaacttaattaattgtaggcttccggggtgagagagggagctacaacctgtgttgaggctacgaaa

SEQ ID NO: 2904 - DNA, 16269 bp, synthetic construct
  misc_feature 1..16269: note = Synthetic
  source 1..16269: mol_type = other DNA
gcagcgcacgcagttcggcgcgggcctgcagcgattcgggagattcctcttggggggtgctcagggacatcatgtgctccggcgaaggttcacggtccagatcctggacctcgagcggcaccgaccggccgcgcttgcgcaacatgtccagcgcggtattgatggcgatgcgcaccatccacgtgcccagcgcagcgccaccctggaaatcctgcaaccgggtgaaggcacgcaaataggtttcctgcaccacgtcctgggcatcggcgtcgtccgcgaccacgccgcgcgcggcgcggaacagcatccggttgtggcaccgcatgatggtctcgaaggcgctctgctctccgcgcagggcgcgcgccaccagttctgcatcggagtgcgcggcgccggcagagcgctccgcacggtctgtggacaaggacggcatgatggtttccgttggttttttcggataggtgcccattggacgctggcaccgcccaaaaggtgacaaacgcggccggtgccggcccagcgccccacgcaatccctggcggcgcgtgggacaatcgcgcccatgtatgcattgtttgaagagaccggcaagttcctgaccggacgcatcctctccgaggcggaaagctcggcccagatcgagctcgactcgggcaagcgggtcaaggccaagaccgcccatatcctgctgcggtttgagaagcccgcgccggcggagctcctggcccaggcccaggcggtggccgcgagcatcgaactcgacctcgcctgggaattcgcccccgaggacgaattcggctttgccgacctggcgcgcgactatttctccgaccaggcgacgctggcccagcaggccggcgcgctgttcgcgctctacgaggcgccgcactacttccgccgcgccggcaaggggcgcttcaagaaagcgccggccgagatcctgcagcaggcgctggccgccatcgagaagaaaaaggcgcagcagcagcagatcgccgactgggccgcgcaactgggccgcggcgagtgcccgccgcccatccgcgagcagctctacaagatcctgttccgccccgacaagaacgccccggaatacaaggcggtggtcgaggccagccgcgccacgcacaccgcgccgctggcgctgctgcagcaggccggcgccatcgactcgagctaccagttccactggaagcgcttcctgttcgaccatttccccaagggcacgggcttcccggccctcacggcgcccccgcccccggacgacctgccgctggcccccgtgcaggcctattccatcgacgactcgcagaccaccgagatcgacgacgcgctctccgtgcagggcctgggcacgggcaccgtggtactgggcatccacatcgccgcgccgggcctggcgatccagcccggcagcgagctcgacaagctgggccgcgcgcgcctgtccaccgtgtacatgccgggctacaagatcaccatgctgcccgacgcggtggtgcagatctacacgctggacgcgggccgcgccaacccggccgtgtcgctgtacgccaccatcgacgaggcgacgctggagatcaccgccaccgaaacgcgcctggagcgcgtgcccgtggccgtgaacctgcgccacgaccagatcgaccacatcgtcaccgaggcctggctgcaggacgcgtcgattcaggtcgaaaacacgccccagcccttgctggaactgcgcgagcagctatcgtttctgcatcgcctggccatcaaactcaaggccggccgcgagctggtgcgcggcaagcccgagaccttcaaccgcccggactacaccttccgcctcgtgggcaacgagggcgccgaacccgatggcagcgaaaccgtgcacatcggcacgcgccagcgcggcgcgccgctggacctgatcgtggccgaggccgccatcgtggccaacagcacctggggcaacctgctggccgagctgggcgtgcccggcatctaccgcagccaggccagcctggcgccgggcgtgaaggtgcgcatgggcaccaaggccctgccgcatgcgggcattggcgtcaagagctacgcctgggccacctcgccgctgcgccgctatgtcgatctggtgaaccagtggcagatcatcgcctgcgcgcgccatggccgcacggctgcgctggccgcgcccttcaagcccaaggacgcggacctgttcggcatcatcagcagcttcgacaccgcctacagcgcctacaacggctaccaggcgggcatggagcgcttctggacgctcaagtacctggagcagaacggcatcaccgagctcgacgccacggtgttcaaggaaggcccgggcggcagcttcctggtgcgcgcagacacgctgccgctggtgctgcccgtgctcggtgcgcagaacctgccgcgcggcgcgcgcatccgcgtgcgcctgggcgccgtggacgagatcacgctggacgtgcatggcacgctgatcgcccgcctggacgatccgctcgacccgggcgacgacggcgctgtggacgaggatgacgaggaatccgtggccagcggcccaattgccattgccgtggacgtcaacgaagccgacgcgccggcaagcgataatcccgccccgtgaaccccgccgccacgctccaccgctgcgctcactgcggtcccgcccaggggccgctgtttcatcttggggcggcccggcgatgaagctcgccgccttcctcgcccgcttcagcacgctgcagctcacgctgggcgtgtcggcggcgctgcatgcggccatcctctcggtgcgcttcgtcgatcccgagggcttcaaccgcgtgttccaggacacgccgctggaggtcatcctggtcaacgcccagtccgaccagaagcccgagaaggcgcaggccattgcccagcgcgcgctcgccggcggcggcgatgccgacaagggccgcgccaccagccccctgccctactcggccctgacggccataggcgacgacttcgaggaagcccagcgcaagaccgatgcactgcaggagcagcaaaaccagttgctcgcccagttgcgcaaggaaatcgccgccctgcccctgcccgacccgcacaagagcgcgcaaagcgcgcagcaggccgccgagcaggagcgccgccgccagctcatcaagatgctggccgagatcgaaaagcgcatcaacgaagagaacgcccgccccaagaagcgctacatcagcccggccacgcgcgaggaggtctacgctgtttactacgaccaactgcgccgcaaggtcgaggacaagggcacggtgaacttccccgagtacggcggcaagaagctctacggcgagctggtgatgatcctctccgtcaaccacgacggccgcgtgctgggcaccgagatcgtgcagggctcgggcaacccgcgcctggaccgcctggccgaggccattgccgtgggcgccggccccttcggcgccttcaacgcgcagatgcgccagaaggccgaccagatcgccgtggtctcgcgcttcaagttcacgcgcgaccagaccctggaaaccagcgtgaggtaagcctcctgccgtggcctggtacgcgcccatcggggcgcacgctcccagaacgacgtccatgaccctttccgccacctcccccgatctgtactgcgtgatgggcaaccccgtcgagcacagccgctcgccctggatccacgcccgctttgccgagctcacgggccagcgcctggtgtacgagcgccgcctggtgccgctcgatggcttcgccctggcgctgcgcgacttcgcccaggcgggcgggcgcggctgcaacatcaccgtgcccttcaagctcgaagccgcgcaggccgccagcgtgcacagcgagcgcgtgcaactcgccggcgcggccaacaccctgagtttcatcgacggcgccatccacgccgacaacaccgacggcctgggcctggtggccgacatcgagcaaggcgccggctttgccctggccgggcgcgacgtgctgctcgtcggcgcgggcggcgccgccgcgggcgccctgggcccgctgctggccgccgggccgcgccgcgtggtggtggccaaccgcacgctggagcgcgcccaggccctggtgcaatcgcatgccgcgctcacaacgctacaaaaaacagagcttctcgcgcagtctccacaagcgctggagcaggattttgacctcatcatcaacgccaccgccagcagcctggccggcgctgcggtgcccgtgcccgcgcgcgtgctgcgccccggcagcctggcctacgacatgatgtacggccccgccgccgcgggcttcctcggctgggcgcgcgagcacggcgcgacaccgcgcgacggcctgggcatgctggtggaacaggcggccgaggcctttgccatctggcgcggcgtgcgcccgcccagccgccaggtgctggccgagctgcgcgccctcatggcgccgcactgacccggcgcgcgcgtccccccatgaaagccctgctgcgctggaccctcctcgtcgcgttcgcggcgctggcgctggagctgttcttcgtgctgcgcatcgccgccatggcggtgatcaaccccgagtccacgaccttccagcgctccgaggcctgggcgcagatggccgctggcggcccgctgcgctggcgccagcagtgggtgccctacgcgcagatcagcaaccacctcaagcgcgccgtgatcgcctcggaggacgacggcttcgtcaaccacgagggcgtggactggaacgccatcgacaaggcctgggaacgcaacgcccaggccgaagcgcagaccgccaaggcccaggcgcgcgcgcccgacaagccggtgcgcacgcccaagatccgcggcggctcgaccatcacccagcaactggccaagaacctgctgctctcgggcgagcgcaccctggtgcgcaaggggcaggagttcgtgctcacgctggcgctggagcagtgcctgagcaaggagcgcatcctggagatctacctgaacaacgtggaatggggtaacggcgtgttcggcgccgaggccgccgcgcgccactactaccgcaagagcgccgccgacctggccccgcacgaggccgcgcgcctggccgtcatgctgcccgcgcccaagcgcttcgagcagatgccgcaatcggcctatctcgccgggcgcacgcgcaccatcctggcgcgcatgggcagcgccgagctgccctgacggcgcaccgcctcagccggtgagcggcagcgccgcccccatcaccgcgaacagcacgccgcagccctggttgaagcgccgccccacgcgccggagccaggggcgcacgcggtgcgccaggctggccaggccgaactccaccacgcattcgatggcgccgaaggtgcccgccagcacggcgtactgcagccacaggctgcgctgcgcatccaggaactggggcagaaaggcgccatagaacagcagcgccttggggttggagatggccgccaacaggccctggcggaacatgaccgaggggcggatcagccccttgtggccgtcgatctcgggcatgtccagttgcaggggcggcgcgcgccacagttgtatgcccagccagaccaggtaggcgccgccgccccacttgagcacggtcagcgcgtcggccgaggcgcgcagcagcgcgctgatgcccagcatggacaacccgatcaccgcggcaaaacccagggccccgccggcgatggtccagagcgtgcgccggcgcccgtgcagcgcgccgtgcgcaagcaccagcaggctgttggggccgggcgtgagcgacaaccccaccgacgccagcacatacacccaccacgtagaccaggccatcgcccttgccctcctgcggcacgccgcccatgaactgcctgcgagtctaggagcgggggcagtgcgcacgctatcccgatctggctacactgcagtccattctggacattcgcctccacccccggcccatggcacccctgccccccgcacccaaccccgcgcggcccgacgtgcgcctgctgctgctgcccctgcccgagttcggcctgctgccctttggcgccttcctcgacaagctgcgcttttcagccgacgaggaagaccacagccgccagcgctactgcgcctggacgctgctgggcctggaccgccagggcgtgcattcgagcagcggcgtgcgcgtggcggtggacgccacgcccgaggcgctggactttcgcgccttcgactacctggtggtgttcggcagccgcacggtcgagcgctccatggccctggcgggcagctacgccccgctgctgcgcgccgccagccgccagggcctgccgctggtggccatcgacaacgccagctttctgctcgcgcgcgccggcctgctgcagggctacgaggtggccctgcactggcggcacgtggcgcagttccgcagcgccttcccgcgcatcggcgtgcgcagcgagctcatctactgcttcgaccgcgaccgcatcagctgcgccgggggcacggctgccatcgacatggcggtggagctgctcgcgcgccactgcgggcgcgagcgcgcgcgcaagggcctggccgacatgctggtggacgagccgcgccccggcgcccaccaactgcgctccatggcggacgacccgcacctgggccgccacctggcgcgcgccatcgcctgcatgcgcagcgccctgggcgagcccctggacatggcccggctcgcccagcgcatcggcatcggccggcgccacctcgaccgcctgttcatggagcacctgggcaccagcgcgcacacgcactggacgcgcatgcgcctggagcacgcgcagtggcgcatccagcactccagccacagcctcgcggccatcgccgccgaggtgggcctggccagcgccagcagcctgggccgactcatgcgccagcacctgggcaccagcccaggccacctgcgcgccaaggcgccccgccgcggcacgtaaactggcgcccctgccttgccccgccacccgccatgccttctgccttgccctccctgccccatctgcagcgccgcagcggcgccgcgcccctgcgcgtgctcatggtctgcatgggcaatatctgccgcagccccaccgcgcacggcgtgttcgagcacctggtgcgccaggccggcctgcaggagcgcattgccgtcgattccgcgggcacgcacggctaccacgtgggcgcaccgcccgacgagcgcgcccagcagcacgccgcgcggcgcggctacgacctctcgggccagcgcgcgcgccgcctgctcaagcgcgacttccaggatttcgacctggtgctggtcatggacgcggccaacgaatcccaggcacgcgccctgtgcgcgcccgcctaccgcgagcgcctgcgccgcctcacggacttctgcagcgccgtgccggcgcacgaggtgcccgacccgtactacggcggcgcggccgggttcgagcaggtgctggacatcgtcgaggacgcctgccgcggcctgctggcagcgctggcgcccgcagccgggcgctgaaagcaccgggcgccgcgcccggtttgcgcgcagggcggccggcgcagcctatgatcgccccatgcttgccaagttgatggcctacttcctgctcggcctggtgcgcctgctcaccggttcgcaggcgcgctggtacggctgcccgcccaaggcggagcagcgcatctacttcgccaaccaccagagccacgccgacctggtgctgatctgggcggcgctgcccgaggagctgcgcagcatcacgcgcccgattgccgcgcgcgactactggaccaaatcgccgctgcgccagtggatcaccagcgccgtgttcaacgccatctacgtggagcgccaggcgccccagggcgcgccttcgggcagccccccggccgcagcagcgccgggcccggcgcccagccccgagaccctgcgcgccgcactgcccgcggacgacccgctggcgccgctggtgcgcgcgctcgagagcggcgactccatcatcatcttccccgaaggcacgcgcggccacggcgacgagccgcagcccttcaagtccggcctgtaccggctggcgcagatgttcccccaggtggtgctggtgcccgcctggatccacaacgtgcagcgcgtcatccccaagggcgaggtggtacccgtgcccatcctgtgctcggtcaccttcggcgcgcccatcgcgctggagccgggcgaggagcgccgccccttcctggaccgcgcacggcgcgccgtgctggcgctgcgcgaggtgtaggaacgtgaacagttacctgcgcaacctcagcgccacgcagcaggtcggggcgctgttcctcgtcgtgctcggcgtgctggtgctcgccacgctgtggaccatcgcctacagcctgcgccccctgcccaacgaggcccaggccgcccagcagagccgcctgcgccggcggcacctgcgcgcgctgctgcagacctcgtggatgatggcctcggtgttctgggtcgcctgggcgctgggcgacaccgtggccacggtgctgttcgccctggtggcctttctcgcgctgcgcgagttcatcacgctctcgcccacgcggcgcggcgaccaccgcagcctggtgctggccttcttcgccgtactgccgctgcagttcgtgctggtgggcacgcggcagtacgacctgttcacggtgttcatcccggtctacgtcttcctcgccctacccgtggtgagcgcgctggccaacgaccccgagcgcttcctcgagcgcagcgccaagctgcagtggggcatcatggtctgcgtctacggcatgagccacgtgcccgcgctgctgctgctggacttccccggccgtgagggccggggcgccttcctcgtcttctggctggtgatgagcgtgcagacctgcatggtggtgcagcacctgctggggcggcgcttcccgcacacgcccgtggcgccggccgtgagccagagctttcagtgggccagctggctggccggcgtcgcggtcggtgccctggtgggcggcctgctctcgttcatcacgcccttcaagcccggccaggggctgggcctgggcctgctcgcctgcacggcgggcagcctggggcacctggtgatgaaggccctcaagcgcgaccgcggcgtcacgagctggggcatgcagggccaggccgtcacgggcgcgggcggcctgctcgaccgcgtggacgcgctgtgctttggcgcgccggtgttcttccattccgtgcgctggtattttggtttataggcaaaaaaggcctctagcgattgttcagcaagcgccagcagctattgaaaaatgagcaaatgagaatcctcggcattgatcccggcctgcagaccaccggcttcggcgtgctcgatgccgacggccagcgcctgcgctacgtggccagcggcaccatacgcaccacgcaactggcgctgggcgacctgcccgggcggctcaagctgctgttcgacggcatcggcgaagtcgtcgcacgctacgagcccgacgtggccacggtggaaatcgtgttcgtcaacgtcaacccccagtccacgctgctgctgggccaggcgcgcggcgcctgcgtcacggcgctggtggcccgcagcctgccggtggccgagtacaccgccctgcagatgaagaaggccgtggtcggccacggccgtgccgccaagagccaggtgcaggagatggtgcgccgcctgctcgacctgcccggcctgcccggccccgacgctgccgacgccctgggcctggcgatcacccacgcccatgccggcgccgccatggcgcgcgtggccgccgtggcgcccctgcagcggcgccagcatgcgatgtacaaggggggaagaagctattgagccgccgtgcagactcttgctcttgcgcgatttttgcccattaccagggactgggttaaattgtcgccaaaagtaaaagcctggcaggtctccctgccaggcttttgggtacggacagggtctttcgacccttccttattgcagcaacggctctcaccccggataaccacaatcggggataagtataacaagggaggcttcatgacgcagtatgtgtttgggctggatatcggcatcgcttctgtcggctgggccgtcctcggcgatacacgcatcgttgatgtgggtgtgcgctgctttgacaaggcggaaacagccaaggaaggagatccgctcaaccttgcccggcgccaggcccggctgctgcgccgccgcctgtaccggcgcgcgtggcgcctcacgcaattggcgcgcctgctcaaacgcgagggtttgatcgacaacgccaaactgtttgcacaaagcccctctttcaccgacagcgcatgggaactgcgccgccagggcctggaccgcctgctcactcccctggagtgggcgcgtgtgatttaccacctgtgcaagcaccgtggctttcactggatgagcaaggccgaggaagctaaggccgacagcgatgccgaaggcgggcgcgtcaagaaagggctgaaagacacagctgcccgcatggccgaaaagggctaccgtagcgcagccgagatggtgctggcggagttccccagtgctcagcgcaacaagcacgggcagtacgacaaggccctatcgcgcatgctgctgggcgaagaactggcactgctctttgccacccaacgccgcttgggcaatccgcacgccagcgaacatttcgagacgcaaatcctcggcaatggcgaccgccgcagcggcctgttttggcagcagaaacctgccctggcgggtgccgatctgctcaagatgcttggcaaatgcacgttcgagaaaaacgagttccgcgctcccaaggccagcttttccgcagagcgccatacgtggcttactaggctgaacaacctgcgcgtcattgaaaatggccgctcgcggcccttgaacgacgccgagcgcaccgcggccctgctgctgccctaccaaacagagagcttcaaatacgctaccctcaaaaaggcgttcatcaagaagggcctgtggagcgacgaaatgcgctttggcggcttggcttaccctagtcgggcacaggctgaaagcgacaaggctaaagatcccgaagaccaattcctagtcaagctgcccacatggcatgaactgcgcaaagccttcaacaaggtcgggcaggaggcgctgtggcagcgcatcagcaccccggcattagacggcaggccggagctgctcgatcaaatcgcctgggtgctcagtgtgtacaaggacggcgcggaaattgaacagcaactgcgcctgcttgccctgcccgaaccggatatttgcatccctatcctggaaaagatcagcttcgacaaattctccagcctgtcattcaaggcattaaggcgcatcgtgcccctgatgcagaccgggttgcgctacgacgaagccgtcgcgcaaattcctgaatatggccaccacagccagcggatagaccccgatgcgcccaagcgcctgcacttgccgccgttctaccaagatcaacgcaaatacagtggcaagaacgaccacgtgggttccatgcagttccgcgaagatgccaacgtcccgcgcaaccccgtggtgctgcgcgcgctcaatcaggcgcgcaaggtagttaatgcactgatccgccggtacggcagtccaatagcggtacatatcgagatggcgcgcgatctgtcgcgcccgctggacgaacgcaacaaggtcaagaaagcgcaggaggaattccgcgatcgcaatgacaaggcccgcacggactttgaacgggacttcggctataagcccaaagcagcggcgtttgaaaaatggatgctctaccgtgagcagttcggccagtgcgcctacagccaggaaccgctggacatacagcgcgtgctcgacgaccccaactacgcccaggtggatcatgccctgccctactcgcgcagctacgacgacggcaagaacaacaaggtgctggtgctcacgcgccagaaccagaacaagggcaaccgcacgccctacgaatacctcacagcgctggatggcgggcaggaaggcgagcgctggcgtgccttctccgcctgggtgcaagggaacaagagttaccgcatggccaagcgcaaccgcctgttgcgcaagagctacggcgcggaagaatccaagggtttcattgatcgcaacctgaacgacacacgctacatctgcaagttcttcaagaactatgtggaagagcatctgcaactggccgagcgcgccgacggcgaaaccacccgccgctgcgtggtagtcaacgggcagctcacagccttcctgcgcgcccgctgggggctcgccaaggtacgcggcgacagcgaccgccaccatgcgctggacgccaccgtcgtggccgcctgcacgcacggtatggtcaagcggttggctgattactcacgccgcaaggaactggagctgctccaggaaggcttcccggacccggaaaccggcgacatcatcaaccccgctgcgtttgaccgtgtgcggcagcattttcccgaaccctgggcgcacttccgccatgaagttcaggcacgactgttcactgacgatctaaccaagctgcgcgaagacatgcagcggctgggcacttatacggcggaagacctaaccgcgctgcgcacgctgtttgtttcacgtgcgccgcagcggcgcaatggcggagccgtgcacaaggacaccatctacgcgcaacccgaaagcctcaaggtccagggcggcgtgatcgaaaaggtacaactcaccagcctgaccctgaaagacctggacaaccttgtcgaaccgcaccgcaacgaacgtctctacgcagccatccgcactcggctggaagaccacggcggcaaggccgacaaggcattcgggccggacaacccgctgcacaaaccagacaagaacggccagcccacaggccccgtggtgcgcagcgtcaaactggtgcgcaacaagcagagcggcattccgatccggggtgggctggcgaagaacgacagcatgctgcgcgtggatgtgttcaccaaggcggggaagtttcatctggtgccggtatatgtgcatcaccgggtaacagggctacccaatagggccatcgtggcgttcaagaatgaagatgaatggacgcaaatcgatgacagttttgcattcctgttctcaatttatccgaatgactttttgagagtcacgctgaaaaaggaacgcttcgatggctactactccagcacggatcggtctaccggcgccgtaaccttatgggcacatgatcgcgctgcttctgttggtaaagatggattgatccgtggcatcggcgtcaaaaccgccttatcgatcgagaagttcaacgtcgatgtgcttggccacatctatcctgccccgctcgaggtgcgccgtggtctggcgtagcgtggtcatcaaccgccccgctcgcctcaagcgcgagcacttctcgctggtagtggaacaagagcgaagcgcgcgcgtgccgtttgaagatattgcggtcatcgtgctcaaccaccgcgaaatcacgcttacgcaccccgtgctttcggcctgtgcggactacggcattggtctgtacagcacgggcgataaccatcagcccaatggcgtcttcctaccctttttgcagcacagccgcgccacgcgcatgcaacgcctgcaactcgacctggacaaacccaccacaaagcgtgcctggacgcgtatcgtgcaggtcaagattcagaaccaggcccgctgcatggaattgctgggcaccacgggagccgaccggctcgcgtcctacgcacggcgcgtgcgctcgggcgatggcggcaacctggaagcccaggcaagcgcgtactactttccgcaggtgtttggccgcagcttccatcgcagccagtccggctgggtcaatgccgcgctcgactatggctacgccgtcatgcgtggcgcatgcgcccgtgcgctggtggcgcatggcatgctgcccagcctgggcctgttccacagcagcgagctgaacgccttcaacctcgctgacgacctgatcgaaccctaccgccctatcgtcgatctacacgtggcgcaacagcagcctccggcggcagatgccgaactgcaacccgccgacaaggccgcactggtgagtctgctaaatgtggatgtggccatgccccggggccaaatgagcgtccttgcctccatagagcaagcggcggaatcgctggcgcggctgtacgacggcggcagcgagcaggtgctagaactccccggcctaattggcctacgccagcacgtcttcgagatgtagcggtgcgcaccatgggccaggacacgaggcgattcatgcgaatgctggtgttcttcgatctgcccgtggtcaccaagaccgaccggcgtgcctacaccgtgttccgccgttttctgctcaacgacggctacgacatgatccagttctcggtctatggtcgaatcctcaacggcaacgatgccgtacagaagcacatgcagcgcctgctggccaacctgccgcccgaaggctcggtgcgcgttctcacggtgacggaaaagcagttcgccagcatgaaactactggttggcatgccgctgtttcaggaaaaaaagatcgcggccaatcaaatggcactgttctgaaacagcttttacaagaacgagaacccgcgccccgttaggcgaggcgcgggtttcgagggggccagagtgtagctatccggggtgagagagggagctacaacacaaacgcagggcggcgggcatcgcgtccagagtgtagctatccggggtgagagagggagctacaacccaactggcgcggtccacgatgtgccgctggagtgtagctatccggggtgagagagggagctacaaccggcttgtcgttctgcattcgtcatcgccagagtgtagctatccggggtgagagagggagctacaacggtggtggttcctttcaggtggggctatgagagtgtagctatccggggtgagagagggagctacaaccggcgccgcgtccccgccatcggcgggcaggagtgtagctatccggggtgagagagggagctacaacttgtgagtcgctggcgccacccgcaccgccgagtgtagctatccggggtgagagagggagctacaacggtctgagtggtgctgtcggcaaaggcctggagtgtagctatccggggtgagagagggagctacaacttttctggttgtgttattccgcaggttttggagtgtagctatccggggtgagagagggagctacaaccgccattgccatcgagccactccgcgtagggagtgtagctatccggggtgagagagggagctacaacgtcatgcgccatgtggacttctcgcgcgcggagtgtagctatccggggtgagagagggagctacaactccttccattgcgtgacggcagacgatgaggagtgtagctatccggggtgagagagggagctacaactcggcgtgctcaacaccctggtggtcaatagagtgtagctatccggggtgagagagggagctacaacttcatccctgaatgggtcatcctggcccatgagtgtagctatccggggtgagagagggagctacaacgtgcggctgcgactcctgccactggcgcgcgagtgtagctatccggggtgagagagggagctacaaccaatggaggtgcgcagttgacactggatatgagtgtagctatccggggtgagagagggagctacaaccttcgcggggcgttaagactgtttccgtgggagtgtagctatccggggtgagagagggagctacaacgggtttttagcaggcataggtgcatcataagagtgtagctatccggggtgagagagggagctacaaccaggaatggggacgaacacggccctaacgtgagtgtagctatccggggtgagagagggagctacaacggtgaagaagcgggagcgggaggggcgcgggagtgtagctatccggggtgagagagggagctacaacctgcgctgtgttctccagcgcgtggcggttgagtgtagctatccggggtgagagagggagctacaacctccccggtcttggagcgcacaacttccttgagtgtagctatccggggtgagagagggagctacaacacaatcacccgg

SEQ ID NO: 2905 - DNA, 16025 bp, synthetic construct
  misc_feature 1..16025: note = Synthetic
  source 1..16025: mol_type = other DNA
ccccatgccttggtgagttccaaagcaagcgcccgggtcacggtatcggtgagcccgcccgcggtggtcgcaacgatgagcttcaccggcttggatggaaaagattgcggctgcgcgaaaccggcagtgaagaccagcgctgcgaagagcgtggcctgcagcgagcgcgtgcggatcatggtgcgtcccctcccatcgaagaaaaagttcgtgccactctacatcagatctgccggcccgcagtgtgccggtatggctcgcgagggcggcgcggcgcttgatctcaacgcgcgccatggcaagctcatcgaagacgagcatgccactcacggtacgcgagtgaaagtcatggagatgcggagtgtatcgcagcgcccggttcggactgcgcggccgccccccaacatttcgcacgcgcccgtacaatccgctttccgcccactcccgagccaggcgcatgaccaccgaatcccccgcctccgccacccatcccgcgcgtgaaccgctgtttgccgccggcacgctgacagaacgcctcatcgccgagaagcagggcgcgatcggctggctcaccttcaacaatccggcgcgccgcaacgccatttcgatcgacatgtgggaggccatcccgcaagtgctggacgctttcgagcgcgacccggcgatacgcgtggtagtgctgggcggcagcggcgacaaggcgttcgtttccggcgccgacgtttcgcagtacgagaaggaccgctccagcaccgccggcgtgcagcgctacgaggagatcgccgaaggcgcgcaggagcgcctcctcacctacgacaagcccaccatcgccatgatccacggttactgcctgggagccggcgtcaacatcgccctctcctgcgacctgcgcctcgccgccgacgacgcgaagctgggggtgccggccgccagactcggcctgggttacagggtgtcatccaccaagaacctggtggatacggtcggccacgcgaatgcgcgagaaatactgatcaccgggcgccagttcgccgccgaagaagcgcttgccatgggactggtgcatcgcgtcgtgccgatggcgggcctggggcccctggtggcggagtactgcgcgatgatggcggccaatgcgccgctcaccatgcgcaacagcaagcgcatcatccgtgaaatccagaaggcgggcgaggcgtcgctgaatgaggccgcatgcaccgccctcgtgaaggaatgcttcgccagccaggattacatcgaaggtcggcgcgccttcatggaaaagcgcaagccggtgttccaggggaagtaacgcaggcgagcatgcggcaactcacggcctgtttcaaggcacgcaacggcaaggaggagaccatgcccggatacagacgacacgtgttcgctgtatgtcttgcgctcgccgcccccgcagcgatggcgcagctggtgtatccgtcacgccaggtgaccatggtggtgggatttgcccccggcggcggcaccgacatcgcggcgcgaatcatcgcgcgcaagctgggcgtcaacctcggccagcaggtgctggtggagaaccgcgccggcgcgggcggcaacatcgccgccgatcaggtggcccgagccgttcccgacggccacaccatactgctggccaatgtcggttcgctcgccgtggcgccacacctcaacagcaagttgccctacaacccgcagcgcgacctcgcgcctgtcagcatggcggtggtgttcgccaacgtgttggtggtgcacccctcggtgcccgcgagcacgctcgcggactacctgaaactcgccaatgccaggccgggtaccatgacctacggtacctcgggcgtgggcggcgccggccacctggcgggagaattgctgaagcagatggcgaaagcggacctggtccacgtcccctacaagggcggcgggccggcgatgagcgacctgctgggcggacagattccgtcggtgttcgcctccgcgccctccgcggtgccgcacgtcaaggcgggcaagatccgcgcgatcgccaccaccggcgcgacgcgctcggcgttttttcccggcgtgccgacggttgccgaatcgggctacccaggctacgaagcgtccaactggtatgcctatgtcgcgccctccaggacgccgcgcgaggtgatcgagcgcctcaaccgcgaattcatgcgcgtgctcggcgcacccgaagtgcgcgagcagttgttcacccacggcatggaagcgcagccttcgaccagtgaagcgctgggcaagtacatcgagcaggaactggccatgtggggacgggtggtgaaggacgcggggatacaggcggaatagggccggagaacagggtgacagtgcccgaatgccttcataaaaatactgaaaaatatatagcattcggctgtaatagtccgcactatggggacattagtgaagtaaagttgtcaattatctgcgcccccatcctcagcatcgggcgcgcgcaaggtcataaccagacacgagtctcagagttagccggattcacccgtgcatgaaaaaacccggtggattgctccaccgggtttttggatacagcttaatctttcgactaagccttattgtagcaacggctctcaccccggattgctgcaacagtttccagtatagggaggaattcatgtccgtcaagtcagcatcggccggctcgcccacgtttggtctggatatcggcattgcatccgtaggatgggcagtactcgccccggacagaatcattgcgctcggcgtacgtgcattcgacaaagccgagacagccaaggaaggtgattccctcaatttggttcgacgcaccgcacgcctggcgcgccgtcgcttgcgccgccgcgcctggcggctgactaagctggctcgcctgctaaaacgccaaggcgttatcgacgatccacgattgtttcagccgcaacaccctttcccacattcactctggcaactgcggaaggaaggactcgatcgccagttgaacgccgaagaatgggcgaggacgctctaccacctgtgcaaacaccggggcttccactggacgagccgcgccgaagagaaaaaagcggaggcagacaccaaaagcgaaggtggcaaagtcaagcaaggtctcgcgggcaccgccaagctgatgcaagagaagcaataccgcagcgcggcggaaatggtactggccgagttccccgatgctcagcgaaacaaacagggcgattacggcaaggctctgtcccgcgtcttgttgggtaaagaactggcgctgctgttcaggaagcaacgtgaattgggtaacccccacgccgaaccggcgcttgaggcagccatccttggaaacggtggccgcaaaagcggactgttctggttacaaaagccggcgctggcgggaaacgacctcttgaaaatgataggcaaatgtactctcgagaagggcgagtaccgcgcacccaaagccagcttcacagccgaacgccacgtctggttgacgcggctcaacaatctgcgcgttgtcgtggacggccgcactcggccgttggacgaggaagagcgcagaatcgcattgccgctgccgtattcgcaaattggtgatttcacctacaagcagttgcgcagcgccctggtcaaggccgggcgtctgcccgagtcgtttcggtttcccggcctgccgtatcccagcgcgtcccagcaagcggagggcaaggcgaaggaccctgaaacggcagcactggtgaaactcccagcttggcaggaaatacgctcgacgctgaagaaggccgggttggaaaccgaatgggagggaatggccggcgccgcaatcgatggacgggcggagctgcttgatcagattgcgtgggtgctcagcgtctacaaggaagatgaagaggtggttactgagctaggcaagctgactttgcctggcgcgggagtgatgatcgatgccctgctaggcatccgattcgaaaaatttcacgccttgtcgctgaaagcgctgcgaaaaatcgtcccgcacatggagaccgggcttcgctacgacgaagcgtgcgaacaagccggctatcatcacagccagttgcatgtggtcggggaaggcgagcacaaatatcttccgccgctgtactccggccgtgacaaggacgggcgcatggtgttcagcgaggatatggacgtccctcgcaaccctgtcgtgatgcgcgcgctcaatcaggcacgcaaggttgtcaatgcactcgtgcgccattacggcgcgcctggtgccgtgcacatcgaattggcgcgggacctatcgaagccattcgacgaacgcaagaaaatcgtgaaggatcaagccgaatatcgggagcagaacgaaaaagacaaagcgaggtttgccgagcatttcggtcagttgcccaaaggcgtggaattcgagaaatggcggctctatcgggaacagcaatgcaagtgcgcctactccatcgaaccgattgacctcggccgactgctggaacccggttacgtcgaaatcgatcatgcgctgccgtactcacggagttttgacgacagcaagaacaacaaggcgctggtccatgccaaggaaaatcgcgacaaaggcaaccgcacgccctacgaatatctggatggatccagtgacggtccgcgctggcgccaattcgttgcctttgtcgagtcgaacaaggcctaccgcctggccaaacgcagccgattgctgcgcaaggattttggtgagaaggaatcagcggagttcagggaacgcaacctaaatgacacccgctatatctgccgatttttcaataactatgttgagcagtacctgaagctcgccgacagcagcgagacgaagcgctgtgtcgtggtcagcggccaactcacgtcatttcttcgcgcccgctgggggctgataaaagtgcgcggcgacagcgaccgccatcacgccctcgatgccacggtggtcgcggcttgcagccacagcatggtcaaacgcctgtcggactacgcccgtcgcaaggaactcaagcaggtgcacgagggcttcgtcgacctggagaccggagaaatcgtaaaccccgcgatgttccagcaattacgccagcacttccccgatccctggccacacttccgtcaggaacttgaagttcgcttgaacgtcgatgacccaatgcgaatgcgagcggaactggagatgttgggcaattaccccgccgatgagttgaatgtggtccagccactgtttgtctcgcgcgcaccgcaacggcgcaacagcggcgcggcacacaaggacacaatttacgggcagccggaacggctcaaagcgcaaggtggagtaacgcagaagaaaccgcttaccagcctgacactaaaagaccttgacagcctaatagacccgcatcgtaacgagaagctgtacgccgctatccgtgcgcgacttgaggccaatgccggcaaaggcgacaaggctttccctgccagcaatccgttacataaaccagatagagacggcaatcccaccggcccaatcgtgcgcaccgtcactcaggtgatcgacaaactttctggaatatctgtccgcggcggcatctcgaaaaacgacagcatgctgcgggtcgatgtattcaccaaagatgacaggttccacttagtgccggtgtatgtgcatcaccgcgtaaaggggctgccgaatcgggcgattattgcgttcaaggacgaagaaatctggacactgatcgacgacagctatgcgtggtgcttctctctgtatccgaatgatttggtgcgcgtaagccaaaaaggtaagacacccattcttggctactactcaagttgtcaccgcgggactgggaacatcaatatctgggcccatgaccgcaaccagcaagtgggtaaggaaggaatgatcgaaggtatcggcgtaaaaaccgctctatcccttgagaaattccatgtcgatgttctaggcaacgtattccccgcccgaccggagcgccgccgtggtctggcgtagcgtaatgatctcgcggcctgcgaaactgcggcgagagcactattcgctggcgatcgtgcaagaagaaacggccttcgttccgttcgaagacatcgcggtaatcatgctgaaccatcgcgagattacgctcacacatccggtgctttctgcctgcggcgaatatggaatcagtctgttcgccaccagcgatacacatcatcccagtggcgtgttcctgccttttctttctcattcgcgagcaacgcgatggatgcgcttacagctggatctgccacgcccgctggcgaaacagacttgggcaaccatcgtgcgccgcaagatcgccaatcaggcagcatgcatgaaactggcggatgtggaaggagaggacagactggagtcctatgcacgccgcgtccgctcgggcgacaacgagaatctggaaggccaggctgctgcattttacttcccgaggattttcggaaaagcatttcgccgaggggatgagcgctgggtaaacgcagcgctggactacgggtatgcggtgctgcgcggcactattgcgcgtggtctcgttgcgcacggtctgctgccttcgatcggactctttcacgccagcgagcaaaacgccttcaaccttgccgatgacctgatcgagccttttcgtccgctcgtcgatctctttgtcgtaagacatcggatggcagatgtcgccgagctgcagcccgctgataaggcagcgctggttgcgttactcaacgtggatatggcgatgccccgaggggtcatgtccgccctggacgctatcgaacaagccgttgaaagtcttgctcgcatttacgacggtggatccgaaagtctgctggaactgcccacactcatcggattgcgccagcatcttcgcgagtcgtgaagcgtgggaattgggacgcgacggcacatgcgcctgctcgtattcttcgacctcccggtcggtactcgcgccgaccgccgcgcttacacagtattccgtcgctttctcatcaatgacggcttcgacatgattcaattttcggtgtacgggcgaatcctcaacggcagcgacgccgagcaaaagcacatgaaacgcctgattgacaatttaccgccgaacggatcggttcgttgcctgaccgttaccgagaagcagtatgcgggtacgaaactcctggtcggactgccgctatttcaggaaaaagcggtcaaagccaatcagatgctcttgttttgaggtgaaatttttcatggacgaaccccgtccagcctaggctggacggggttttccacaaggtcgagtgtagcaatccggggtgagagagggagctacaacccattatgcgtactccttatgacgttcattagtgtagcaatccggggtgagagagggagctacaacacaagatcattctcatacctaagccaagatagtgtagcaatccggggtgagagagggagctacaacgtattgaaggcgcgttgcgctaaatgcagtagtgtagcaatccggggtgagagagggagctacaactcattttcaaaggctgccaactgcgcagtaagtgtagcaatccggggtgagagagggagctacaacaacctcggcgtcagtgtctcggtggtccacagtgtagcaatccggggtgagagagggagctacaaccccgcatacaagggggtattgcgccgtattgagtgtagcaatccggggtgagagagggagctacaacagcggcccgggcgtcatcaacctgctcggaagtgtagcaatccggggtgagagagggagctacaacctcgtcaattacggcgaggctgcggccgcgagtgtagcaatccggggtgagagagggagctacaacgtcccgtcgcgggactatttgcaggaattgagtgtagcaatccggggtgagagagggagctacaacggtcttggtcgccgcctgcagtcatgaattagtgtagcaatccggggtgagagagggagctacaacgatggacatgacgacatcaccgtgggacttagtgtagcaatccggggtgagagagggagctacaactctaacggagccatatccgcacgcaagatcagtgtagcaatccggggtgagagagggagctacaaccatcggcgcggcgtagcgcaattgccgattagtgtagcaatccggggtgagagagggagctacaacgaggcccacgccgggccagtgccagccgagagtgtagcaatccggggtgagagagggagctacaaccagataaggggtcagtgccactggcgcattagtgtagcaatccggggtgagagagggagctacaacctctggtgcagagttatccacattcccaccagtgtagcaatccggggtgagagagggagctacaaccccggcgttgccgcgatcgccttcgctgtgcagtgtagcaatccggggtgagagagggagctacaacgaggcccacgccgggccagtgccagccgagagtgtagcaatccggggtgagagagggagctacaacttccaatatcgccgccctcgtcacgcgctgagtgtagcaatccggggtgagagagggagctacaacgtgaactccgatgtgccacgggcccgcgagagtgtagcaatccggggtgagagagggagctacaacccatcctgacgcagtgaacaacaacatatgagtgtagcaatccggggtgagagagggagctacaacacttttcatcatccagcaatttgaatttcaagtgtagcaatccggggtgagagagggagctacaacccggtatcttcgactgcgggaccacgcccaagtgtagcaatccggggtgagagagggagctacaacgatgctcgtcgtggaatgattctggcatggagtgtagcaatccggggtgagagagggagctacaacaacggtagtaagaggcacaggcgcattcatagtgtagcaatccggggtgagagagggagctacaacgaggcccacgccgggccagtgccagccgagagtgtagcaatccggggtgagagagggagctacaactcagccgcctgcgccatctcctgcgggtcgagtgtagcaatccggggtgagagagggagctacaacatcaagggcgacatccgcgacctaccggcaagtgtagcaatccggggtgagagagggagctacaacaacccttccatcggccacaggccatcctcgagtgtagcaatccggggtgagagagggagctacaacaaaactaccgccaatggcgaaatgctcgtgagtgtagcaatccggggtgagagagggagctacaacacagcctccgccgccaattcagccgccgcaagtgtagcaatccggggtgagagagggagctacaactgcggcggcactagctatcccgtacaacccagtgtagcaatccggggtgagagagggagctacaacaatggtctatgtgcgcggacctggcgggcaagtgtagcaatccggggtgagagagggagctacaacggaagcaatgcgtggacgaatgaagtagggagtgtagcaatccggggtgagagagggagctacaacgggcctacacggggccgctcggaagaatcgagtgtagcaatccggggtgagagagggagctacaacaatgatgggccgcgcgggttcgatcggctcagtgtagcaatccggggtgagagagggagctacaaccatttcgactacctgggatgaggctgcgcgagtgtagcaatccggggtgagagagggagctacaacggcgtcggcggctttgatggcgtctgcgtaagtgtagcaatccggggtgagagagggagctacaacccagccgcgcgcgctgaacaacaacatatgagtgtagcaatccggggtgagagagggagctacaacagattcaatttcgcagcgaaaaccgtgctgcaaaattaaatctggcgagctttcgctcgcgcttgcagtaatttcccccacggctggtacccatccgacactttattgagacatccaccgcgtgttattggtcgtccccacaacgcttgcatcttcctaataattatcaaaaacggcataggaatatcccgtacaagtccgtatatacggcactcttccgatacaatgttataaaatattgcggcgttcactgctagcgtgaagtctcacccgccgacctccaacgcaatctggaccagacatgtgtcagagagtctcccgtattcacccgcaatgaaaaggccctgttgattgcttcaccgggtttctggatgacgttaagcagttgatcgcttcttcggtatcgccagccagtgttgaacatcgagttccgggatcgccttcgcaaggggcgcaagagcgtgcttcgcgcgcgtgcgccagcccgggccgcggcgtatgagatcggcccacgcctcgtcgatttcccacgcgcggtgctccttgaagaacgcaagcagcgccgcggcctgatcgaggtccttgccggatttttgcaaataggagcccttgcgctccccataaacgagcagcttgtgcaacgcgtagcgcgccgggtgcgggacgctgacgatgaccgccccttctgcgcagaaaagcgcagcctgcacgacgtgttcaagcgagtactccatgaacttgagcggttgcagggctacgccaagttgcggatgctcgtaaggtttttcgccgccgcgatgcaaagtcgtcagaaagtccaggcgaaactccgggttcttcgggttcaagtacgtcgcacccgccttgttcaggagtcccgccatcggcagcaatcccatttgcaacgagttgatcgctgcgtgcgtatcaatgctgacgttggccggcagggcaagcgccagattcttgcctgcatgcgcgaagtccatgtcctgcgttcttgaagcctcgccccagcgcacgcccagcatgttgccgtaggcgagaaacgcatgcgtgccgacgagcacgccgccggctttgaagaagccgtaatcggacagccggcggatcacgcgatagtgctgcgccagcaccggcgtgcagcccagggcgatcgcggagcgcgacagcggggcaagcgctccggtctcgcgggctctggactgctgcgcgagggagcgtatctcgtcggaatccggccccacgtaaatctggcgcagctttctgccgagatccgtgtactggaagtaccaatagtcacggccttttattttctttttcgcgaatgatccgcgcagattcgcaaccgtccgcgccatgtccgctcccaatgcggcgtcgaacaactgcgcgtaggcggtctgcgcggtaagcgaaagcggcgtgtatcgggccatggtggttatactaacttatctatttcgctagtataacttggagtccacgggttgcctgcggttatactagattcataatccgtttagtataactttgccggccgcccctgcagttcggactaccgggccaggagataccgggatttgccaatgcgctgaaaccgccggagtcagtgcccgccgcgcgaggcgagcagcgtatcgagttcccggtcgccattgtcgcgcgcgatctggagcggcgtgaggccgcccagttcctcggcattcacgttccagatgacgcttcaagggcattcttgaattcatgtcgcgcaaagggcgcaggcccgtctcaggttcgaagcgcgcttcttaccactgcagtctgccgccggcgccactgtagtctgacgccggcgccactgtagtctgccgccggcaccatgtgctccggcagctcgcgccgtcgaccgcccggcttattgcgcgcgcggcgcggcgccgtacttgcgtgcgcgctgctcctcggtcaggaatctctgttccagttcctgcacttcgtccaggccgaccagactgttcagttcttcgaagctcaccgccaattcaggccgctcgatcaccttgcccgtggtcacggtctcgcgcaagaccgccaagccgttaagcatgccccgtatcgcgcaggaggtcagcaggcgcgggtaaatcgccaccgccacgcccaggtcttccatctgacgcggcgacagcaacggcgtggtcgagcgcgtgcggatgccaaagcccatgttcacgcacagcggtttggagacgttcctggccacgtcagcaatttcatcggcactcatgagggcgtcggcgaacagaaggtcggcgccggcatcggcgtaatggttcaggcgcttgatgacctcggccagaccatgggtggccaaggtgtcggtgcgcgatttgatgacgaactccgggtcgcgcctggcctccgccgcggcacgtattttctccacaccttcctccagcgagatgacttccttgcctttcatgtgtccgcagcgcttgggccagacctggtcctcgatcatcgcgccggccaggcccgcgtcctcgaaaccgcgaatggtaaagaatacgttgacggcgttgccgtaaccggtgtcggcgtcgccgaacagagccatgctggtgcaggcggcaagatggcggcaggcgtccagattctcgcgaaaacccatgatgccgacatcggtccagcccatggtcgactcgctgacgcccgaaccggtgatgaacgcggcctggtaacccgcctgctccaccaggcgggtgctgaaaccgtcgaacacccccggcagcacgagaagttgggggtcgttcatcagacgccggtatagcctgcgcttgtccgtgtgggtgctgtggtccgagaatttcatcggttgggtcctcgttacgttgatttcacagctgcggtgccaatggcgatcacgacgttgccgtggggatcgaggctcgcttcgcaggcgggcggcacgacgatggtcgtgtcgtattcctgaaccagcagcggccccgcgcgcggcctggacgtgagtgcaggccgcgacagcaccggcacgttcaattcgccatgctcgggaccaaagtagacgttgcgctgcctctgtggggcatgcgcttcggccgcccaatcggtgccatgcgccatcgggcgcggcgcgcgcagcaccaggcgcacggtcaccagttcgaagaccttggtatcgcctcgatggccgtaggtgcgctcgaactcgcgctcgaagccttcctcggcggcacgcaggaccgcctcgctgagcaggccatcgggaatgggaacggtcaactcggaggactggccgcgatagcgcaggtcggcatgacgcgagatttgcgcgctgcccgggtccagtccttcgtccgcgacgcgcgacagcagatgattgcgcatctcctccaaggccgcctcgaccggagccagatccgcatcgcgcgtgccgaccaacacggtgcgcgcggcgtggtgttcgatttcggcatgcagcaggccttcggcgctgaacacgccgggcgccggcggaatcagcagggtcttgatgcccagggttgccgccacgcccaccgcatggatcgggccggcgccgccaaaggccatcatgacaaagccggccgggtcgcgtccgcgctcgaccgagaccgatttgatggcgcgcaccatgttcgagttggccacggcgtggatgccgtaagccgcctccagcagcgacagtccggagggctcgctgacatggcggcgcactgccgcctcggccagttttgcgtccacccgcatcgatccgccggccagcgaatcctcactgatgtagccgagcagcaggttggcgtcggtcaccgtgggccggtcattgccctgcccgtagcaggccggccccggcaccgcgccggcgctgcgcgggcccacgcgcagggaaccacccgcgtcgatggcggcgatgctgccgccgcccgcgccgacctcggagatgtcaatcaccggaatgcgcaacagatagccgttaccgcgcatcaggcgactgctgacggaaaccgcggaaccgacttcgtactcgatgccgcgcaggatttcgccgcgctcgatgatcgaggccttggtggtggtgccgcccatgtccagcgtgatcacgtccgaatagtcgcagcgcgcggcgacacgctgcgccgccaccacacctgccgcaggaccggactcgatgatggtcaccgggcgcgccgctgccgccggcgcgctgatgagtccgccattggactgcatcaccaggatcggcgcgcgcacctggcgttcggccaacgcgccgcgcagccgatcgagatagcgcgcgatcagcggcgcgacataggcgttgaccacggtggtgctggtgcgttcgaactccagcatctcgggcagcacgtcggccgagagcgacacatagacacccggcaggcgctcgcgcaggcgcgccccgaccagctgttcatggcttgcgttgcggtaggaatgcaggaagcacacggccaccgactctatccgggcggcggccaattcgtcgatggccgcgtccaggctcgccatgtccagcgcttgcagcacattgccgcgcgcgtccatgcgttcgcgcacgcccaggcgcagatggcgctcgaccaggggttcgggtttgttccattgcaggtcgtaggcgaagggaatgcgcgtgcgccgcaactcgagcacgtcgcgaaagccttcggtggtgagcaatccggtgagagcgcccttgcgctccaggatggcgttggtcgccaccgtggtggcatgcaccacctccgccacctcgttcggcggcaatccggcctcggcgcagtagtcaaagatgccctggacgatggccagggtgtagtcggcaggtgtggacgggcgcttgcgccggtccagcttgccgtcgggacgcacgaacaccagatcggtaaaggtgccgccaatgtccacgcccacccgcaacgcctgttgcgcacttgcagactgcgctcgagcctgcacgctcacgctgccgcttcccttggcgcgccgcgcttggtccgcagcgccgccgtggcctggacgtccacgcgccagggcgccgccagcaccaccacgccgtagtcgcgctgcgcgcccccaggtgtgacgcggccgtcgcgcacgtctttgagcaccgccgcgggatcgcgcattagaggatcgccatatccgcccgcgcctgctgttgtgtggcgcaccgcctgaccaccggccagaggacgcgtgaatttagtcggcagctgggtccaggtgccggcgtcgtcaagctggttgttcgacggctggccagtcccgccgccaaccagcccatagggcgggtggtcgcgccggtccgagcgtaattgcagggtcgcgcgagcgccaagaaagcgcagctggcgcgccaccgacatgccgccgcgccattgcccagggccgccgctgtcgggcaccagctggtattcctcgacgcggatcggcgcctggttctccaccatctcgatcggcgcattgctgatgttggcagcgccgttggccacgccgtcgatgccctcgcgctgcaggcccgcgccccaggcgcccatgacggcctcccgaaacaaggagaagcggccctgctcgtcgtagcagccaaagctgtagctggtggtgccgccttcgccggcgccgcggatgcgccctggaatggcctgcgccagcgcgccgtacatggcgtcaatcagcctgaagccggtgatgccgcgcgccgctaccgcgccgggtggtttgggattgaccagtgtgcccagcggagccttgatatggatggcgcggaagaacccggcattgttgggcgcgtccgaatccatgatcgagcgcacggcgaaatacaccgaggacttgacgaaggacaaggtcgagttgatggcgccgcgcacctggggtgccgtgccttccagatcgaccgtcaattcatcgccctccacatgcacggcgacaacgatcttcaccggctggcccatgttgacgccgtcatcgtccaggtaatcggtgaaacgatagacgcccggcgggatcgaacgaatcgtgcgacgcgcctcgcgctcgctgtaatcca

SEQ ID NO: 2906 - DNA, 15655 bp, synthetic construct
  source 1..15655: mol_type = other DNA
  misc_feature 1..15655: note = Synthetic
attcgaccacgggcgcgatcgacaacctggacggcgaggtcctgctggaccgcttcctggctccggagcgtctgtccctgctccgggtggattgagcaggctggtcgctccgtcaaagccgttggaggcagatcacggtacaggcagcgtagaagatgagccaacagccgatggccaacagggtaaaggcgcgggcacgggcacgggcggcagcgggcagccagaagagcagcaagagcggcgcaagggggatcagcacgccggcgaccagagggggaagccagcggagcagttcctgcaggccgaggaaaaaccaggggccggcgatgagcagcaaaccgaaccggttcggttccatcggcgcaggcacggcgacggccgccagggtaatgaccagaaccagcaccaggtgcgaacgccactgggcgccgtaccgcctgagatggggccaggcggccacgaagcccagcgccaccaggccgatgacgtgttgcacatagactttgcgcaggccgctgccggagagatcgaacaggagattgttcagttggcggccaatcagaggcacggacaggcagatgtgctcagcgatggctcccgccgcctctccggtggcatcgcctcggagcacatagccggtgaacagcagcagcagcccgcagggcagggtggcacagagccggagccagggaccgcgctggaagaccgtgtcctcgtttttccacaagaccacggcaagatgagccaggagcagcagaaagaaggcctggctcgaatagtaatgcagccctcgccaaaaggagccatacggcaccaccagctcgatggtgctggtcgaataaaaaggggtggcatagtcgtattgcaaggccacaacgatgcctgaaccgagcgagagcaagaagctgatcagggccccgcctccccaccgatgtgcctcaagccagcgcaatgtgccggtcgcgtattgtctgatgggctggaggatggacatcagaggtgcaccacataggcggttacccgtccctcgccgtcttcccgtacggtgaccttgtactgggacagatctttttccgccggtcccgcaatccgcctgccgtccgtggtgaagcggctgtggtggcacggacactcgatgtactgcttatccgcttgatagttgatgcggcagccaagatgggtgcaggtccgggagacggcccgcgccccttccggtgtggcgaacaggagaaaatcgtggtcggcatggacgccgcttatcggcagaggcgcgggtacttccaccagccggggtttggggggaatccgatggctgctgaaacggaacagcggatacaggatacaggccgaccccaccgctgccgcccattgcagccagcggatcaggatatcgcgccggctggccgttggaccggaagcgccgggcgcgctgtgagccggggcatccatcaggcgaatttttcctgcagggccgctaccacatgtgcaggcgccaaaccggtgatattgcccttgcaccgggccgcatttttgatgctgcttgaactgatgaagatccaccggaaaccggtcatgaggaagaccgtgtccaccgagtgctccaaccgtctgttcatcagcgccatctggaactcgtagtcgaaatcagaaagcgccctgaggccgcggacaatggtctgggcgccgtgacgcagggcgtaatcgacgatcagcccatcggtgtagccgactgcaacctgtttggagtcgggaaaacatttgcggatcatgtccaggcgttcttccagggaaaaaaatggcgccttttgctcattgacggcaatggtgacgatgatccggtcaaagaggcgcaggccccgctcgatgatgttgaggtggccgttggtgatcgggtcgaaggtccccggatacagggcgatccggagagattggtctctttccccggccagggttggcgaatggctgtcgctcatgggcggtgcgtggctggctgcggcgcgaagaaccacaacccggtttctccataacggcggtgatcggtgagggcgaaggaggcgaccgattcggggaggacggcgcttcggtgttcctccacgacaaccaggccgtcttttgccaggatgtccgcttcttctaccattgccaggacacgttgcgccagatttttctggtacggcgggtccatgagcactatgtcgaaacagccggcggaggccacggcggcctgcagcggctgcagatgcggggcgattgcgaggtcgagggcgagaaaggcggcacggggatggggaatgcaggcgcggagattggtttcgatcagccggcctgcctcccgcgatcgatcgacgaacagcgccgaagccgctccccggctcagggcttcgatgccgatggcgccggtaccggcaaagaggtcaagtaccctgctgtggacaatccgctgaccgatgatattgaacagagcttcccgcacccggtcacaggtcgggcggatctgtcctgcccggggcgaggtcagcttgcggcccctggcgctgccgccggtgatgcgcaccacatcctccggaaaaacgtcgctcagtcggacgagcttttctgaacagccggtttgggccgttttctgcgcagccgggcccaggcagccagcaccgggccggaaagaatgtagagggctgaggcggcaaacaaggtgatgggcggctcgctggccagcaggataagcagaaggataaggccaacgatcagctggaaccgtttttccctggcgatgtccatgtgcttgaagctcagatatcggtgggtggagaccatgagataggagagcaggtagaccatcagcaacaggccgacatgctggacggtggtggaggtcttgaacacatgggtgctgaacatgaccgtcgtggcgatcatgccggcggcggccgggcagggcagaccggtgaaatcgtggcccgggctggcagcggtctgggagttgaagcgggccaggcgcagggcggtggcggccacatagagaaagccagccagccagccgtaacggccatacggggtcagcgcccagagataggcaagcacgccgggggccacgccgaaggcgaccatgtcgcagagggagtccagctccatgccaaatgtcgaggtggaatgggtcatccgcgccaccctgccgtcgaggccgtcaaagacggcagccaccaaaatggccacggcggccgcgaagaaatggccgttaaaggaggagacgatcgagtagaaaccgctgaacaggctgcagatggtgagcatgcaggggacaacgtaaaagcggttgggcggcgcggcggcgggatctgcgttttttttcatggcggatagttgagacggaagactgctgaggacggttccggtacggttggtgcaaacgggtcatttatgcgggtataaggctgtacccgcatgggccatcagtaaggcgaatttttaatattatacggtatattgacaggttaagcaaccgattcttccggaactgtttctggcgccgccgccagagagccgagcacggtttcgccggcgcggactttctcgccgatcttgaccgtgatttgggccgagagcggcaggtagaggtcgacccgcgagccgaaacggatcatgccgaaccgttcgccggacagcacccggtcgcccgcttccgcccggcagacgatgcggcgggcaatcaggccggcgatctgcaccacggcatagcggtgtttgttcggggtggtcagggtcaacgcgcagaactcgttctggaggacagccttgtccttgtcggcggagtaaaattttcccggagacagcagcacacgctccaccgtaccggtcaaaggggtgcggttgacatggacattgaacacattcatgaagatggagatcttccgtacccgcgcatgcaggaaacggtcgtcgtcgatctcatccacaacgatgaccttgccgtcggccggacagacgatggcatccggctgttccggcagtacccggaccgggtcgcggaaaaaatacgcgacaaagccggtgagcagcaatccgagcagagccgggaccgccaagccgagcacagccagcaccagggcggcaaaagcgcaaaagaaaatgaagggatacccttcaggggccaggggcaattctgctttttgcatggaggctccagatgaacgcggaagcaagggatcgggtgcggagcacaggcaataatgacatggccgctattttttgggcgcacgcaccatcgcgattttgccggtgcggactatttccttgattccgatcggccggagaatgtcgatcaccgccttgattttggactcggaaccggtaatttccaaggcataggagttggggctgacatccactaccttgccccggaagatgtcgatgatccgcagaacttcagccctggtattcgcctcggccttgaccctgatgagcgccatttcccgttcgacaaattcgccctcgctgacgtcggtgaccttgatgacatcgatcagtttgtgcaactgcttggtgatctgttcgatgatggctgcctcgcccttggtgacgagggtcagacaggagatttgcggatcgtaggtttcggctacgcacaggctttcgatattgaagcagcggccactgaaaaggccggtcacgcgcgatagcgcgccgggccggttacgcagtaagacagacagagtatgtttcatgggtagagtgtcctgttcgacgatggtggctgttcttttgggctggtctgaagggtgccggcactttcagaccaggagcatctcagtggtggccttgcccgccggcaccatggggaatacgccttcttcgcgggcaatggcaaaatccataatcaccacgttcttggtggccaacgcttccttgatgacaggttcaacttctgacttggtcttggcccgcaggccgaccgcgccgtaggcgtgggccagggcgacgaaatccggagtgatctccatcactgtggaggcgtagtggcggttgtagaacagctcttgccactgccgcaccatgccgagatagttgttgttgaggatggcgatcttgacctgggcgccgcattccttggccgttgccagctcctggatattcatctggatcgaaccgtcgccggccacgtcgatgaccgtgaccccggggaaggccatctgcgcgccaatagccgctggcaggccgtagcccatggtgccgagaccgcctgaggtcagcaggcgacggggatggttgaatttgtagaactgggccgtccacatctgattctggccgacctcggtggtgatgatgcagtcgccgccggtcagcctgttcagggtctcgatgacgtactggggcttgatgatctctccattctccacataggtcaaggggtggttgctttcccattctttgacctgctcaacccaggggctatgctgttcggctgtttcccgggagtcgaattcttcggatttgtcgagccagtcgttcatggcccggagcgccagcttgcaatcggcgacgatggggatgtcgaccacgacgttcttgctgatcgaggatgggtcgatatcgatgtggatgattttggcctggggggcaaaggcatcgagacgtccggtcacccggtcgctgaaacgcgctcccacggcgatcaacaggtcgctcttggccaccgccatgttagccgcataaccgccatgcatgccgagcatgcccagggacagcggatcactccccggaaagccgcccagacccatcagggtcatggccaccggaatgttgagccgccgggccagatgggtcagttcttcgttggcgccggacaggatcacgccgccgccgacgaacagcaccggccgcttggccttgacgcaggcgcggcaggctttttccacctggttgggatgcggattgacgttaggctggtaggtctgcatcttgatcgaacttttcggcggataggtgaccatcgcgttgatgatgtccttgggaagatcgaccagcaccgggccaggccgacctgaagcggcgagatagaaggcctcgcgcaaggtcggaatcagctcttcggggtcatacaccagatagttgtgcttggtgcatgggcgggtgatgccgacgatatccacttcctggaaggcatcgttgccgatgagggcgcgcggcacctgtccggtgagaaccaccagcggaatcgagtcgcagtaggcggtggcgatggcggtgacgccgttggtggcgccggggccggaggtgagcaacgccacgccgaccttgccggtggagcgggcgaagccgtcggccgcatggaccgctccttgctcgtggcggaccagaatgtggcggatgctgctccggcacaattcgtcgtagaggtcaatgaccgcaccgccgggatagccaaagataagttccacgccttcttcctggaggcatttgataacggcttgcgcacctttcattttactcatatcgtcatcctctgcacgctctgcggttccacccgggcgaccgatgtggccgcagggtgatccgattgaacaaaaatattcagaaattcaaaaaaatattagtggggttatagggcgatgtcaagcgtgaaaccggtaactttccgtggtgaaccgcgcgccgctgcccgaaaggaaaaaagaccggtcccgatacggtgaccgctgcgtcaaggcttggccgctgccgctgtttctttctccaactggtcgatcagatcggccaccatcctgccggagggcgccgccgccatggggtgatactggatcagtatcttccattcggccagggcggccttgggctcgtcgagtccgaccagcaggaccacccccttgttgaagcgggcctgttcatgttcggggttgctgcgcagcacctggtcgaacagttcgatggctttttggtgctggttgccctgatggtacatgaccccgaggtcggtcatcaagtcgagatctcccggcaagagagccagcgccttgttgtaggcggcgatggcctgcttggtttgatcggtgtcggaataggcgtgggccaattccacccaggcctgtgcatcctgggagttgtcggcggccgctttttccaaggcggcaatggtggcggccgcatcgtgtcgatgctcggcttcctggggggcaccagtgggcatgggggttcggtaggcggaatacatcacgcctccgaggaagccgatgatcagggcgatcgccacgtacaaatacatccgttcttttttgatcaagccattctggtccacaggcgcacctgccggaaaaaggaaatgagactgcgtggcgcagactcggaaatccgcacgatagcataagcggtccagaacggcaaccagaggaaaaggggaggggctaggtaaccggttcgactgccgcgtccaggcagatccggtggactgtcggcccgcagcgcccgcagatcgacacccccagagagcgccattgatggttcgtctgatggcaggcggttgcgattttggcgagcgtgggcctggggcagcctttggcctgcatgtcgtagaaatgcaggatgccgccaggccgcaaggagcggatagcgggggacagcaaggtctcgccgccgtacggtagggcaatgagcacgcggtcgaaacagaggccgagatcgggcagcacccggcccgcatcgccggcaaagaaccggacggagcggatggcgcgattggccgcgagattgcgcagggcaagcgcatgggccgctggattcatttcaatgccgatcacctcgccggcttgactgtgccggccgatgattaacgggaaagggccgacgcctgaccccagcacggcgacatgctcgcccggctggatcagggcggcgatccgggcgcgctcgcgggctaggcgtaccgaaaaatacgcctgggacagatcgaggtggaagagggtgccgttttcccggtgcacggtggtcaaccgctgttcgccggcgatgacccgtaagggacgcgtgcggaatgaaccgctgtgaacgccgtcgcgcctggcgactacgcggacggttggatgcgcgtcgaggaggatggccccgatctccattgccagcggttccagttccggcacgatggaaaccacggcgatgtcgcccatccggtcgaaacctccgggcaatctggccggggcgatgtcgggaaaccgagccgctagaatcgatcgcaaacgcatgggcactggccgagacgaggaaagaggcgtggggcgctcctggttgaggaaggccctcagcggggctgcaccgccaggatcagcggatctgtaccagaaaaatgcgccatgggaaaagaggaagagaggcgcgggggcaaccgcatggcagcgttgcgggcggtggtctgcgctgtcgtggatgcggaagtcttcactgttcccttggctggttgcattgcggtgcgaaaacgtctatttgctggcggcatattttttgtcgatggtatagtgccctgagggcaggaaccgtccgggctggggcctcaccccagcccgtccctgattccggcggttttggggtttacggtctgccaaagtgcggccagacggagatgatgatgtctgttggcgtttgtgagcggaagaggagatcgatggcgctggtcggtcgtttgtctgtgctggctgttttcgtttttctggcaatggcatccgtttccggcgcagcgcccttgacctgccgggatctgcgaacccgcatggatcaactgagattgaccatcagacaggcatccggcaaggaggccgcagcgcgggccaaggccgaactcgaccgtctggccgcgcaggcgaatcgggtttgtacgacccaaggcgcggaaaaggtcaaggaggccgctccacaaggagtcatgccgccgcaggtgcccggagaggcggccgaaacgccggaggaggaatgcaagcgccgccgggatatgatcaaccgacaggggaaacccatcccgggtttgttcagaggcgtcgggcagaccaattcggcgatgcgcgccatgcctctgaccggatcgattacgatcgagggggccaccgcctcgaccctgtacggcaaggtcaggcaggagttgaactatgccgtccgggaaacctttgtcggcaacctgatcgtcagcggcgctgatggccgcgaagagtatgccatccaaaccatatccaccgaaatcgacgtggaacatttcaacggccgaagctgcgcaaagtacacgggttccccgccggcgtgcagccaatggtatccgatcgatctgtggcagatcgccgacggtgaagagtatcccggtaaagccgacagcgtggtcaccgcgaccagtgacagccgggggatgaccatccggatcgctgctccggtgatcgagttcggctcgtccatgggcccggcaagcatcaagccgggatgcggtggcatgctccgggaaacagtcaagcgcgatgaagtcagacagtggctacgccgttcgaccgtgcgcatcaaacgggagatggggcagaccgcccctggctgccgccctggcgcctccctcatcctggaaatgcgcctcggggccgattcatgaccggtggcgcagcccgcatcgggagtggataaaggctgctgaccccatgccgggtgcggaggatcgatggcccgccatccctgatggatatttatccttgttcttccttgtttttcccgcaaaaacagtcaatacttcgtcatggaggttgccgccttccatccagcccactttgctggtcaaggagagcgtagcctgtggcggtcagcggataccgtagcatccaacgcgccgtaatctcctttgaacatccttcagttttgcggctgctgatgagatccttacaaataaaaaagcccgccattgctggcgggcgggtacgcgcggtgaaccgcgcttattgtagtaacggctctcaccccggataactacaatagggaaaatttaacggagaaaaatatgcgcgtcaatcaatctttcacgcctcttgaccagtttatttttggtttcgacatcggcattgcctcggtcggttggtgcgtgctcggcgaaaaccgcatcgttgatctcggcgtgcgttgctttgacaaggcagaaaccgccaaggaaggcgaatcgctcaacctcgcccgccgcaccgcacgcctgatgcggcggcgtctacgtcgccgtgcttggcggttgaccaaactggcgcgtttgctgaaacgcgaggggctgatcgacagcattcaatccatccatcaaccctctgcaaaatcattgtggcagcttcgtgtcgaggggctggatcggaaactttccccggaagaatgggcgcatattctctaccacctttgcaagcatcgcggctttcactggatcagtcgggcggaagagaaaaaagccgaagaagacagcaaaggagagggcggcaaggtcaagaaaggcttgcaggataccaagcggcgcatgaatgagaaaaactatcgaagcgcggcagagatggtggtgcaggaatttcccgatgcgcaacgcaacaaacgcggcgaatacagcaaagcgctctcccgcgttctgctcgccgaagagcttgccttgctgttcaggcagcaacgcgaatacggtaacccccacgctacgcccgaactcgaaatgcacattgtcggatgcggcgaccgcgaaagcggcctgttctgggagcaaaaaccggctctacccagggaaaatctgctgaagatgttgggacgctgcactttcgagaaaaacgaataccgcgcccccaaagccagctttaccgctgaacgccatgtctggctgaccaaactcgtcaatctgaaaattgtcgtggatggcgttacacggcgattacagcctgaagaggtcaaggcggttgtatcgttaccttatgaatataattccgcgcttaaatatcgacagcttcacagtgcgctggtcaaaaaaggcttgctgtcggaatcattcgttttctctggattgacgggcaagaaagacaaagatcctctcgaccaaacactggttgccatacctgcatggcaagccatcagaggaacacttgaaaaagccgaactgaagatagaatggcagggcatcgccggagccgcaaccggtgggaaccctgaactgttcgaccggattgcctgggtgctgagcgtgttcaaggacggcgatgaggtcgaacaggaattacgcaaactccccctgcccggcggagaaaaaatgatcgaagcactcagcgaaatcagcttcgacaagtttcacaacctgtctctcaaggcactccgcaaaatcgttcctcacatggaagccgggctgcgttatgacgaagcctgtgagcaagccggttatcatcacagccagttattcaaagcgggagaaggccagcacaaatacctgccgcctttttacgcaggccgggacaaagatggccgcatggtatttgatgacaaggaggacattccgcgcaacccggtagtgctccgttcgctcaatcaggcccgcaaggtactgaatgcgctggtgcgccgttacggttcgcccgctgccgtacatattgaaatggcgcgagatttgtcgcgccctatggatgagcgcaataaaattaaaaaagcgcaggatgagtttcgtgacaagaatgaaaaagctaaggtcgatttcgccgccgaatacgacatgcccgccaaaagccgggaatttgaaaaattcatgctctaccgtgagcaacagggcaaatgcgcctactcactgaagccgcttgaccttgatagggtcttacgcgagcagggctatacggaagttgatcatgtccttccctattcgcgcagttacgataatagtaaaaataacaaggtgttggtgttcagtcgtgagaaccgcgacaaaggcaatcgcacgccttatgagtacctgacttcgttcgcagggggtgaaaacggagagcactggcgaaacttcgtcgcctacgttgaaagcaacaagtcataccggctcgccaaacgtagccgtttgctgcgcaaaaattttggcaaggacgaatccaaggaattcatggagcgtaatctcaacgatacgcgctacatctgcaaattcttcaagggctatgtcgaacgacatttgcaactggccgagggcagtgacagcaaacgctgtaccgtcctcagcgggcaactcacggcttttttgcgcgcacgctggggattgaccaaggtgcgtggcgacagcgatcgccatcacgcgctcgacgccgccgtcgttgccgcatgcagccacgcccttgtcaaacgcctgtccgactattccaggcgcaaggagctggaacaagcggggaaagtcattgacgcagaaacaggagaaatcctcgatccggaactgttgtcaaagctggaacggcatttcccgcagccttggggatatttccgggaagaactcctgctgcgcctgaatacggacgatcccgttttgctcaaaagcgaagcggaacgctatggctatccgccggaagccttggaaagcctgcgtcccttgttcgtttcccgcgcaccgcaacgacgcaacagtggcgcagcgcacaaggagactatctatgggaaaaacgctctacccgaacaggctctgtccacagcaattcaacgggttgacgttgctcagttacaagaaaagcatttgaatatgctggttggaggaagtgacaaacgtaacaacgggctccgtctctccttggagcagtacctgaaaaatatcaaactagcggaagagattgaacaaaacctaggcaaaggaaaagaaaggcgaaagcctactctagaagaagaggaacacatcaagtgcttacgtgagttgccacggaaaccgaaaaaggaagattctagcgatggcccgtattctggcaacatcattaaaaaggtcaaagtaattataacaagaacatcaggatgttatatacgacacgggattgctgaattgggaaaagtgcaattcaccaagctctatcgcctcaatgatgaattctttttccagccatgctatgcgttgaataatgaagtaattttcggcatggaacccatacccgtttccgcacaagacacagggattcgtctttacgataacgatgttgttcgcatttcgcacccaaacctgtctcaatgctataaggaaatacgtcgatacaagaacgaagctggagatttgttaatagatatcgaggcggtgttccatgacggtgtcttttttggttattgggcttatttcgaaccatcgaacgaccgccccgttgtccagcttcacgacagtgccagtttttacctgcttgcgtctggaaaacagtgcgaggaaacaaagctaaccatcgttgccaaggaaaaacggtcaaagcatacttcctcagtccaaaaagtgaaagagtacgaatatatagaattgaacccgccttacgatcgaaaaccattgtctttctctctggaaaaggacataaaacgtcaaatcgttacagccactcgaatcgaaaaattccacgtcgataccttgggcaatacctaccctgccccgccggaagaatgtcgtggcctggcgtagcgtgatgatctcccgcccggcacgcctgcggcgggagcatttttcgttggctatcgaccaagaaaaaacggccttcgtgcctttcgaggacattgccgtaatcgttcttgaccacagggaaatcaccctgacccacccggttctttcagcctgtgccgaatatggcatcagccttttttccaccggcggcaatcatcaacccaacggcgtcttcatgccctatctgcaacattcgcgggccacgcgtatgttgcgcctgcaactgaatattgcccgccctgccacgaaacaggcatgggctgcaatggtacggcacaaaattatcaaccaggcgtgttgcttgaaactggctggctgcaaaggcgctgaacggatcgattcctatgcccgccgggtgcgttcgggggatgcggggaattgcgaggcgctggccgcgtcgtattattttccaagattgttcggccagggatttcaccgcagccagaatcgctggatcaatgccgcgctcgattatggttatgccgtgttgcgcggcgccattgcacgcgggctggtggcgcatggattgctgccgtcgctgggattgttccacgccagtgagcaaaacgcctttaaccttgccgatgacctgatcgaaccattccgccccctcatcgacctgcatgttgccagccagtccttgaacgaagagcgggaactgcttcccggggataaggcctctttggttgcgcttctcaacgttgatattgccatgccgcgcggcacgatgagcgtgttgttcgccatcgaacagagcgtcgagagcctggcgcgtttttacgaaaacgaacatgccgattctttggaactgccgatactcagcggtttgaggcagcacctccgtgagcagtgaaacgaaacgctatatgcgcatactcgtctttttcgacctgcccgtcgttacccgagcggaacgcagggcttatacccagtttcgccgcttcttgatcaacgatggctacgacatgatccagttttctgtctacggtcgcatcgtctacggtcgcgatgtcgaggaaaagcacttgcgccgtctggctgccaacatgccgccggcaggttccatccgttcattaaccgtcactgaaaaacagtacgccagcatgaaattgctggtcgggcgaccgcgttttcaggaaaaaaaggtcaatgcccggcaactgttgctcttttgaacccgtttttagaaaaagagaaatcccgcccagccttggctgggcgggatttgggacaggggtaattgtagccatccggggtgagaaagggaactacaacgcgttgagcggacattgccggtcagcggcgattgtagccatccggggtgagaaagggaactacaacagcaatgatgatgaggacgttggccattctattgtagccatccggggtgagaaagggaactacaacaacacatctatagcctatacgaccgtccggattgtagccatccggggtgagaaagggaactacaacgtatttctgaacacctcgaccattttgtcgattgtagccatccggggtgagaaagggaactacaaccaaccgggcgaaggaacctggatacgccagattgtagccatccggggtgagaaagggaactacaacgccgacgacggccgcttgtgcgaaatattcattgtagccatccggggtgagaaagggaactacaaccaagattgacaccgagatgttgagcgctttattgtagccatccggggtgagaaagggaactacaactaggcctctctttcatttctctccttctgtattgtagccatccggggtgagaaagggaactacaacatcaaaaacagggaaccgctcccgagcaacattgtagccatccggggtgagaaagggaactacaacttgagaatgggagatgtatttttgtcctatattgtagccatccggggtgagaaagggaactacaacgtactcaggcccggttagatcgtcggccaaattgtagccatccggggtgagaaagggaactacaaccag

SEQ ID NO: 2907 - DNA, 15467 bp, synthetic construct
  misc_feature 1..15467: note = Synthetic
  source 1..15467: mol_type = other DNA
tcgacctgttcgagcggcacaaggtgtccatcagcgccagcatcgacctgccgctggccctgcacgagcgccaccgcaccacgcgcggcggcaccggctggctgccgcgcacactggacaacatccgcctgctggcgcgctacccgcacggcaagaagatttccgccacgctcagcagcgaacatttgcaggacatgcaggcgctggtggacgacatctggttcatccaccgcgagctgggttttgacatgaaccagttcaacctgatgttcgccttcggctccgagctcaaccgcgccgccaagggcgaggccgtgctcaccccggccacgcccgagcagcagcagcggctgtacgacacactgcacgccgccttcatgggcaccgagctggaagacggcctgcgccgccactggttcgacgaattcacgcccggctactgcaccaacgctgccaactgcggcgaacgcttctatctgctgcagagcgacggctcggtgtattcgtgcgtgcgcggccagggcatccccgaatttcgctacggcaatgtgtttgagcagcccatcctcgacatcctggacaacggcgcgcgccagatccgccagatccaccaggcgcacggtttcgacagcgcctgccagggctgcggccacctctccacctgccacaccggctgcccggtggtgaagcaccagaaccagagtgggcgctcttacacctgcggcctgcaaaagcgcatctacgccgaccacccgctgacctaccccgccgacgcacccgacgtgcagcacgactacgcgcagcagtaccagctcgccacgcaccccgggctggccttcgcccggccgccggcccggcccgccgcgcgccgcctggtgttgcccagcgacctgggcgaggaaaagaacaccctgcccgcgctcatcgaggctgacccggtgctgcaggggctgttcgatggcggcgccttcgtgcttgaactcaatggcgaggccatcgcgctggagtcgcagttgctcaaaacccagcgcagcgtgcacaccctggtgcctggcgaccgcgtgctgctgcacctgcgccgcgacctgctggcgcaccactgccccgagcccgtgcgcaacaccgtctacctgcagatgttgcgcgacacgcccgtggtctatggcgacgaacagcgcagcaagcaggcgcatgtgttcacctaccagctctacgcccacttcctggagcccagcgccctgctcggtgacgacttcgcgcaggtcgatctgtcgggcctcatcgaattgcaccgcgcgcactaccagcgcggcgtgctcaacaacctgtttgtgaccaccttcttcctgcgcgagtaccactaccagaagcagaaggccaacgccttctaccatgtgcagacggccaacctgccgtttcagaactttgaatttcactacctgccatgagcaccaaagacctgcagcgcaccgcctacaccgtggaatgttttttgaacgccctgcggctagaggacggccctgcgcgcacgcagatcgaagaacccctggtgcgctggctggccgacggcgcgcgcggcaagcacgaccacctgatctaccagcaaggccgcatcagttgccacggcgcaggcaaagcggtgcagggctttgatgtgccgcaggcacgccagatccagaccctgtggtgcaacggcgccaagctctcggccatcgacggcgcggcgtacagccgcgatgcgcaactggtgatgctgggtacggcggggttgtttctcacgctgccgggtcaactccccgccaaggaacgggacaagggacgtagcagcaataacaacaataacaataacaataacaacaataacaacgggtgattggcactgctgtcagcggctacacacttgtcagccaacgctttgtggtgcaaatggctggcgcaacacccgggcacgggttaaattgcccatagaaaaagcctgacaggtttccctgccaggcttttgggtacggacggggtcttgcgacccctccttattgcagcaacggctctcaccccggataaccacaatcgggccgagtatagcaagggaggcctcatggcgcagtacgtgtttggactggatattggcattgcctcagtcggctgggccgtgctggatgagcaacgcatcattgatctcggagtgcgctgttttgataaagccgaaacggccaaggaaggcgacccgctcaatctgacacgccgccaggcgcgcctgctgcgccgccgcctgtaccgccgtgcatggcgtctgacccaactagcgcggctgctcaggcgtgaaggcttaattgctgacgccaagctgtttgtgcaaagcccgacgttcaccgacagcgcctgggagctgcgccgccaagcgctggatcgcctgctcacgccgctggaatgggcccgcgtgatttaccacctctgcaagcaccgtggctttcactggaccagcaaggccgaagaagccaaggccgacagcgacgctgaaggcggacgggtcaaaaaggggctgaaagatacggcggcgcgcatgcgggagaagggctatcgcagtgccgccgaaatggtactggccgaattcccagacgcccaacgcaacaagggcgggcagtatgacaaggcgctgtcgcgcgtgctgctgggtgaagaaatggcacttctcttcgccagccagcgccgtttgggcaatccccacgccagcgagcgtttcgaggctctcatcctcgggagcggtgaccgccgcagcggccttttctggcagcaaaagcccgcactggccggtgccgaccttctcaagatgctgggcaactgcacgtttgaaaaagacgagtatcgcgctcccaaagccagcttttctgccgaacgccatgtgtggctgacccggctcaacaacctgcgcatcgtggtcgatggccgttcacgccccttgaacgaagccgagcgcaaggcagcccttccgctgccctatcaaaccgaaagcttcaaatacaaaacgctgaaaaccgcacttgtcaaagcgggcctttggggcgatgaactgcgctttggcggcctggcctaccccagcagcgaacagaccgaagcggacaaggccaaagaccctgaagaccaggttctggtcaaactgcccgcatggcacgaactgcgcaaagctttcaaggagcagccatccctctggcagcgccttagcatgcccgccctggaaggtaaccccgatctgctggacaagatcgccaccgtgctctgtgtttacaaagatggtgtcgaggtggaacagcaactgcgccagttgcctctgcccgagcccgatgcgtgcattgccgtgctggaaaaaatcagcttcgacaagttctccagcctgtcgctcaaagccctgcgccgcatcgttccgctcatggaggctggggcacgctacgacgaagctgtggcgcagattcctgagtacggccaccatagccagcgcgtcagcgccgatgctgccaagcgcctgtacctgccgcctttctatgaaacgcagcgcaagtacggaaaaaacgaccgcgtgggctccatgcaattccgggaagacgccaacattccgcgcaaccctgtggtgctgcgtgcactgaaccaggcgcgcaaagtggtcaacgccctggttcgcgagtacggaagccccatggccgtgcacatcgagatggcgcgcgatctgtcacgcccgctggatgagcgcaacaaggtcaagaaggcgcaagatgagttccgcgaccgcaacgacaaggcccgcaccgactttgaaaaggattttggctacaagcccaaggcggcagcatttgaaaaatggatgctctaccgcgaacaactgggccagtgcgcctacagccagcaggcgctggacatacagcgtgtgctggacgaccccaactacgcccaggtggatcatgccctgccctactcacgcagctacgacgacagcaagaacaacaaggtgctggtgcacacgcgcgagaaccaaaacaagggcaaccgcactgcatttgaatacctcacaggctttccaggcggtgaagacggcgaacgctggcgcgcattcgtggcctgggtgcagggcaacaaagcgtatcgcatggccaagcgcagtcggctgctgcgcaggaactatggccctgaggagtccagcggtttcatcgaccgcaacctcaacgacacgcgctacatctgcaagttcttcaagaactatgtggaagagcatctgcaactgacaccccgcgcggacggcgaaaccaaccgccgctgcgtggtcgtcaatgggcagctcacgtcctttctgcgcgctcgctggggtctgaccaaggtgcgctcggacagcgaccgccaccacgccctggacgctgccgtggtggccgcctgcacgcacggcatggtcaaggcgctggccgactatgcgcgccgcagagagctgggatttttacaggaaggatttcccgacccgacaaccggcgaaatcctcaaccccgccgcttttgaccgcgcacggcagcacttccctgaaccgtgggtgcattttcgccacgagttgcaagcgcgcctattcaccgacgacgttaccgcgctgcgcgaagacatgcaccgcctgggcacatatgcagacgacgacctgaaaccgctgcggacgttgttcgtgtcacgcgcgccacagcggcgcaatggcggcgctgttcataaagagaccatttacgccaaaccagaacggctgcttgcccgcgaagagacccaaggcagtgtcatcgagaaggtggcactttccagcctcaaactccaagacttggacaccctcgtcgaaccccatcgcaacgaacggctgtatgccgccatccgccagcgcctggaagcccacggcggcaaggctgaaaaggcctttggccccgacaacccgctgcacaaaccggacaaggacggactgcccaccggcccccttgtgcgcagcgtcaagcgggtggtcaagcaaacgggcatccccatccggggcgggctggccaagaacgacagcatgttgcgtgtggatgtcttcaccaaggtgggcagattccatctggtgccggtgtatgtgcaccaccgggtgacggggttgccgagcttggccatcgtgcaaggtaaggatgagagtgaatggacacaaatcgacgacagctttgcgttcttgttttcggtttatccgaatgactttgtcagagtacaacagcggggcaaatccgccatcgaggggtatttttcgagtgcgcaccgaggcaccgggaatatcaatttgtggctacacgaccgaaacaccacaagccacaaacaaggtgccatagagggcatcggcgtcaaaaccgctctgaccctggaaaaattcaacgtcgatgtgctgggtcgcatctaccccgccccgccggaggtgcgccgtggtctggcgtagcgtcgtcatcaaccgccccgcccggctcaagcgcgaacatttcgcgctggtggtagagcaggagcaaagcgcgtgcgtgcccttcgaggacattgcggtcatcgtgctcaaccaccgcgaaatcaccctcacccacccggtgctttcggcctgcgccgactacggcatcggcctgtacagcacgggcgacaaccaccagcccaacggtgtgttcatgccgtttttgcagcacagccgcgccacgcgcatgcagcgcctgcaactatgcctggacaaacccagcgccaagcgcgcctggacacgcattgtgcagaccaaaattcagaaccaggcgcgctgcatggagctgctgggcgtgccgggcgccgaccggctggcctcttacgcgcgccgcgtgcgctcgggcgacggcggcaacctcgaagcccaggccagcgcgtattactttccgcaagtttttggacgcagcttccaccgcagccaggcacgctggatcaatgcggcgctggactacggctacgccgtgatgcgtggcgcctgcgcccgcgcgctggtgcagcacggcatgctgcccagtattgggctgtttcacagcagcgagcagaacgccttcaacctggcggacgacctgatcgaaccctatcgccccgtggtcgatctgcatgtggcgcaacaacaccccgcgcaggaagacgctgacctgctacccgcagacaaggcggccctggtggccctgctcaatgtagatgtggtgatgccccggggccagatgacggtgctggcctccatcgagcaagcggccgaatcgctggcgcggctgtacgacggcggcagcgaacaagtgctggaaatgcctggcctgatcggcctgcgccagcatcaattcgaaatgtagcgcagcgcttgccatggcccaggacacgaggcgattcatgcgcatgatggtgttctttgatctgccggtcgtcacccgggccgaacggcgcgcctacacggtgttccgccgttttttgctcaacgacggctacgacatgatccagttctcggtgtatggccgcatcctcaacggcaccgatgctgaacaaaagcacatgaaacgcctgctggccaacctgccacccgaaggttcggtgcgcatgctgacggtgacagaaaagcagtttgccagcatgaaactgctcgtcggcctgccactgtttcaggaaaaaaaggtcaacgccaaccagatggcgctgttctgaaaagcattttgcaagaacgaaaacccgcgctccgccaagcggggcgcgggtttcgaggggggcgagtgtagctatccggggtgagagagggagctacaacacgggacaggcagctatctgatggggctatagtgtagctatccggggtgagagagggagctacaacatcaacagcgcaacattgccgcagagcttgagtgtagctatccggggtgagagagggagctacaacgaggtgttcgcacactgtctcgatcgctttagtgtagctatccggggtgagagagggagctacaaccgctccagcagcgcaggcacggcctcgaagagtgtagctatccggggtgagagagggagctacaaccggcgcacctcgttgccggtggcgtgctttagtgtagctatccggggtgagagagggagctatggattgacgcggaggggcgcctgcccctccgcgtcaatccagcgcttcgcgcatgtttagcaagaaaagatgcaaagagcccctatccgctatctcacctacgctgcggcatctccagcgtcagcgccgcagggccgtccaccgcagcgcccaggcgggcctggcgcggacccagagattgcagcaccagcccgccctccagggcagcgccgacacggtacggccgtgcaggcttaccgtccacagcaatcagcgccgcgccaccaccgctgttgcgcccggccagcacccccaccagggcaaaccggctggacgcctgggccaccaccggcgcctgtgccgacaccgcacccagaaggcgtgccagggcctgcgcatcgggcgcgggtggcgtgggcgccatggcgggcacggccagccctgctgcgggggccgacaggcgcagcccccaatacgcagcgctggccgccgccagtgcccagataagcagggtcgtgaggcgcacgccccagatgctgtgtgaattcgtcaccatcgcaggattatcattcacgcgatgcgcgggatgaccccgacgttctcaaccgactgcctgacaccatgatccatcccgtttcctttgtccgccgccgccttgttcggggcttcaccctgatcgagttgatggtggtactggtcatcatcggcgtgctggccgcgctgatcgtgcccaatgtgctggaccgcgccgatgacgcacgcaccacggcagcgcgcaccgatgtcaccaacctcatgcaggcactcaagctctaccgcctggacaaccagcgctaccccacgtccgagcagggtctgcaggcgctgattgccaaacccacaaccggcccccagccgctgaactggaagccctacctcgaaaagctgcccaacgacccctggggccgcccctaccagtacctcagccctggcgtgaagggcgagattgacgtgatgtcgtttggtgccgatggccagtcgggtggcgaaggcaaggacgccgacatcggcagctggcagtgaccaagccgcgccaccgtgcgcgtggcttcaccctgctcgaattactcgtggtggttgccatcatggcgctggccacggccggcgtggggttggccctgcgcgacagcgggcagacgctgctggagcgtgaggcccagcggctggccgcgctgctcgaagccggccgcgcccagtcgcgcgccagcggactgccggtgcgctggcacacggtgccggggggctttcgctttgacggcctgcccgtgggccagcttccaacgcagtggctgaacccggacacgcaggtgcgcggccctgccaccttgctgttggggcccgaaccgctgatcgggccccagcaggtgctgctgggccatgcaaaccaccccgagcgcgccctgcgcgtggcaaccgacgggctgcgccccttcgcggtggagtcctcgccatgaagcgcatcccgttgctcgcagtccagcgcggtttcacgctgatcgaagtgctggtggcgctgggcattgtggccattgcgctcatggccgggctgcaggccaccagtgcgctgacgcacaacgcacagcgccagtccgatgtgctgctggcccacctgtgcgccgagaacgagttgatcaagacccgcctgtcgcgccagatgcccgccattggcgacagcacccagccgtgcgaacaagccgggcgcagttttgaagtgatcgtggcggtgcggcccacgcccaacccgagtttccggcgcgtggacgcgcaggtattcgatgacagcctgccggtgctgcggctgtccaccatcgtcgggcggcgctgatatgttgaaagcgcgtgggttcacgctcatcgagctgatggtggccattgccgtgatggggctgatggccttgctgagctggcgcgggctggacggcatggtgcgcgcgcaggaacagacgcgccagcgtgcagaccagttgctggtgctgcaggcggcgctggggcaatgggggacggacctggacgcgctgctgccgatgccccacaccattcccatcgactgggacggccaggtgctgcgcatgacgcgccagggccaggccagcagcatggacggcgccctggtcgtggcctgggcgcgccgcaatgtggcggggcatgaccagtggctgcgctggcaatcgccgccgctgcgcacgcgcgcgcaatggcagcaggcctggcagcaggcagggcagtgggcgcgcaaccccggcgatgccgagcggcgcgccgaggtgaccctgatgccgctcagcggctggaacatctatttcttccgcgacaacgcctggagcaacccgatgtccagcagcgggccacccccgggtgaagcggcggtcaccagcgtgctggttcccgacggtgtgcgcctgcagctcgaactgcccccgggccaggggctgacagggcagatcacgcgcgattgggtgaacccgctcaagggaggaggcaagacatgacgcaccctgccttgccacgcgaacgcggcgctgcgctgctggcggccatgctcaccgtcacgctggtgaccaccttcgccgccgcagccatgtggcagcagtggcgggccatcgaggtggaaaccgcagagcgcgcgcgcatccagtcggcctggattctgtcgggcgcgctcgactggtcgcgtctgatcctgagcgaggacgcgatagtcgggggtgccgaccacctgtccgaaccctgggccgtgccgctcgaagaagcccgcctgtccacctttctggcggccgaccgcaatgtggcccagcaagaagacgccagcaccggcacccaggacgcctttctgtcaggccagatcatcgacctgcagtcacgcctgaacctggccaacctggtcaaaggcaccacggtggttgaggcagcgctggcccagttcacccggttgttcgcccaattgggcctgccgcttcaggatctggccacgctgacgcaggggctgcgccaggcgcaggaacccgccgggggcaatgcccaggtgccgctcatgccccggacgatggaccagcttgcctggctggggctgcagccgggcacgctggccgtgctggcgccccatgtcaccctgctgcccgaacgcacgccggtcaacatcaacaccgccggggtcgaggtgctgttggccgccatcgaggggctggacatggcgggcgccaacaagatcgtggcggtgcggcaaatgcaggccctgcgctcgctcgacgaagcccaaaagctattgggactccaggcgcgagtggatggcgacctgcacaacgtgcagtccagctacttcgaggtacacggccgcctgcgcctgggcgacatggcagtgcacgagcgttctgtggtgcgccgtcagggcaaagaagtcttcaccatctggcgcgagcgcggcgccgtcccgcaggtgggcatgccctgatccggattcaccgagacgcaccctacaatggcccgcgaaaaccgtccatgagcaccctgatcctcaccctgcccctggcgcgctccggccccgccaccgaataccgctacacgctgagccctgacggccaccacgccacgcggcacgccagtgccagcgccgcactgctgcccgccatgggccgtgcggccagcgaggtggtggccgtggtgccagcccgtgcgctgtcctggcagcgcgtgaccttgccgcccggcatcagcctgcaaagcccgcgcctgcgtgcggtgctcgaaggcttgctcgaagagcgcctgctcgacgacccggcgcaactgcactttgccctgcaaccgggcgcccggcccggcacaccggtatgggtggccatctgtgaccgcgcctggctgcgcgagtcgctgcaggccctggaggccgcagggcgcccaccggcccgggtggtgcccgaattcgccccggccagcggtggcccctgcgagctgcacgccctgggcacgcccgaagagggctacctcgtcatcaccgggcacggccccgagcaaagcgtggccgtgctgccgctctctagcgcagcgctggcattggcaggcccgctggccggtggggacgacccgcccgccatcctggccgaacccgctgtagcggcgctggccgagaaaatgctgggccgcgcggtgcagttgcgcaccgacagcgagcgcgccctgcaggccgcacgcagcgactgggacctggcgcaattcgacctggccagctcaggccgcacgcgcactttgcgcaaattcggcggcctggtgggcgccttgctgcgcgcaccgcagtggcgcgcagcgcgctggggcgccgtggtgctggtcctggcgcacctggccgggctcaatgcctgggcctggcaagaacgccaggcactcgccgacaagcaggcgggggtgcgcaatgccctgcagcaaaccttcccgcaagtgaaagtggtggtggacgccccggtgcagatggagcgcgagctggccctgctgcgccaggctgcgggcaccctgtcggcgcgcgacctcgaacccctgctgacggccgccgcccaggccttgccgccggaccgccagcccacggccatcgatttcagtgcgggcgagctgcgcctgcgcggcatcagcctgagcgacgaggaacaggccgccacccgcagcgccgcacaagccctgggctaccgcctgagcgccgacggtgacagcctgctgctgcgcgccgaaaccccacgatgagccaccgcatgtcccgcaccgattcctccctttctgccctgggcgaacgctggcagtcccttgcgccgcgtgagcagcgccttgtattggccgccggtgcgctggtcttgctggccctgctctggtggctggcactggccccggcattgcagaccctgcgcagtgcaggtccacgccatgccgccctggacgcgcagctccagcacatgcagtcgctgcaggccgaggccctgcaactgcaggcccagccacgcattcgccccgacgacgcccagcgcacactgcagacctcggtgaccgagaccctgggcgccagcgcgcgcctgagcctgaacggcgaccgcgccaccctcaccctccagggggcgccggccgacgcgctggcagcctggctggcccaggcacgcagcaatgcacgcgctgtgccccaagagacgcacctgacccgcagcgcccccagtgccccccgtgcaggtgcccctgcagcacgcccacccgccacccccgccgtgcgctgggacggcaccatcgtgctggcattgccgccccgctgagcggcccgccacgaccatcgccctactgtgaaacacccgcgcccacccgccctgcccatgcgccagcgccgcactccggcgggtgtgtatgcgccctggggctgggccctggcgggcatggtgctgggcttgctggcggcgctgaccaccttcgcgcccgcccactggctggccgcagggctgacgaacgccaccggcgggcgcatcgtgctggacgacccgcgtggcacggtctggaccggctcggcccgcctggtgctgaccggcggcgcggccagccaggaccgcagcgccctgcccggccgcctgcaatggcagttgcgccccgcctggggcggggtgcgcgcgcacctgtcggccgcctgctgcaccccggcgccgctggtgctgcacgcgcagccccgctggagcggtgcgcgcatcaccctggccgacggccagagccagtggcctgcggccgtgctggccggcctgggaaccccctggaacactttgcaaccccagggccaactggcctttcagacccagggcctgcaagccgaatgggccgccgggcggctggtgctggagggccaggcgcagctggacgccctggcgatctcctcgcgcctgtccacactgcggcccatgggcagctaccgcctcacactgcagggcggcgccgcccccacgctgacgctgcaaaccttgcagggtgacctgcagctctcgggcagcggccagtgggtgggtcagcgcttgcgcttcacgggcgaggccagcgctgcgcccgaacgcgagggcgcgctgtccaacctgctcaacatcatcgggcggcgcaatggcgcgcgctcccttattacgctgggttaaccctggaaaccgtatgaccaacctgaccaagcaccgcctgcattttgctattacaacaatagctgcaagcgctttgctggcaagcgccagcggcacaatttatgcgcaaactgccatcgacaccggcaccgccagcgtgcgcccgggcgagcccgtgacgctgaattttgccaatgccgagatcgaggccgtggcccgcaccatggccaccatcaccgggcgcaacgtggtggtggacccgcgcgtcaagggccagctcaacctggtcaccgagcgcgccgtgacgcccgccgccgccttccagcagtttctggcggcgttgcggctgcagggcttcacggtggtcgagaccgcagggctttacaaggtggtgcccgaggccgatgccaagctgcagggcggcagcgtgagcgtggcccagccgggcagcgcggggcctgcgggcgggcagatcgtcacgcagatttacaagctcaactatgaaagcgccagcaacctcgtgccggtgctgcgcccgctgatcagcccgaacaacaccatcaacgtcaaccccggctcgaacgcgctggtcatcaccgactacgccgacaacctgcagcgcctgggcaagatcattgccgccatggatgtgtcgaacgccagcgacgtggagatcattccgttgcagcacgccatcgccaccgatctggctccgctggtggcccggctcatcgactcgggcagcagtggcctgggcggtgcggtgggcgctgccgccgcaggccagaccgacacctcgttcaagaccacgctgctggccgagccccgcagcaacgccctcatcctgcgcgccgccaacccggcgcggctggcccaggtgcgtgccctggtggccaaactcgaccagccggccgcaccgggcagcagcgccgccagcggcaacatccatgtggtgtacctgaagaacgccgacgccaccaagctggcggccacactgcgtgcagccatggcggcgggcacgggcgcatcgggcgccagcgcgggcagccccgcgcctgccagcacccagcccctgggcaacaccatgggtggttccggcaccggtagcaacgcggcgtcgtccaccagcagcggcctgggtgcgggggccagcggcaacaccagcagctccaaccagccctccacgggcgggcagatccaggccgacccaaccaccaattcgctcatcatcaccgcgcccgagccacagtaccgccagttgcgcgccgtcatcgacaagctcgacggacgccgcgcacaggtgctggtcgagagcctgatcgtcgaggtcaacgccaacaagctggccgagttcggcatccagtggcagggggtgatgggcaagcagggcgacggcaccattggcgtgatcggcaccaactcaagcgccgtgggcgccaacattctgggcctgactgcggcgctggcgtctggcaacgcgggcgccattggcacggcggtcggttcgctgggcggcggcctgaacctggcgctggccccgcgcgtgggcgggcagtattacctgggcgcgctggccaactttctgcaaaacagcggtgacgccaacgtgctgtccacccccaacctgatgacgctggacaacgaagaggccaagatcgtcatcggcaacaacgtgccttttgtcaccgggtcgtatgccaacaccggtggcaacagcggtacggtcaacccctttcagaccgtggagcgcaaggacgtgggcctgatgctgcgcgtgcgcccgcagatcaacgagaacggcacggtcaaactggcgatctaccaggaagtctccaaaatcgatgacgccacgctgaaaaaccccaacggcccgaccaccagcaagcgctccatcgagtccaacgtgctggtcgaagacggcagcatcatcgtgctgggtggcctgctggaagacagttatgcccagggcgaggacaaggtgcccctgctgggcgacgtaccgatcctgggcaatctgttccgcagcgagaaccgctcacgcaagaagaccaatctcatggtcttcctgcgccccgtggtggtgcgcgacgccgccgccagcgatgccctcgtgatcgaccgctacgaatcgattcgcacgctgcagcagcaggtgcagcccacgtccagcaacgtgctgggcaatgtgcagggcgcaccgg

SEQ ID NO: 2908 - DNA, 15136 bp, synthetic construct
  source 1..15136: mol_type = other DNA
  misc_feature 1..15136: note = Synthetic
gccgatccgctcttcacgcatctgaaaaaagctgcgcctggtttactcggcagtgaagccgtgaaatggaatttcaccaagtttttggtgagtcccgatggcacagtgaagcgcttcgcgccgcaggatgaaccggcatcgcttgcgaaagatattgagaaagcgctcggctagcgcatagcccccgtccccagcatgtctcgctcgtttatgtttcgctcactcttgcagcaaggactatcgcttctggcgatagttggcgcggtctcgctctcacccatgagtgccgcgcagcaaaaagtgcttcgcttaacctcgcccgctgctgaatccaccttcgatccagcagcgtctgacgatgtgccttcgagcgacatcattcggctaattttcgatccgccactcgattatgactatcacgcgcgcccggtgaagcttcgtccggccacgctgagtgcgctcccggaagtctcggcggacggcaaaacgtttctcttcagcgtgaagcctggcatcttttttactgacgatccagcgttcggcggcaagcccagagaactcgtggccaacgactatgtttattcgataaagcgacttatcgatccaaaggtagcctcgcccaattactatctggtcgaagacaaaatagttggaatcaaagcggcgcgtgccgaggctgaaaaatccggcaaatttgactacgaccgcgtgatccccggcttacgaacgcttgatcgctaccgctttcaaatcctctttgaatcgccgcagtttgagttcatttacgacctgaccgctacgcctttttctgcagtggcgcgagaggtggtggagcgctacgctgatgagcggggccgcgtgcgtgagaacccggtcggcaccaacgcgtttaaactcgaaaagagcgagtggaagcgatcaagccgcgtcgttctctcaaaaaacgagcgttatcgcgaagagtttctaccgctcgcgaacggaaaagcctcgacgctacgcgtaccgcaaattgatcgcatcgaaatctcagtcgttgaagaaccgctgccgcgcgtgctcgcgttccaagcgggtgagattgattcgatggaggtgccgctttcgatgcacgaccgcgtgtttgagggcgcgaaactgaaggcggagttcgccgcgcgaggtgtacagcacgcgcgtgcgctcgaaccgattctcgcgttcggctacttcaacatgagcgatccggttgtcggcggcaccgccattgagaaaaacgcactacggcgcgcgattctgatgggttttgactatcgccgagagattgacgcgatctacaaaggccaagcggagctcgcgcagcaactcgttccgcccagccagacgggttattcgcccacgctgagacttcgtccgccgtatgacccggcgctcgcccgcgcgctgctggatcgcttcggatacaaagactgcgatggcgatggctaccgcgaagcgcctggctgccagccgcttgtctttacgcgctcaagcgtgcccgacagtcgcggccgcgatcaggatgagatttggaaaaagagcatggatgcgattggtattcgcgtcgcgttctttaaacaaaagtggccagacttaatcgagatgtctcgcaccggaaagctgcaatcctgggcatggagctggattgctggcggccccagcggcctgagctacatgagtttgctcgtgtctcgcaacatcaattccatcaacgacatgcagtttcgcgatgctgaatatgatcgacttttcgatctggcctcggtgaagcccccggggccggaacgtgatcagcttttcgcggcgatgtcgaagatcgccgctgccaatactgtgctcgatttcggctatcacacgtattccaaccgcgttagccagccgtgggtcgtgaactatgttcgccatccgttctggcgaacaccgtggaaatttgtggatatcgacctgtccaagcgaaagtagcgttgggggacgccccgaacgggaaaaacgccagttccgcgataattcgcgcttcttgtttttcctcacagaagaccgccatgaagcgcttcttacagacgaccctcttcgcagtgagcagcgtgctcgccttcgcgaacgcgcccgctggcgcgaccgacatgtcgaaaacgctgcgtgttgcgtttcaagtggacattacgggcttcgatccgcaagcaacgaacgatctgtattcggggcatgtcaacaacgctgtgtttgatgtgatgtacgagtttgattactacgtgcgtccgatgaagctacgtggctccattgccgatggcctgccagagatttctgccgatggccttacgtggacaatcaagatcaagaaaggtcagttcttcgcggacgatccggtgttcaagggcaagaagcgtgaacttgtagccgaagacctggtgtattcgtggaagcgaatgctggatccgaaaataatctcgcccaccctctggcacattgacggaaagctggtgggcgccgatgcactggtggccgaagccaaaaaaaccggtgagttcgattacgacaagccgattgaagggttgaaggcgatcgatcgatacacggtgcagatgcaactcacgcgccccgactacgtgctcaccgagctgatgcttggctacaactggtcgcccgtcgctcgagaggtgatcgacgcgtataaagaccctggcggccgagtgatgagtaatccagtgggcgtggggccttaccgcattaaggattggaaaaaaggaagcaaggtcgttctcacgaagaacgagaacttccgcgaagaatatttcccgacgaacggcgaaggcggcgacgccgaaacgcttgcgcgcaacaaaggcaagcgcattcctcttgttggaaatattgacatatcgattatcgaagaaggcaatccgcgcctgctctcatttaaagcgggcacgctcgactatgaattcgttggcattgacatgattgcgagcgttctcgtcaatggcaagctttcgcctgagctcgccgcgagaggcattcgtcaccaacgtgcgctcgatccggcactttcctacgactatttcaatctcgacgatccggttgtgggcggtctcacccccgatcgtattgcgctacgccgcgcgatcatcatggcctatccagtcgatgattacgtgcgagtggtgttccgcaatcaggccgagccggccaatcaaatcatccctccaacacaaacaggccacaacgcaaaaaaagcacgctcggtgcgacaagaccttcagctggcaaacgcattgctcgatcactacaactataaagataaagacggtgatggcttccgcgacatgccagacggaaagccgctggttatcacacgttcaaccacgccgcgcgccattgaccgtgaaacggatgagctttggaaaaagacttttgactcgctcaagatcaaggttgagttcaacaaccagaaatggcctgatttgttgaagcagggacgggctgggcagctacagttctgggggttgggctggatttcttccgcgaccgacggaaactcgtttgtacaactgctttactcgaaaaacatcgggcaatcgaatttctctcgcctgcgtgatccgcgttacgacgaactctacgaacgtgctcaaaaattaccgatcgggccgaagcgctgggcactctacacggcgatgaacgatatagcgatcgcgtactcggtctggaatccgggcgtgttccgctaccaaaatgtcgtcattcaaccctggctcgaaaactacaagcgcaatccattccgccaacacttctggcacttcatggacttggatgaatcgaagcgttcgaagggctagtaggcggctaccgaaacattgaaaaaatcatacgcgacgaagacgatcttgccgatccgcggcaaagcatcgtcggagttgctcgatccgaagccccgaaattcttcaacgtagccctgctatgccacagattgtttggctgctagcgcctacaaccgcgctgcgcgtcgcatctcgcaaacgtattcaacgtttccctaggtaaggttcgacacgtagcaaaattacgcaacacacgaagctgtgagcgcaaaaaaggcgacccaagggtcgccttttttaactcctgcagcttgcgttatgcagccgctggtttcacgcctgccatcgttccaatcttcgcttgatcgcgtgcaagcgcttcacgcgttgcgttcgcgcgatagaagaacgtcaccgctgtgctgctcaacacgatgaagagcgagtagagcaccggaaccaagagcacttcctgctgcatcgtgccgctaaatgtgagcgtgacgatcaagacagcgagcgggccattctgaatcccagtttcaagcgaaatggtgcgtgagcgattgctgtcttgccgcaaaacgcgggccagccaataaccgagcagcatgccgaacaaacccaagccgattgcggcaaagtagacgaaccaaggcgtcgtcaacagcaactggtagttacgcggcacccacgtcgtaatcaggaagaggatcacgagaattcccagaaatccgccgagcagctcaaccaccgcgccgatgtttgcattccatttacgcaacaacatgccgaggatcgtgggcactaagagaaccaccagcacttgcgcaacgttcgcagccggaatcttgaattcacccgtgacccctgcgaggtttgaataaaactcaatgagtagcggtaccgcaaacacagcaaccagcgtggacacgctcgtcatcatgatggagagtgcgagcgcgcctttgctgaagtaagcgaagatgttcgatgtggtgccgccaggcatacacgcaatcagaatcaggcccacagcaagcgcgggcggaaagccaagcaacacggcgagcaaatagcccaggaaaggcatgattccatattggcagagtaagcccaccagtacgccttttggctttttgaatgcgatcaagaaatcgcggaaggtgagcgaagcgcccatgccgaacatgatgaccatcatcatcacgccgagcagtttggtttcgaaatcggtcagcattttttctctctccccaactaaacagcttctttgcgcagctctttgcgcaaaatttttccgataggcgtcttcggcaattcatcgcggaacacgatcttcgccggaatcttgtatccggtgagcaatgtgcggcagtgcgcaagcagctcggcatcggtcaaagtctcatcgcgtttcaccacgaatgcgcgcacggcttcacccgtttttgcatctttcacaccgatcacagccgcttcgagcactttgtcatgcttcgaaagcgcatcttcgatttcattcggatacacgttgaatccggagacgatgatcaaatcttttttgcgatccacgatgcggaagatgaagtcgctatccatcaccgccacatcgcccgtgaaaagccagccatcgcgcaatgtttttgcggtgtcttctgcttggttccaatagccatgcatcacttgcggcccgcgcacaataagctcgcccggttcgcccgcagcaacgggcttgccgtcatcatcaaccaagcgaatcgcagtgccaggtgcggggatgccgatggaatccgttttgcgcaaccctacaaacggctggaagcaaaccacgggcgaggattcggtgaggccgtagccttcggcaagcggcgcgcctgttacctcttcccagcgctttaccaccgcgctgtgcatcgcggccccaccgccgattgcagccttcaagtgtttcggtggaaacgcgaggaaccattcttcgttgagaagcgcgttgtagagcgtgttcacaccggaaatccaggtcacgcgatagttttcaaacgcacgctgcaagttttgaatcggacgcggtgaagggatcagcaaattgcgcgcaccgacgcggtagaacgaaagcaggttcgctgtgaatgcgaagatgtgatagaccggcagggccgtcaacaccgtctcttcgccttcggtgatctgggcacgacccaacgccagaatttgctcaacattccaaagcaagttgccgtgagtgagcattgcgcccttcgatacgcccgtggtgccgccggtgtattggagcagcgcgagatcgtcgtgcttcagcttctgccagtagttgtttacctcaacgcgaagatcgctttttgcttgcgcgccttttgcgatggcctcattaatcgagacatgtggcagcgatgttgtggggatcgccttgttccaatacttttggatgcccttgatgatctgtcgcacgaccggtgggaagaagctcgacactgaacacagaatgacgtgcttcacgcctgtttcgcgctgaatcgtggccatcttgtcagcaaacatgtcgatcaacacgaccgcttccgcgcccgaatcgttgaactgatgtttcatttcgcgctcggtgtagagcggattggtgttcaccaagatgcagccggccttgagaatgccgaacaccgtgatcggcgtgctcaagcaattcggaagctgtactgcaacgcgcgcgcccgctttcaagccgagcacttcgcgcagatacacggcgaacgcatcgctcatgcgatcaatatcggcaaagctcagattgccaaacatcccattgggcatcacgcacgtgaacgcggatttggtaccgaagcgtttccctgccgcttcgatcattgccggcagatttgcgtcgcgcggcggcgctagttttgattgagcgctgtcaccgtaatgcttgctccacggcgccaggtcataaatctcttctctgttcatcttgctccccttccgttcattcgggctgccgccgctcgcacggcgaaaaagtaggggtcgaatgtagggaaatgaagcccctcaaacgcttaggggtaacgcgagcgtgcgggtaagcctagccggggaagcgcacggcgtaggcgcgagccgtcgcggctttgcattttccctacagctttactgcttttgccctttatttattggggctaagggcaaatttatttatgtttttataagtaagttttatgacatctagccccaattcaaaatggacttcggtcttatttcttttttcgtttacggcaaaaggcgcaaaaaaatctctgggcacacacgccccacacacggatgtccactgcagtgaaccgagccctcccgcgcgccgactcaccttccaacatcgtttcatccgagacggatttgggagccactcatgactttacagacaatcacattcgattgcgatcacaaacaacaaagccgccgcaacaaagcgtcggttgcgggattcgctctcgcggcatcactcgcgtgggtgttcagtcactcgccaaatgcgggcgcaaaagatgttgacgtttatctttggtacaccaaagcgccaacgatctacgtagaagcacagcaaggcgcatacgcggcgctctccgccgaaaagaacggtagcccctacatcgcctttgaggccgacatcgacattctgggcggacaagatcgcattcgcgaatggaatttcgccccgaacatgaaagcgctcggtcaatcgtggggctggtcgtttggtacctcgcgcccacccgagcaaggctggggcgtggttcgccagagctatggcttcggggatcggccaaaaaccgtgcgccaaaagatcgtgatgctagcgagcagagatttcgtgaagcaattcgcgattgacgcatgtaacgcaaacgtcgcttcgctgcgaaaccaaggaaaaagtaaccccgaaattttcggcagcgaccgcgtgatcaacgtgcaaacggggcaccgatcacaagtgacctacaccaacatcgccgacaccgacaaatcgcaagtgcaggaagcgcccggtacgccgcagaagcaagccgcgatcgtgtgcatgaaaaccaatccgcaacgcgtgccgccgccgcagaattacgaagcgccggttaccgttacgcaatcatcgctcaccatcatcgaaaaggcgagcgccaacggtgcgtgtaaagtgatcctctctggcgtcgtgcaaacgaatctcgccaatcgcgaagtgaagttccgctacgaacacagcgcgggcaacaaaagcgatgtgaagagcgtgaacaccgatcactcgaaaaccgcgtttttctcccacgaatacgacgtgcccaacaatgcgcatggcaatgaaaccggctttattcgcatggtaggcaccgcgcccgcattcgaaacgcaatggaagagctacgcgatgagctgcgtgaacaaagcgccaggcggtttgcaaagcgcgggcggcggtgctgccccgaagatgccgccccaagcgacccgcgcactcacacaaccggccacgccaacggtgacgccaccgcgagcccacgagcgcgcaaaaacaccttaattcacttacagaaagcgcgcgtcaggagcgataacgccctacgcgcgcttcatcgcttctagcgcgctggcaacatgggtcatggcggtatcgacgaagcgcagttcctcatcgctaaatcgcccggtcatcgcagtcaccacttcgccttgaatcgcataggcggcttcggccagggcaaatcccttcgtcgtcagatgcagtaagcgcgcacgggcatcgacctcgctcggcgttcgaaccaccaagcccgcgccttccatccgcgtcaccagcatgctgattccgctttttgccacgaagcaacgctctgccaactgctgttgcgtgagccccggtaaacgcagcaaattcaccaacacttcatgctccgccagcgacaaattgagcgacgcaagccgttcggtaagcgtcgcagtgcaaaggttgtaagcgcgcaccacactcagccacgattgcaccgccagcgctgacggcaaagccgcctgagtctcgcccgcgggcgagcggatagcagccgccttcgagcgcgacgcgatcgcgcgggcatcgggcacttgcgcggtcgtgcgcgtgcgcgcacgaggcggcgtcaccttcggcgcaacgctttgcccgcgcggcgtggcgcccggcttagccgcacgcttcgaggccgcgccctgcggtttggcgactgcttttcgattcatccacgcattttcgcgcacttggcaatgcggcatgttttgctatttagttcaatcttgaaccgtttcgttcaattttgaactattattcgggttctacgaacctggccccagatccccatgaatctctatcttcgtttgctttggaccttcctgcgcggctggcgcaaatcgaaactgcgcgctggcgacacgctggttcgcagctttcgcgtgtggcccaatgatctcgacatcaatggccacatgaacaacggccgctatctcaccatgatcgatctcatgctgatcgaatacttcgttcggattggattcgccaaagtgctcatcaaaaacggctggcgaccgatggcaggcggctctttcatcagctatcgccgcgggctcaagccattccagaaatacaccctcaaattccgactcgacgcctgcgacgagcaatggaattacatgcgcttcgaattcagcgacggcgaaaaactatgtgccgccggatacatgaaaggcaccgccgtcagcaaacaaggtttcgtaaaaaacgaaacctcctacgccgcgatgaacgaacccatctaccccgcgccagtgccggaagcggtgagagattggttgattgcggagcgaggggtggtgggcgcgaactggcagtgacgtaaacgcaacaaatcggcgaagggctaccacctacctatcaaaattgataggttcgacgaagagctcagagtgaacacttgaggatcaaagagccgctacatgcggctttttcttttgatccacggcaaacgcgctcgccgaacaaggaagatcgtttgcacgcacttgcgcgctcagatgcgtgaagatacaaatgaaaaacccagcgacctttcggcggctgggttttggatacggacgaggccttcgccaagtccttattgcagcaacggctctcaccccggatagcaacaacaagacgtatgataggagaagaacgaatgaccggcaacccctcgcccacatcagcgcatgacgcatcgcaaccgcccgtcgcaaaaccgaaactttatcgtgggctcaccaaagaccagatcaacgcgctcggtccactcacgtttggattcgatattggcatcgcctcagtgggttgggcggtcctatcggaaacgcggattgtggatttgggagtgcgatgcttcgataaagccgagactgcggacaaaggcgaatcgctcaatctcgcacgccgaaccgctcgattgctccgtcgtcggctgcgtcgtcgcgcgtggcgattgaccaaactcgcccgttgcctgaggcggcacggggttcttcaggacgcgaaatacttctcgaaagaacctagctttggcgactcaacttgggtacttcgcgatgcggcgcgatctcgtttgcttcaacctatcgaatgggcgcgcgtaatttttcatctctgcaagcatcggggttttcactggatcagcaaagcggaagcgctcgcggctgacggtgatgcagcgagcgagagcggacgcgtcaagaaaggcttagccgaaacgtcgcgaatgatgcgcgaaaaaggctacgaaaccgcagcgcaaatggttttggccgagttcccggaatcacagcgaaataagcgcggcgagtattcaaaagccttgtcgcgcgtcttgctcgatcaagagtttcgcttattgtttgaacggcagcgcggctttggtaatacgttggcgagcgcggccttggaagctgaagtgctcggcagtggcgaccgccgctctggattgttttgggcgcaaaagccaccgctggctggtgctgacctgctcaagatgctcggcaagtgcacgttcgagcgagaagagtatcgcgccccaaaagcatccttcactgccgagcggcacgtttggctgacccgtctgaataatctgcgaatgacggtggacggcattacccgtccgctcgacgagagcgaacgagccctcgctctcgcgctgccttatgtatcgggcgaaaaattctcgtacaaaaacttgcgtacggctctcgaaaaagcagggctcccaaaatcattccgcttcgcgggattgagctatccgagcgagaggcaacgagaggaaaacaaagcaaaagacccagaaggcgaagtgctcatcaaattgcctgcgtggcacgaattgcgtctagcgttcaagcgcgcggattcagaaacgatttggcagaaactttcgactgattcgctcgcgggacggcctgaacagctcgaccaaatcgcctgggttctaagcgtctacaaagatgatgaggaagtcgaacgcgagttaaggaaactcgctcttcccgatgcagagacgtccatagaaattctgctcgggatccgcttcgataagtttcacgcgctttcgataaaagcgcttcggcaaatcgttccgaagatggagcgaggcaaacggtacgatgaagccgtcgctgcgattccggaatacgctcaccacagccaacccgaatcacgtcgccacgaaaagcgtacgctattgccttcgttttatcgaggcgcagatcgttcaggcaaactgctcttcaacgagaatctggatatcccgcgaaatcctgtcgtcttgcgagccttgaatcaagcgcgcaaagtgctcaacgcgttggtgaaagtctacggttcacccgcgcaagtaaacatcgagatggcccgcgatctatcgaggccgctcgatgagcgcaagaaagtcaaaaggctacaagatgaatttcgcgaacgaaacgaagcgtcgaaagagcatttcgcgtcgtgctttgaacggaaacccacgggtatcgagcatgagaagtggcttctattccgcgagcaacacagcaaatgcgcatattctttactgccgcttgatgccaaccgggtggtgaacgatccgacctatgtcgaaatcgatcacgcgttaccttactctcgaagctacgacgatagcaaaaacaacaaagtgctggtgctcaaggtggagaaccagcgcaaagggaatcgcaccccgttcgagtatttgacctccttcgagggcggcgaaaacagtgcgcgctggcgcgaatttgtcggtttcgtcgagagcaacaaagcttatcggcaagcgaagcgctcgcgtttactgcgtaaaaactacggcaaagacgaagcgaaatcgttcatggaacgcaatttgaacgacacgcgctacatctgcaaattcttcaagaacttagtagagcagcatttgcaactggctgaaacgagcgattcgaaacgctgcgtcgtgctcaacgggcagctcacttcgtttcttcgcgcacgttgggggttgctcaaggttcgcgaagaaagcgatcgacatcatgcacttgattccgtcgttgtggcagcttgcgatcacggtatggtgaaacggctttcggattacgcgcggcgacgcgagcttgaatcggtaagtagcggattcgtcgatctcgagacaggtgaaatcattgatggcgcgatgctcgcgcgccttgagaaagatttccccgcgccgtgggaacacttcaggcatgaattggaagctcgcctcaaactagacgacctcacgttcatgcgcgagacgctctcgatgctcggcaactacgacgaatctgcgctcggcgcagccaaaccgctgttcgtctcgcgcgcaccgcaacggcgcaacggcggggcggcgcataaggaaacgatttattcgcaaccgccggattccgtgctcgcgcaggagggtgcagtaaaacagcgcgtcgcgctgacttcgctatcaataaaggatttggatcgcttggttgaccctgaccgtaacgaacgactatacacagcgattcgcgagcggatggaagaatttggcggcaaggcggataaagcttttgccgcggacaagcccctatacaaaccagacaaatttggcgcgcttatagggccaatcgttcgttgcgttaacgtacgaatcgacaaaatgtcgggcattcccattcgcgccggcatcgcgaaaaacgacaccatgcttcgcgtcgatgtgtttcagtcgaagaaagacaaacgatttcatctcgttcctgtttacgtacatcatcgtgtgacggggctaccgaatcgggcaatcgttgcgttcaaagacgagacggattggacagagatagacgacagctttgggttcttgttttctttgtgcccgaacgatctcattgagattacccagaaaggcaaagcggcgattcgtggttactacgcaagttgccatcgcggcacaggcaatgtgaatctctgggcgcacgaccgaagttcgaacgtgggaaaagcgggagcgattgaaggactaggcgtaaaaaccgctgtgtcgcttgtaaaacttaatgccgacgttcttgggaacatctttccggcaccgtccgaaacacgccgtgacctggcgtagcgtcgtcattggcaaacctgcgaagctccgtcgcgagcatttttcgctcgcgatcgatcaggagcaaacggcgtttgtgccgttcgaagacatcgccgtgatcgtacttgcgcatcgcgaaattacgatcacgcacccggtactctcggcgtgcggtgagtatggcatcgggctttactcgagcggcgacaatcatcagccgaacgccgtgttgttgccgtttttgcagcattcgcgcgctgtgcgcatgcagcgcttgcagctttgtattgagaagcctgtcgcgaagcgggcatggatggaaatcgtgaaagcgaagattgcgaatcaggcgttcgtattgcacgcgtttggtatcgacacgtctgagcgtttgcagggctacgcgaagcgggtgcgatcaggcgatagcgaaaatattgaggcgcaagcggcggcgatctactttcccgcgcttttcgggcgcggcttcgtgcgcgcgcaggaatcatggatcaatgcggcgctagattacggctatgcagtgatgcgcggcgcgtgtgcccgcgcgctcgtcgcctatgggatgttgccatcgattgggctatttcacgatagcgagcagaacgcattcaacctggctgacgatctgattgaaccttatcgcccgctcgtcgatttccacgtcgcccgcactgcgcgcgagaacatgggcgcggaactattcgatctcacggcgaaagacaaagcggcgctcgtcgcattgctcaatgttgatcttgcgatgccacggggtgtgatgagtgcgcttgcttccatcgatcaagcggcgcaatcgattcagcggctcttcgatggcgggagtgaacgcgtgcttgaactgccacgcgttcagggtttgatgcagcacaaagacgaccgctagcggcgcacgagcaatgagcagtcagacgaggcgattcatgcgaatgatggtgttcttcgatctgccggtgaccacgaaggcggatcgacgcgcgtatgcgctcttcagaaagtttctcgtgaacgatggctacgacatgctgcaattcagcgtgtatgcgcggatcgtcgccaaccgcgacgccgaagagaagcactatgcaagagtggtcgcgaatttgccccccgaaggctcggttcgcgtcttaacagtgaccgaaaagcaatacgcgagcatgaaaattctggttgggttaccaatttttcaggaaaaaaaggtcaacgccgaccaacttttgctcttttgaaagcacgttttctacaaaagaaaacccgcgccagccatagctggacgcgggtttcagcgcgatctagtgtagctatccggggtgagagcgggagctacaacagtaggtgctgaacttgttttgcacaccacagtgtagctatccggggtgagagcgggagctacaacccatagcacacgcttgtttatgtcgcgctcagtgtagctatccggggtgagagcgggagctacaacctgtgctctataccgctggtctctaacattagtgtagctatccggggtgagagcgggagctacaacgtccgccaagccggtgcaagtcgccgtcgcag

SEQ ID NO: 2909 - DNA, 15016 bp, synthetic construct
  source 1..15016: mol_type = other DNA
  misc_feature 1..15016: note = Synthetic
ccctacacgacgctcttccgatctctgcgcaccgtggccgatgtcgccctggtcgacctcagcctgcgtggcagcagcggcatcgaggcgatccgcggcatgctcgcccgccagccggcgctcaaggtgctggtactgtccatgcacgaaggcgccggccacgtcacccaggcgctgcgcagcggcgcccacggctacctgaccaagtacagcgaaccggccgaggtgatcgacggcatccgccgcatcgccgccggcaagcgcgtcttttccccggaaatcgcccaggtcctggccgccgaggcgatcgacggcgacggcgcgctggcccacctgacaccgcgcgaattcgaggtgctgcgcatgctggtgcatggtgaatcggccagcggcatcgccagctcgatgcacctgagcccgaagacggtcctcaactacctcacgctgatccgccagaagctcgacgccgacaacgatttcaaactgctccacctggctgcccggcacggcctggtggatatccatcacgcgcttggcgcctgaatccataaccatccaccacacccggagaccacaatgaagtcatcgtcactcgcccgctgcctgggcgccctgctgctcgctgccgcctcgaccctggccgcagccgccgaccacgcgacgccgcgcgaagcccgcgccctgttcaacgaggccgtcgcctacctcaaggccaacggtccggaaaaagcctgggccgccttcagcgacccgaagggacagttcgtcaagaaggatctctatgtttacgtgatcgaccgccagggcacctacgtcgccaacggcgccgcaccggacagcctgatcggcctcaaggtcctcgacagcgtcgacgccgccggcctgccgcttttccgcgagatgatcgcggtcaccgagaaacagccggaagcgcgcatcggctacgtctggctcaaccgcaagagcaatcgcgtcgaacccaagttcgcctggctgcaccgccagggcgactacatcctcggtgtcggctactacgccgtccgcgccggcgccgacgatgcgcgcaagctgctcgacgccgccagcgccgaaatccgccagcgcggcctggccaccgccctgggcagcttcaacgacagcaagggccgcttcgtgcgcgacgacctctacgttttcgccgtcaacctgggcagcggcaagttcgaagcgcacggcatgaacccgaaatggaccggcaccgacgccagcgacctgcacgacgtcgaaggcaagccgctgatccgcgaaatgctcgacctggccaaagccaagggcgaaggcacggtcgattacgtgtggcgcaacccggtcaccaacgccgtcgaaaagaagcgcaccttcatccgccgcgaaggcaacagcctgatcggcgtcggcttctaccgcgagtaagcacccacgctcacgaacagccggcccgcgtggccggtttttttgcgcccggaaattttgtgccagaaaaagagaaggcccggcaggtttccctgccgggccggattcggtcgtcacccgaaggtgacaccttattgtagcaacggctctcaccccggaaagctacatggcgttattctacgcattccggataaataactgcaaatcatgagcatgacatacaccattggtctggacattggcatcgcatcggtcggttggtgcgttcttggtgaaacccacatcatcgacttgggtgtgcgcgcctttgacaaggccgaaacggccaaggaaggtgaatcgctgaaccttgcccgacgcagcgcccgcctgatgcgccgacgcctgttccggcgagcatggcgcttgaaaaaactggcccgtctgctgaaaagcgaaggcctgatcgccgacaccaaggcattccagcccgagcacactttcacccgcccgctctggcaattgcgcgtcgacggcctcgaccgcagcctgaacgacgaggaatgggcacgcgtcatctaccatctctgcaaacaccggggctttcactggatcagccgcgccgaggcaaagcaagccgagggcgacagcaagagcgaaggcggcaaggtcaagcaaggactggccggcaccgccagactcatggcggaaaaaggctatcgcagcgcggccgaaatggtgctgggcgaattcccggaggcgcaacgcaacaaacagggcgaatacaccaaagccctggcgcgggaactgctcgccaaggaactggcgctgctcttcgaaaaacaacgagagttcggcaatccccacgcatcaagtgcgctacaaaccgccatcctcggcaacggcgacaagaagagcggattgttctggcagcaaaaaccggccctcgccggtgctgacctgctcaagatgctcggcacctgcaccttcgaaaaaggcgaataccgcgccccaaaagccagcttcaccgccgaacgccacgtctggctgacgcgcctgaacaacctgcgcatcgtcaccgatggcgttacccgccaactgaccgaacaggaacgccaactctgcctgcccttgccttaccaacaagccggcgacctgacctacaagcaactcggcacggcgctgaccaaagccgggctgctggaagtcggcagcttcaaattcaccggtctcgcctaccccaccgaagcgcaaaaggccgaaggcaaggccaaagaccccgaatccgccacgctgatcaaaatccccgcctggcaggaactgcgccaaacgctggccaaggccggcctcgacgacgagtggaaaaagctctcgggcgatgcgctctgcggtcaaccggaaatcttcgatcaaattgcctgggtgctcagtgtctacaaggacgacgacgaagtccgcgccgaactcgccaagctgtcgctccccaaccacgacgcgctcatcgacgccctgctcaacatccgtttcgacaaattccacgccctgtcgttgaaagccctgcgcgccatcgtcccgcccatggaaaagggactgcgctacgacgaggcctgcgttgaggccggctatcaccacagtcagctattcagctccacagatgacaaagaggtttaccttccaccgttctacgaacaatctcgcggccacaagcgcggcgaggaaggcaagatgctctttagcgaacggctggacgaagagatcaccggtggcattccccgcaatccggtcgtcctgcgtgcgctaaatcaggcgcgcaaggtggtaaacgccatcatccgccgctatggctcgccgtcagcggttcatattgaaatggcacgagatttatcgcgacctctcgacgagcgcaacaaaatcaagaaagaacaggacgagtaccgagcccgaaatcaacgcgacagggaacggttcattgagctattcaagcgaccacccaaaggaaacgagtttgataaatggcggctgtatcacgaacaaaacagtcagtgcccgtattcgcaaaagccattagcgccatctggcgatgtcgctgagatctttctcgaaggctccaccgaaatcgaccacgctctgccctactcgcgcagtttcgacgacagcaagaacaacaaggtgctagtcctgacgcgagaaaaccgtgacaagggcaaccgcacaccttacgaatacctgggcggcgcagaaaacagcgaacgctggcagcgctatgtcgcctttgtcgaagcaaacaaggcgtatcggctggccaagcgcacccgtctgctacgcaaggattttggcgaaaaggaagcggaggaattcaaggagcgcaatctcaatgacacccgctacatctgcaagtttttcaagaactatgtcgagcgttacttgaaactggcagacggaagccacgacaagcaatgtgtcgttctaagcggccaactgaccagcttcctgcgcgcccgctggggattactcaaaattcgttccgacagcgaccgccaccatgcgcttgatgcagccgttgtcgctgcatgtagtcgcagtatggtgcagcgcttgtccaattactcgcgcacccgtgaactggagcagatccgcgatggcttcgtcgatatcgcaaccggcgaaatcattaatccggccatgcaccagcaactgcgcgaacattttcccgatccgtggccctacttccggcacgaactcgaagcccgcctgaagatcgactctcccgaactgctacgcgaagaaatggcacggctgggcagctactctgaggaagaactcgcaacactaaagcctctgttcgtttcccgcgcaccgcaacgtcgtaacggtggtgccgcgcacaaggacaccatctacggtcaaccggagaaattcaaggaaaaaggcagcgtcacccagaaggttgccctgtccagcctgacgctgaaagatctcgactcgctcgctgatccgcaccggaacaccaagctttacggggccatccgggaacgcctggaagcctacggtggcaagggcgacaaagcctttccggccagcaacccgctacgcaaaccggataaggacggcaacccgaccggccccatcgttcgaaccgtcaccaaagtcatcgacaagctgtccggcatcccggtacgcggtggcatcgccaagaacgacaccatgctgcgtgtggatgtcttcaccaaggccggcaaattccatctggtgccggtttatgtgcatcaccgggtaacgggtttgcccaatcgggcaattgtggctttcaaggacgaagaggaatggacgctgattgatgagagtttcgagtggtgcttctcgctgtatcccaacgacttggttcagataaagctgaaaggcgagttctatctaggctattacgctggctgcgaccgcgcaactggcgctatcgggttatgggtgcatgatcgcaatgccaatgttggcaaggatgggctaatgcgaataggcgcaaaaacagcttcttctgtcgagaaattccacgtcgacaccctcggcaacatctaccccgccccaccggagaaacgtcgtgggctggcgtagcgtgatgatctcccggccggccaagctgcgccgggagcatttctccctggccatcgagcaggaacaaacggcgttcgtccccttcgaggacatcgccatcattgtcctcaaccaccgcgaaatccagctcacccacccggtcctctcggcctgtgccgattacggcatcggcctctacgccaccggcgacaatcatcagcccaacggcgtcttcttgccatttctcgcccattcccgcaccacgcgcctgatgcgcaaacagatggacattccccgccccctggccaagcaggcttgggccaacatcgttcggcgcaagatcgaaaatcagaccgccgtccttcgtatttgcgcgaaaaacggtgttgaccgtatggattcctacgctcggcgcgtgcgctcgggcgacacggaaaatcttgaaggccaggccgccgccttctacttcacccaactcttcggccagggcttttatcgcgccgaaaaacgctgggtcaatgccgcgctcgattatggctatgcggtcctgcgcggcgccatcgcccggggactggtcgcccacggcatgcacccgcccatcggcctcttccacgccagcgaacaaaacgccttcaatctggccgacgacctgatcgaacccttccgccccctggtcgacctgcacgtcgccaaaaatccggctttcaccgaaggcgatctcagcccgcaggacaaggcagaactggtcgccttgctcaacgtcgatgtcggcatgccgcaaggcaagatgtccgcactatccgccatcgaatacgcggtcgagagccttgccaggttattcgaggagggcaacagcgaactcgaacttccagccttgatcggtttgcaggcgcatcggctggaatgctgaggcatgggactggagacacgacgcttcatgcgactcatcgtcttcttcgatctgcccatggtcaccaagaccgaaaaacgtgcctacgtccagtttcgccgcttcctgctcaatgacggctacgacatgatccagtggtctgtctatgcccgcttgctgaacggcaacgacgaccacgaaaaacacctcaaacgcctgatcgacagcctcccacccgctggctccattcgctgcatgaccgtcacggaaaagcaattcgccggcattcgcctgctggtcgggatgccgctttttcaggaaaaaaaggttccggcgaaccagatgttattgttctgatcccagatttgcacaaaaaaatttcccgcccagctaagccaggcgggaaattgggttgcgtcagattgtagctttccggggtgagagagggagctacaacggatacattcgttcatggctaaggtccttcgattgtagctttccggggtgagagagggagctacaaccaacatggcaaccgtcacctacaccgtaaggattgtagctttccggggtgagagagggagctacaacttcatttctaacactccacgaaagtttcaggattgtagctttccggggtgagagagggagctacaacggtcgttaagtgggacctcgatcaaccggggattgtagctttccggggtgagagagggagctacaacgtcgcccaagtacggacgccggttcgacttgattgtagctttccggggtgagagagggagctacaacttcggtgcggtcggagatgtattttgcgtcgattgtagctttccggggtgagagagggagctacaaccggtgaatgcgcaacccaagggttacacattcaccggtgccgctcccgcggcgtctatagaaatcggggttcctgcctcgaaccacaaaattatctgtcccgtttcgctccatccctgaacacttgtccagaaattgaacggctgccgatccggtggccatccctccggggaaacccctagacggccgcaaacgcccgcccggtggcggttttgccgattttttccgaaccctggcacgggcttcgcactaaaggcggcgccacgccattgcccggcaatggcaagggggaaagccgtccgccacgtatgcccgacggcacatatcaatgcaatgcactacaccaggagataatccatgaggaaaaaaatcatcgcgctggccgttgccgccgccgcatcgagcgctgcctttgccgagagcaatgtcactatctacggcagcatcgacatgggctggatgtaccgtagcggcaataacggcgcgttgccggcgatcaagtcgcagattgcactgcagagcgccggttcgcagagccacatcggtttcaagggcacggaagacctgggcaacggtctcaaggcgctgttcgacatccagtaccgtttcgctcccgacatcggcggcggcccggttctgggaggacatcagtacctgggcctgaccggcggtttcggcacggtcgtcgccggttacctcgacggcctgcgctacggcatctacggcaagtacagccccttcggcaattactcgatgggtaacttcacctcaatgaccacccagtacgaccgcgccaccaacgccatggcctacatctcgccggctttcaagggcttcaccctgatcctggcgaccgccaccaacacgcagggcgcggaaggcagcctgaacggcgtacacaccctgggcggcgtcgccaacggcggcaacaacggcgatgaccgcctgttctccgccaacctgatctacgccaacggcccgctcagcgtcgacctcgactacgaaaccacccgggccgtcggttattccaacaaccgcctctacgtgctgaccaccggtgcttcctacgatttcggcgcggtcaaggtctccggcctgtacgacatcatcaagggcgatccgaattcgctgatcggcggcaacatcgacctcgacgccgtcaccccgggcaaccagaacctgggcaacctggctgccggccagagctacaaccgccgcaactggttcctgggcgccgaagttcctttcggccgcttcaaggcgatggccggctacggcaaggtcaaggaccgcaccctgaacaacgccgacgccagcaagtgggccatcggtgcgcgctacagcatgtccaagcgcaccgagttctacgccgattacggtcagatcaagaacgacaacaacgcccgcttcaccatgaacccgatgggcaactcgctcggtctgagcggcgttggcgtcaagggcttcgccatcggcatgaagcacagcttctgatccaccggcgcgcccgatgggcgcgcttcaccgcttctcttgcaccagatgctcctccgcatctgttcagggcgccaccaggcgccctgttttttttccggcgccggttgctccacatttgaacaggcgttgatcaattgagcacgacggaatgctcagcgccgagcagaaaaaatacaacacattgttttatatgaagtttgtttccagacaacggcctggcacgccctatgcgaaataacaggcacgagtcacgaagaagttcgatagcaagcgatacccggcttccaaggacttgcccgcaatcatcccgaaataatggagacataaatgatctacgcagcccccggcgccgctggcgcaaaaatcgcctacaaggccaagtacgacaacttcatcaacggccaatggaccgccccggtcaagggccagtacttcgacgtggtgaccccggtcaatggcaaggtctatacccaggttgcccgctccaccgccgaagacatcgagctggcgctcgacgccgcccacgctgccttcccgaagtggggcaagaccgatgcgacgacccgctccaacatcctcctgaagatcgccgaccgcctcgaagccaacctcgaactgctcgcctacgccgagaccgtcgataacggcaagccgatccgcgaaacgctcaacgccgacatcccgctcgccgtcgaccacttccgctacttcgccggttgcctgcgctcgcaggaaggcggcatctcggaaatcgacgagaacaccatggcttaccacatccatgagccgctcggcgtcgtcggccagatcatcccctggaacttcccgatcctgatggccgcctggaagcttgctcccgcgctcggcgccggtaactgcgtggtcttgaagccggccgaatcgaccccgatctcgatcctgatcctgatggaactgatcgccgacctgctgccgccgggcgtgctgaacatcgtcaatggtctgggtcgcgaagccggcatgccgctggccacttccaagcgcatcgccaagatcgccttcaccggctccaccgccaccggccgcgtcatcgcccaggccgccgccaacaacctgatcccggccaccctggaactgggcggcaagtcgcccaacgtcttcttcgccgacatcatggacaaggacgacggcttcctcgacaaggccatcgaaggcatggttctgttcgccttcaaccagggcgaagtgtgtacctgcccgagccgcgcgctgatccaggaatcgatctacgatgccttcatcgagcgcgtgatcaagcgcgtcgccgcgatcaagcagggctcgccgctcgacaccgaaacgatgatgggtgcccaggcctcgcagatccagatggacaagatcgagtcctacctcaagctgggcaaggaagaaggcgcccaggtgctgatcggtggcgaacgcgcccacctcggcggcgacatcgaaggcggttactacatccagccgacgctgttcaagggtcacaacaagatgcgcatcttccaggaagaaatcttcgggccggtgctcgccgtgaccaccttcaaggacgaagccgacgcgctggccatcgccaacgacaccatctacggcctcggcgccggcgtctggagccgtaacggcaacgtcgcctaccgcatgggtcgcgccatccaggccggccgcgtatggaccaactgctaccacgcctacccggcccacgctgccttcggcggctacaaggaatccggtatcggtcgcgaaacgcacaaggtcatgctcgaccactaccagcagaccaaaaacctgctcgtttcctactcggaacagaagctcggtttcttctaatcgaatcatctccctccctgtccgaatgcgggcaattcgggggcgggcaaccgccccctttttttttgaattcctttctggtgacacgatgaaaaacacgattccttccaccgccagcgtcctcctcgtcgccggcctgctgagcctggcgctgccggcccaggccagcgaagccatcgtcaagaaggcccgctgcgtcgcttgccacgccgtcgacgccaagcgcgtcggcccgtcctacaaggacgttgccgccaaataccgaggcgacaagaaggcaccggccatgctcttcgaaaaggtccgccacggtggtagcggtaactggggcgcagtaccgatgctcccccaccccgccgacaagatcagcgacgacgatctcaagcaggccatcgcctgggtgctgtcgctggaatgatccgcacggccgggcggctggcgccaggcgccggccgctccggccgattcgacagcggcttagtcatttgaggcgctgggttccgcgcctgacgcgcgggcatactttttcttgtgtggccaagaaaaagtagccaaaaagaaagccacccccaggtcggcgccgggctacgcccggtcccttgcgctactcggcgcgccgggcggctgcggaactcggcccagcgggcctcagacagtcctcgccgacttcccccggcacccctgcgttgctcagcgcctctcagggggcccagaaaaccagcggtctacgatagtttgtggctaaaagagcgtcgtgctttcagcaacgatcggtttttcgggccccttgggaggcgccgagcaacgcaggcgttggcggataaagggcgagcactgtctgaggggcaaagccccgagttgcgcagcccccgccaacgacgagtagcgcagggaacccgcgcagcgggcgccgacccagggtcgccttcttctttggctactttcttcttggcgaaacaagaagaaagtacgcccgccggtcaacggcggaacccagcgcaaccaaggggcaacagttcacgccgctggcgcgatctcgccccctgtaccatttttcaacagctgttcatttccgcaacagcgcaccgggcaacatgcgttgcaaggtgccgtcgcgcagcaacagatgtttcaccgtgccggcgaggtgcaggaggatcagcgaggcgccgccccacaccagcactacgtgcaactgcttgaaaatgaggttgagtccttcgtcgggagcgaacaggcgcggcagttcgtgaccgaagaatttgaccgggaatgtcgtgaacgccgaggccaggtaaccggcgagcggggcgaggacaaggaaggcgtagagcgccagatgggtggcgccggccaccttggccagcggcccttgcagcggcgagggcggcggcgggtggaagcggcgccagccgaggcgtagcgccaccaggagcagcgccagcaggccgagcgatttgtgcaggccgtaggcggcgctgcgttcggcgcccttgggcaggtcggtcatcgtccagccgagccagatcagccagacgatcaggatcgcctgcgcccagtgcagcaggatcgccggcagcgtgtagcgggcggcgctcatcggatgctgacgccccagggcagttcgccgacggcaatgtcgccggttttctcgaagcggccggtatcgatcaccgaaacgctgttcgagcgcccgttggcgacgtagagcttgccgccgtccggggtcagcgccatgttccagggccgcttgccgacggcgacagtgccggtcaccgtgttgctggcgacgtcgatggccatcaccgtaccgtcgcggccgttggagatatagacgcgcttgccgtccggatggatggcgacgccattgggatacttgccggcaggaatttcggccagcaccttgtgagtggcgacgtcgatggcgtaaaccttgtcggccagttcgcaggcgacgtaggcacggctgccgtcggccaggaagccgatgccgcgcggacgcaggccgaccgggatgctggcgacctggcggcgggcggcgacgtcgatcacatcgacctgttcggcgtcctcggcgctgacgtagagccagcggctgtcggggctgaacacggcgtgctcggggttcttgccgtgcaccttgatgcgcgccagctccttcgccgccggggcgctgagcagcgtgaccacgttgtcgtcctcgacggcgacggcgagcagcttgccgtccggcgagaggctgacgccttccggcgaatcgccgaccttgacccggcgttccagcttgccggcggcgctgtctacgatcagcaggctgttgctcttaccgtcggtcaggtagagccggccgctgccgccggcgatgccgcgcggccgttcgccgatgggaaactggcggacgacggtgtcgctggtagtgtcgataacgctgacactggcgcccttttcgttcggcacgtaggcatagggttcggccgaggcgccggtggcggcgaacagggcaaggagaaaacaggaggtggcgcgcatgatggcctcagttggcttgataggtgatgccgtgctggcggaagatggcggcgatgctgccatcgcggcgcaggtcggcaacggcggcgccgacggcttcggcgagcgccgcttcctcggccttgacggccatgccgagcggccagccgtcgatcttcagttcggcgaagttggcgctttccagcaccacctgctgctgcccggccagcgccgcttccagttcggcgcgcggggcgaggaccgcggcgatctgaccggcagtcaatgcccgcccggcttcggcgacggtggtgaagtgcacgacgttctcgtgcaggcggccgttgagcgcggagagcaggaaggcatcggccagggtggcggtttcgacgccgatcttctcgcgggtgaacacttccagcgccaccgcggcggagccggcaagcgccgggacgcgctgcggattgcgggcgacggccaggctttcgcggtggtaggtgccaaagatgcggaccttgtcgttggcccgcgccaggccttcgtcgaccggcacgtggagcatcaggtcggcgggctgagtgccgaggtaatggcctttccagaccatgttgcgcaggtcgtcgctcatgtcctcgtcggcgttgaagccgacgatctcggcggcgaggccgaggcgggcggcgatggcgcgaccgaggtcggcgtcgatgcccttgccgccggccagcgagtaaggcgggaagtcgttatagacggcgatgcgcaggcgaccgcgctggcggatcgtctccagcgcatcggcaaccgccggcagggccaggcacaggggtagcgcggcaagcgccttgaggcagcggcggcgatcattcttcatggacggtctccagccaggcgcggatcgcccacatcgcttcctgcgacagggtgccttcgaacggcggcatgtagacgcgaccgtcgcgcacggcgcccttgcggatgcgctgcatgaatacttcgtcgccctcgtcgcccttcggcaggtaacgcagatcgggggcgataccaccggacaccgcgcccaggccgtggcagcgcgcgcagttctggttgaaggcggagtcgccgatgcggatcgccgtcttgtcttcgcggtaggggttggcggtctgccagtcggtgccgagttgcttgaggccgctggtatcgaccgcttgcggcacgacgtcgccgtgggcaaaaaccagcgaggacgtggccaggcacagggtggcgaccagggcgccgagggaaagggtgtaatgcttcacggggtctcctttggtgaatgcttaacgacagcttgtgtaaggcttgtctgcaaaccctgtgccagctccagcaatttgcccccggatcggcccaaaacaacgaaaaccggtgttttgcccctgatgatcgctggcacggccgttgctttggtagtcgcgacgcagcacaaaaaattgctcattaaaaggtcaagtgctacgttatgaaacaacatacaaagaacgaacacgggacacggtggagagacaagatgggacagattcaagtcgttgccggcctgcacggcccacgcctgcgcgaggcgcggcaggcatttttcgaacgcggagagctgccggccgggatgatcgacccgctcatcctgcgttcctgggaacgctgccgacgcttcgggctgaccgagaactacgcgctgccgggcgtcgagtcgcttgaccgggtggcactgaagagcgagcaattccgtaaccgctacctgctgcagcaagtgcggccgatcatggaacatgtctatgagcagatccgcgactcgggcagcatggtcatcctggccgacgccaacggcttgctgctcgacaccgtcggcgatcccgatttcgtcgaccgcgccgaccgcgtcgccctcgcccccggtgcctcctgggacgagaaccagcgcggcaccaacgcgatcggcaccgcgctgtccgaagaacgcccggtggaagtgctgggcgccgagcattttctcgaacacaacggcttcctgacctgctgcgccagcccgatcttcggcccggacggcgcgctgatcggtgtcctcgatatttccggcgactaccgggcggcacagcgccacaccctggggctggcccggctgtccacggcgctggcggaaaaacggctattcgagtcggcgcacggcaacgacatcatcgtctgcttccaccctcgccccgactacctgggcagccccaaggaaggccaggcagcggtgagcccggacggccaggtcaaggcaatcaactacaacggtctggaaatcctcggcatccgccgcgtcgacgcggtccgccgcgatttctcgatggtcttcgagcacaatctgggcacgctgatcgaccgccagcggcagaacaaccaggggcacag

SEQ ID NO: 2910 - DNA, 14799 bp, synthetic construct
  source 1..14799: mol_type = other DNA
  misc_feature 1..14799: note = Synthetic
catgggcgacgggcaacgcacaggcaaggctggcggcgacggccagcagacggaaaccttgcagcatggagatcctcctgaaatcgcaaagcgaaaattatacgcccgtgctagccagcgggcgctcgccacaactttggtgaatatgcgagaatccgccgcatgattgcgcgccttaccgtcctcctcgccgccctctgcctgaccggctgcgaccagatcagccagcgcctgggcatggaagacccggccgccaaggaagcgcgcctggagcccgaagcccgcgcggtgggcagcgcctgccgccattccggccgggcgatcgaggattgctacgcgatttacggctggctgcccaaggccggcatctacgccggctggcgcgacatggacgaatacatgcggcagaaccagatcgagacgatcgcgccgcaactgccgcccccggagccgccgggcgcccagcgcaagaaacgcaagacggccgaggaagccccggccgccccgccggccgaagagcctgccgccgccgcgcccgcagcagccgcgcccgccccggcaagcgccgaaccggccgccgccggcaaggcggcggaaaagaaaaagtaagatcgccgacgcgcacgcaaaatcctgcctgcgacgcgacgggggtataatcacgccccatgtctgaaatcaataccttagccggccccgatgccggcatgccggctgccgaggcagcgcccgaaatcaccttcgccgacctcggcctcgcgccggaactgctgcgcgccgtcaccgacgaaggctacaccaagccgaccccgatccaggccaaggccatcccgctggtcatcggcggcaaggacatcatgggcggcgcccagaccggcaccggcaagacggcggcgttcacgctgcccatcctgcagcgcatcctgcccttcgcgtcgagcagcccgtcgccggccaagcacccggtccgcgcgctgatcctggcgccgacccgcgaactcgcgctgcaggtctacgaatcggtcaaggcctacagcaagcacacgccgatccgttcgatgtgcgccttcggcggcgtcgatatcaagccgcagatcgccgaactgaagaagggcgtcgagattctggtcgccacccccggccgcctgctcgaccacgtcgagaacaagagcgtcagcttcaattcggtgcaggcgctggtcctcgacgaagccgaccgcatgctcgacatgggcttcatcccggacgtcacgcgcatcctgaacatgctgcccgcccagcgccagagcctgctgttctcggcgaccttctcggaagagatcaagaagctcgccgacaccatgctgaaatcgccggtgctggtcgaagtcgcccgccgcaaccaggtgtccgaaaccatcacgcaccgcgtgcacccggtctccgaatggggcaagcgcggcctgctgaccaagctgctgaagtccggcgaaatccgccagtgcatcgtgttcatgcgcaccaagcagggctgctcgcggctgacccgcgaactgcagcgcgccggcatccacgccgacgcgatccacggcgacaagagccagctcgaccggatcaaggcgctcgacgccttcaaggccggccagacgcacgcgctgatcgccaccgacgtcgcggcgcgcggcctcgacgtcgacgacctgccctacgtgatcaactacgagctgccgcacacgccggaagattacgtgcaccgcatcggccgtaccggtcgcgccggcaagatgggcaatgcgatctcgctggtcgccgcgcatgaagtcggctacctggtcgatatcgaaaagctgatcaagcgcccgatcgagcaggtcgaggtcgccggtttcgagccggaaccggaatacgaatatcccccgggcaacaagaagaagcgcgtcgcgccgccgaaggcgccgctggccagcaagccggagcgtcacgaacgcagcgaccgccacgagcgacatgagcgccaggaacgccgtccgtcgtcccgccgcaattcgacgatcgccgccgacggcttcgatttcagcaagccctacgaagccaagccgcaaggcgaggtgcccgattcgccgaacgcgccggccaaggtcgatccgcacaagccgaagcgcgtcgtcgccgcgctgctcggcggactcggccgcaagtaaggccgcgctccggccacgcgaaaacggcgcccttcggcgccgtttttcatttccgtacccggtccaccgcgaacagctcagctggcgtagaagcgctcgacgatgacgtcgacgaattccggcagcgaatcttcgtcgagtccgagctccggcagcacttcggccttgacccgctcccattccgggttgggcgcatgcatcgtccggtaatggatctcgacggccagttgcaggatggcaaccatgctgcgcgcgtcgtgcatgcccagttcgccgatcgcatggtggtagcggatcgcgtcgcagatgaaatcgggcaggcaccagtggcgggcgaccaggtagccgatcacgcagtggtcggtgttgaacttgcggtcctcctcggccaggtcggtccagcgcccggcttcgcccaggcgcatttcctggcagtaggtcggaaagcgctgcatcagcagcggcaccccacagtcatggaagacgccggccaggtaggcctggtccggaaagatgttgcagacggcgatgcgctcgtcggcgatcagcatcgccagctggccgatcgcgtgcgaacgcgcccagtaggcttcgtagaccgcccggtacttgcgcaggtcgccggcactgcgcagcgcgatcgcctggaccaggttgaaggtctgccgggtaccgaccgcgtgcaggatttgctcgacggtgtcgaacggctgatgctgccggtaggcggcgttgccgacgacctggaagagcagcgcggtcagccccggatcctggttgatcgtccgggccagcgggcggacgtccatttccttgcgcgccatcagcttgcgcagctcgtcgaggacccgcggctgggcgggaatccggatgccgccctcgagcaggcgcttgatgcgggcgacgtcgacgtcgccgagggattgcgtgatgtcgagaacggacggtgcggtggtcatggcagggcttcgtcgatcagctcgatccagtggcggaccggcaccgaacttcccgcctgcagatgggccaggcagccgatgttggcggtggcgagcacgtcgggactgcccgcatgcagggcgtcgagcttgttgtcgcgcagtttaccggagatttccggctgcaggaccgaatacgtgccggccgagccgcagcacaggtgaccgtcggcaaccggcgtcagcgcatagccggccgccgccagcagtccttcggcgacgccgcggatcttcagcccgtgctgcaaggtgcatggcgaatggaaggccagcttgccgcgtgcggccgccggcagcagcgcgcgcaggcgttcgccctcggcggcgacgacttccgacgggtcgcggcacagttcgctgattctggccgctttttgggcgtacaccgcgtcgtcggccagcagatggccgtagtcgcggacctgcacgccgcagccggacgcggtgacgacgatggcctcgacgccgttttccacgtgcggccaccaggcgtcgatgttgcggcgcatgtcgtccttcgcccgctcctggtcgttcaggtggaagcgcacggcgccgcagcaagcggccttcgcttcctcgaacagggcgatgccgagcttgtcgagcacgcgcgccgtcgccgcgttgatgttcggcgccagcgacggctgcacgcaaccggccagcgccagcatgcgccgcgcctgccgtgtcttttccggccacgggcgggcggccggctgggccggcggcagcttgtcggccagcgcgcccggcagcagcggacgcagcgcgcggccgacggcgaccgcggcgccgaacagcgccgggcgcggcagcacctccttcagcagcgcgcgcggaatcgcctccttcagcggccgctgcagcttcgcctcgacgacctcacggccgatgtcgagcagccggccgtactggacgccggacgggcaggtcgtttcgcaggaacggcaggtcaggcagcggtcaaggtggctgcgcgtcttctcggtgacttccctgccctcgagcacctgcttgatcaggtagatgcgcccgcgcggcccgtcgagctcgtcgccgagcagttggtaggtcgggcaggttgcggtgcagaagccgcagtgcacgcaggtgcggagaatctccccggcgacctggccggcacgggattcacggatgaaatcggcgagtcgggtatccatcagaactccgcgtagagacgaccggggttgagcaggcccttcgggtcgaaggccttcttgaggcggcggtgcagcgcgagcagcgccggcgacagcgccgtgaaggcgccttctcggcagcgcagcgattccggcgcacggtacagcacggcgtggccgcccaggcgggcggcggcgccgcgcgccgcatcctgctcgccggcataccagcgcagcgcgccgccccattcgaccgcggccggcgtaccgagtcccgcatcgggcgccgtcgacggcagcgccaggcgccacagcaccggcgatgcgaaggccgggtgcgtctgctcgcgcaccgattcccacagtttgccggcgtcgaccgcgacctcgccacccagggcccgctgcgcggcctcgaccgcggcaccggcgccggacaggcgcagccaaagccggccgtcgtgccagaacgacgccgagatcggcagcggcttgccgccccaggcgttcagccgggccacggcctctttttcgtccagctcgaacacccgcgtcgcctcggcgacgggcttcggcagcaccttcagcgtgacctcggcgagcacgccgagcgtgcccaggctgccggcgagcagacgcgacacgtcgtagccagcgacgttcttcatgacctggccgccgaagtcgagcacctggccggtgccgtcgaccagccggacgccgagcacgaagtcgcgcgccgccccggcctgctgccggcgcggaccggacaggccggcggcgatgcagccgccgagcgtggcgccaccgaagcgcggcggctcgaaggccagcatctggtttttttcggccagcgccgcctcgatgtcggcgagcggcgtgccgcatttcgcggtcaggtagagttcggtcggctcgtaggcgacgatgccgcggtgaccggagacgtcgagcacgtcgccggccagcaggccgccgtagaaatccttgctgccggcgccgcggatgcgcagcggcgtgtggctgtcgtgggccgcgcggaccgcggcgacgatgtcgtcgagctgcatcagaagcgctccagttccgggaatttgagttcgccgcgatgcacgtgcatgcggccgtattcggcgcagcggtgcaggctgggcaccgccttgcccgggttcaggaaaccgccgtcgtcgaaggccgccttgacgcggtggaaggcctcgagctcgggggtcgcgaactgcacgcacatctggttgatcttctcgacgccgacgccgtgctcgccggtgatcgagccgcccaacgccaccgacagctcgaggatttcggcgccgaaggcctcggcccgctcgatctcgcccgcttgcgacgcgtcgtacatgatcagcggatgcaggttgccgtcgccggcgtggaagacgttggcgcagcgcaggccgtatttcttctccatcgccgcgatcgccgacagcatctcggccaggcgcttcctcgggatcgtgccgtccatgcagtagtagtcgggcgtgatccggccgaccgccgggaaggccgccttgcgcccggcccagaaacgcaggcgttcggcctcggactgcgagacgcgcaggtcgcgggcgccgctcgcggtcaacaccgcggtgacgcgggcaatctcctcggcgacctcctccggcgtaccgtcggattcgcacagcaggatggcctcggcgtcgaggtcgtagcccgccttgacgaagggctcgacggccgcggtcgccggcttgtccatcatctccagcccggccgggatgatgccggcggcgatgatcgcggcgaccgcgtcgcccgcctgggcgacgtcgtcgaacgaggccatgaccacctgcgcgagttcgggcttgggcaccagcctgacggtgacctcggtgaccacgccgagcatgccttcggagccgatgatcagcgccagcaggtcgtagcccggcgcatccggcgcttccgagccgatctcgaagacctcgccctcgatgctgacgacgcgcacgcggacgacgttatgcacggtcaggccgtatttcaggcaatgtacgccgcccgagttctcggcgacgttgccgcccagcgtgcaggcgatctgcgacgacgggtcgggcgcgtagtacagaccgtgcggcgccgccgcctcggacaccgcgagattgcgcacgccgggctggaccacggcgagccgggccagcgggtcgaggcgcaggatcttgttgaagcgggccagcgacagcacgacgccctcggcatgcggcatcgcgccgccggacaggccggtgccggcgccgcgggcgacaaccggcacgcccagctggtggcaggtgcgcagcacgtcgatgacctggccctcggtctccggcaggcagacagccatcggcagctggcggaaggcagtcaggccgtcgcactcgtaggggcgcaggtcctcgtcgtcggtcagcaggcagtgcgccggcagcaggaccttcagccgccgcgcgagggtcgcgcggtcggtgcggaaggcgggttcgtcgttgtgagtcatggcattcactcgatcaggaaggcacggaaatcgttgacgttggtccgggtcggcccggtgaccagcagatcgccgaggccggcgaaaaagctcccggcgtcgttggcggccagggacgcggcggcgtccagcccggcggcgcgggcgcgggcgaggctgtcggggccgacgaaagcaccggcgttgtccccggcgccgtcgatgccgtcggtgtcggcggccagcgcgtggatgcccggttcgccggccagcgccagcgcggcgccgagcaggaattccgtattgcgcccgccgcggccggcgccgcgcacggtcaccgtggtctcgccaccggacagcagcacgcagggcttttgcgccggaaagccgtgtcgaccgcaagcgaccgcgatgccggccagcacgcgaccgacctcgcgcgcctcgccctcgatcgcgtcgccgaggatcaggggcgtcacgcccagccggcgcgcctcggcggcggcggcttcgagcatctgccgcgggctggcgaccagccggaaggcaccggccgccaggtcgcccggcttgggcgtctccagttcgccggatgccaggcgccggcgcagttcgaccggaaggtcgatggcgtggaaatcgagcactttcagcgcgtcgaccgcggtcgtcgggtcggcgaccgtcgggccggaggcgatcaccgccggatcgtcgccgggcacgtcggaaatcgccagcgtcagcaccggcgccggccacgcggcgagcgccagccggccgcccttgatcgccgacaggtgcttgcgcacgcagttgatgtcggcgatcgtcgcgccgctgttgagcagcgcggcgccgatcgcctgtttctgttcgagcgtgacgccgggcgccggcgccgcgagcaaggccgagccgccgccggaaatcagcgccagcacgcggtcgttcgcggtcaacccggaaaccaggccgagaatgcgcgccgcggccgccgcgccggcggcgtccggcaccgggtgcgcggcctcgacgacctcgatgcgcgcgcacggcgcgccgtgtccgtagcgggtgacgaccagcccggagagcggccccggccacgcggcctcgaccgcctgcgccatcgccgcggcggccttgccggcgccgacgacgatcagccggccgcccggtcccggcggggcgagttcggccagcgcggcgggcacgcagcgcgccggatcggcagcggcgacgcccgcgtcgaacaggcggcgcagcagttcgcgcggattcatcgcggcagccagcccagccccgcctcggtcgtggtcagcggcttgtattcgcagccgacccagccggcgtagccgagccggtcgagcagcgcgaacaggaagggataattgatctcgccgctgcccggctcgtggcggcccgggttgtcggcgatctggacgtggccgatgcggccgatattggcctccagcgtgcgcgccaggtcgccctggatgatctgcgcgtggtagaggtcgagctgcagcttgacgttgtcgcggtcgaccgcgtcgagcaggcgaattgccttgtcgacgccgtccagccagtagcccggcatgtcgatccggctgttgatcggctcgatcatcaccgtcgcgccgatggtcgcgaagcggtcggcggcatggcgcaggttggcgacgtaggtcgcctccagctcggcttcgtcgtgcccggccgggcgcaggccggccatgcaatgcacgcgctcgcagtcgaggatcatcgcgtaatcgagcgcctgttcgacgctttcggcgaattcgccctggcggtgcggcaggcaggccatgccgcgctcgccggccgcccagtcgcccggcggcaggttgaacagcacctgctcgacatcggcgtcgcgcagccagtcggcgacgtcgtgcgccggccagtcgtaggggaaaagatactcgacgccccggaacccggccgccgccgcggcggcgaagcgttcggaaaagggccggtcggcgaacaggaaactgaggttggcggcgaactttggcatggcgacgacagtctgtagcgggcggctcagtataatctgccgctttcgcccccgcctctaggagttaacccccatgaccgaacgcgccggaaaccgcctgtccaaaatcgtcacccgcaccggcgccgccggcaccaccggcctcggcgacggcagccggacgaccaaggacagcctgcgcatcgacgccatcggcgagatcgacgaactgaattccagcctcggcgtgctgctggccgaagacatcccggcccgcgtccgcgccgcgctgcgcgacgtccagcacgacctgttcgacctcggcggcgaactctgcctgcccggcatggaaatcatcaaggatgcgcaggtcgcccgcctcgaggcgctggtcgaggaattcaaccacgacctgccgatgctgaaggaattcatcctgcccggcggcacccgcccggccgcgctggcccacctgtcgcgcaccgtgtgccggcgcgccgagcgttcgatggtccgcctgcaccacgccgaagcgctgtccgacactgcgcgccgctacatcaaccggctgtccgacctgctgttcatcctcggtcgcctgctcaaccgcgccggcggccgcggcgacgtgctgtggcagaagggcaagaacgctgccgcttgatgcatccccggcgcgtccacgataattgacggccacaggcaggagaaagatcgtgtaccgcgtcgtgaccaaataccgggacagcggcagcgcccgtcccgtcgtcgagcgcggcccctggcaccccacccccgaggccgccgaatactgggccgacgtgctgcgcgggcacggctacgtcgtcaatatcgaaacccagttcagcggcgcaatgatcgagacccacaccgacaaccacgcgctggccgacgcgctggccagcatggcctgaggccgggaacaaaaggaaaggcccggcaggtttccctgccgggccggattcggtcgccacccgaaggtggcaccttattgtagcaacggctctcaccccggaaagctacacggcgttattctacgcactttgaataaccgaccgcaaatcatgagtgcgacatacaccattggacttgacatcggtattgcatcggttggctggtgcgctctcggtgaaacccacattctcgatctgggtgtccgcgccttcgacaaggccgaaacggccaaggaaggcgaatcgctgaatctcgcccggcggaccgcccgcctgatgcgccgccgcctcttccgccgagcctggcgcctgaaaaaactggctcgtctgctgaaaagtgaagggctcatcaccgacacaaaacttttcaagcctgagcagcctttttcagcctctctatggcaactgcgcgtcgaaggccttgatcgccatctgaacgaggaagagtgggcacgcgttatttaccatctgtgcaagcaccgcggattccattggattagtcgcgccgaggaaaaacaggctgaaggtgacggcaagggcgaaagcggtaaagtaaaacaaggcttggctggcaccaccaagctgatggcagaaaaaggctaccgcagtgcagccgaaatggtgctggcagaatttccggaagcgcagcgcaacaagcagggagaataccgaaaggcactttcgcgggtacttctggcgaaggaactggccctccttttcgcccaacaaagaaaactcggcaactcgtacgcctccagcgaactggaaactgcagtcctcggcaccggcgatcgaaagagcggtctgttctggcaacaaaagcctgccctggccggcatcgacttgctcaagatgctgggcacatgcactttcgagaaaggcgaataccgcgccccgaaagccagctttacagccgaacgccatgtctggctgacgcgcctgaataacctccgcatcgtgaccgatggtgttacccgccaactgaccgaacaggagcgccaactctgcctgcccttgccctatcaacaagccggtgatctgacctacaaacaactcggtacggcactgaccaaagccgggctgcaggaagccggcaatttcaaattcgctggtctcgcctaccccaccgaagcgcagaaaaccgaaggcaaggcaaaagacccggaatcctccacactggtcaaaatcccggcctggcaggaactgcgtcaaacgctgaccaaggccggcctcgacgacgaatggaaaaaaatctcgggcgatgcgctctgcggtcaaccggaaattttcgaccaaattgcctgggtactcagtgtctacaaggacgacgacgaagtccgcgacgagctctccaaactggcactacccaacccggatgcgctcattgacgccctgctcaacatccgcttcgacaaattccacgccctgtcgctgaaagccctacgcgccatcgtgccgcacatggaaaaaggactgcgctacgacgaggcctgcgtgcaggcaggctaccatcacagtcaacttcacaaggtcggcgaaggcgaacacaagtatttgccaccgctttacgccgggcgggatggcaatgggcgaatgatcttcgcagacgacgcggacattcctcgcaacccagtcgtacttcgctcgctgaaccaggctcgcaaagtggtcaacgcgatcgttcgccgctacggctccccggcagcggtccacatcgaaatggctcgcgatctgtcccgtccattcgatgagcggaacaagatcaagaaggaacaggacgaataccaagcccgcaatcaacgcgaccgggaacagttcatcgaactgttcgggcatccccccaaaggccaggagttcgagaaatggcgtttgtatcgggaacagaacggccaatgcgcctactcgcagaaacccctcgcttcatcaggcgacgtcgccgaaatattcctcgacggatcgaccgaaatcgatcacgccctgccttactcgcgcagtttcgacgacagcaagaacaacaaggtcctggtgctgacccgggaaaaccgcgacaagggtaatcgcactccgttcgaatacctcggcggcgccgaaaacagcgaacgctggcaacgttttgtctccttcgtcgaatcgaacaaagcctatcgactggccaagcgcacccgcctgctgcgcaaggacttcgggagcaaggaagccgaagaattccgcgagcgcaacctgaacgacacccgttacatctgccgctttttcaagaattacgttgagcggtacttgaagctggctgacgggagcgaagccaagcgctgcgtcgtcgtcagcgggcaactgaccagcttcctccgcgcccgctggggacttctcaaggttcgcgccgacagcgaccgccaccatgcactcgacgcgaccgtcgttgcagcctgcagccacagcatggtcaagcgactctccgactattcgcgtacccgcgaactggaacaagtacgcgatggcttcgttgacatcgagaccggcgagatcgtcaatccggcgatgcatcagcagttacgcgagcactttccagatccctggccctatttccgtcatgaactcgaggcccgtctcaagattgattcacccgaactgttacgcgaagaaatgagccgcctaggcagctatagcgaggaggaactcgcagccctcaaaccgctattcgtttcccgcgctccgcaacgccggaatggtggggctgcgcacaaggacaccatttacggtcaaccggaaaaaatgaaggaaaacgggagcgttacgcaaaaggtgccgctttccaacctgaccctgaaagacctcgattcgctggtcgacccacaccgtaacgtcaaactctacgccgctattcgggaacgtcttgaaacccacggcggaaaaggtgaaaaagctttcccggctacaaatcccctgcgaaaaccggataaggatggcaatccaaccggccccatcgttcgcacagtcaccaagatgatcgacaagctatcggggattcctgtgcgcggtggcatcgccaaaaacgacagcatgctgcgggtggatgtcttcaccaaggctggcaagttccacctggtgccagtttatgtacatcaccgggttacggggctgccgaatcgggcaattattgccttcaaggacgaagaggaatggactccgatagacgaaagtttccaatttcttttcacgcttcacccgaatgatctggttcgagtgattcaaaaaggaaagcagccaatatggggctattactctagttgccaccgaggaacaggcaacctgaacatctgggcacatgaccgtagcaacgcaattggcaaggacggaatgcaggagggaattggcgtaaaaacggctctgtccttgcaaaaattccacgtcgacgtgctcggcaacatctaccccgccccaccggagaagcgtcgtgggctggcgtagcgtaatgatttcccggccagccaagctacgtcgggaacatttttctctcgccatcgaacaggaacaaacggccttcgtgccattcgaggacatcgcggtgatcgtcctcaaccatcgcgaaattgtcctcacccacccggtactatccgcctgcgccgactatggcatcggcctgtacgcgaccggcgacaaccatcaaccgaatggcgtcttcctgccatttctggcgcactctcgcacgacccgcttgatgcgtaagcaaatggagattccccgtccactcgccaaacaggcctgggccaatatcgttcggcgcaagattgaaaaccaaacaagttgcctccgtttctgtgcaaaaaacggcgtcgaccgcatggattcatatgcccgccgcgtgcgctccggcgacccggaaaacctcgaaggccaagcagcggccttctatttttcacagttgttcggccaagggttctatcgttccgacgagcgctgggtcaatgcagcactcgattatggctacgccgttctgcgcggcgccatagcgcgtggcctggtcgctcacggcatgcatcctccgataggactattccatgccagcgaacagaacgccttcaatctcgccgacgatctgatcgaacccttccgccccttggtcgacctgcatgtcgccaagcatcccgcaatgaccgaaggagacttgacgccgcaagacaaggcggcactggttgccttgctcaatgtcgacgtaggaatgccgcaaggcaagatgtcagctatctcagccattgagtacgctgttgaaagcctcgccaggctatttgaacaaggcgacagcatgttggaactgccaacgttaatcggcttgcaagctcacgtgctggaatgttgaggcatgggactggagacacgacgcttcatgcgactgatcgtcttcttcgacttaccgatggtaaccaagaccgagaagcggtcctacgtccagtttcgccgtttcctgctgaacgacggctatgacatgatccagtggtcggtttacgcacggctactgaacggcaatgacgatcacgaaaagcatctgaaacgcttggcggacaatcttccacccgctggatcaattcgctgcatgacggtcactgagaaacagtttgccggtattcgactgttggttggcatgcctcttttccaggaaaaaaaggttcctgcgaaccagatgctgctgttctgagcacggatttgcgcaaaaaaattcccgcccagctaacgccgggcgggaatttggagttggtcagattgtagctttccggggtgagagagggagctacaaccgctgcacgatgtcgtcgaggcgcatcacggattgtagctttccggggtgagagagggagctacaacagacctgcgctcgatagcctgtctttgtttgattgtagctttccggggtgagagag

SEQ ID NO: 2911 - DNA, 14787 bp, synthetic construct
  misc_feature 1..14787: note = Synthetic
  source 1..14787: mol_type = other DNA
agataggccaccgatacccagagcagcaacaggaacagctgcgcgacgcgcctgaccagcagccagccctgcgccgcccagcgcagccgggcgttttcattggccgacaggatcttttgctgcaggcggtcgaggacgatcgcggtggccttgcggatgccccagagcagggccagcatcagtgcggtggcaaggaccgagaagagcagcccgcggacgacgaccgggccgtgcccttgctcgatcagcgccgtgatggcctgctcgaaccgtttctcgacctgctgcgaagtctcttcgagccccttcttctcttcggggtcgaggtccgcctggtagaggacgaagatgttccggtcgccgatcgaaaagacgacgcccttctggccttcgatggtcacgtgcgaacgcgtgatcggctgggagagatcgttctcgccgagttcgcggagccgttcgtggatgcgcctgatgcgcagttccggcgtcccgcccagcgccgtcatgcgcagggtcgcgatgtggcggttggcgatggtcagggcggcttccggcgccgcagcctcctttgccggcaaggcccacgacgccagcgcgagggccagcggcacgaggcagcgcagcacccggtgaatcgcactcatggctctccccccttcacttcaggaaaccgcgatggcgggctcgcccgcgacgatttcgccgatcaccgaaacatgcgaaaagccctgctgcaggaagatcgacaggacttccgtcacggtatccggcgcgcaggacaccagcaggccgcccgaggtctgcgggtcggtcaggatcgccctctccttgccggcgatgccttcggcaagcgtcacgtgctcgccggcgctttcccagttgcgccgcgaagcgtccccggcgcacccgccatcggccaacgccagcgcccgcgccagcaacggcagcgcggcaaaacggacacacgcgcccaccccgctgcgccggcacatcccgagcaggtggccgagcagcccgaacccggcgacatcggtcatcgcatggacgccatcgaggcacgccaggaccggcccgggcatgttgatccgggtgacgctggcgatcatcgcctcgtaatcgccgacgcccagctcaccgcgtttcagcgccgtgccgtagattcccgtgccgagcggcttgccaagaatcaggcgatcgccgggcctggcggccgaattgcgcttgagccgggcgggctccaccagcccgatcacgaccagcccgtagatcggctcgagcgaatcgatcgtatgcccgccggcgaccggaatgccggccttgcggcagaccgactcgccgccctcgagaattccggagatcgcctcgagcggcagcacgctgaccggcatcccgaccagcgccagcgcgaacagcggcgtggcccccatcgcgtagagattggacagcgcggcggtcgccgccacccggccgaaatcgaacggatcgtccacgatcggcgtgaagaagtcggtggtggcgacgatcgcctggcgctcggcgatctggtacaccgccgcatcgtcgccattctcccggccgatcagcagctgcggcgggatgacgcccggctggatgccgccgaggatacggcgcaggacgtccggggcgaccttgctgccgcctccgccggcttgggtcagccgggtcagtctgatcggttcttcgggcacggcgcttccctggtatggatgtcggggagcgagtttaactcactcggcatcgaaccccgcttcctcgatcgccgcgaccagcgtgccgcgcgcaacgatccgcggatcgaaggacacccgcgcctcgccggcttcgagcgagacatccgccgtcgccactcccggcagggcggtgaggacacccgtgacattccggacacatccctggcaactcatgccgccgaccttgatgacgctggtttccatgcccttaccccctcttggcgatcaatccctgctgctcgagaaatgcgacaaactgctccgccggcagcggccggctgaacagatagccctgcaccagctcgcagcccatgccgcgcaggatctcgtattgttcggtggtctcgacgccctcggcgagcaccttgaggcgcaggctgcggcccatactgacgatggtcgaggcgatggcgcggtcgtccggatcgacctcgagatccctgatgaacgagcggtcgatcttcagtttgccgacgggaaagcgcttgaggtaggcgagcgacgaatagccggtgccgaaatcgtcgagcgccagttcgatccccatcccgctgagcgccgacagcgtgccgagattctgttcggcgtcgttcatcacggtacgctcggtcaactccagttcgaggtagcgcgcctccaggcccgacgcggagagcgccctggccaccgtgtcgacgaagccggcctggcggaactggatcggcgacacgttgaccgccacgaacagcggcggcaaaccgtcatcctgccaggcgcgcacctgccggcacgcctcgcgcaacacccagtcgccgatcgggttgatcaggccgatgtcctcggcgacatgaatgaactggtccggcggcaccagcccgagctcggggttctgccagcggatcagcgcctcgacgccgacgatgccgccggtctcgtgcaccagcggctggtaatgcaggacgaattcgcaggcgcccaggccgcggcgcaggccgctctccatcagcagatgcttgagggtggcgacgttcatctcgctcgaatagaagcggaaggcgttgcgcccggcctccttggccttgtacatcgcggcatcggcattgcgcagcagggcctcgaagtcggcgccgtcgaccggatggagactgatgccgagcgacgggctgatggtcagctcgtgcccgcccagttcgaacggggccgcacagacatcgatcaggcgacaggcgacttcggcggcgccggcggcgcgcacgccgggcagggcgatgatgaattcgtcgccgcccaggcgggccagcgtatcgaccttgcgcagcgcgctcgacaggcgctgcgccacggcacagagcagttcgtcgccgacgctgtggccgagtgagtcgttgacccgcttgaaatgatcgagatcgaggaagatcagcgccatctccgaaccgtcgcgctcggccgccgccagaagctgccggcagcggtcgcgcagcagccgccggttcggcagcccggtcagcggatcgaaatcggccagctcgcgggcccggtgttcggcttccttctgcgccgagatgtcgagcagggtgccgaccgaggccggttttccctcgtaggtcgccggcgagccgaggatcatcaccggcaccgtcgtcccgtccttgcgcaaccccgtcagctcgcagggcctgccgtcctcgccggcggcgcgccgccgcatctgctcgagaaccatcgcgcgctgctcgggaatgaccagatcgtgggctccgagccggttcaccagatcctcctccgcgtagccgctcaggccaaccaggaagggattgacgtaacggaacaccccttcctggaggacgaagatgccgacctgcgcggcttccatcgtcgcccggaactgcgcctccttctcgtgcatggcggcctcggccgcgacgcgcctgctgacatcgatggaaacacccagggcggcgcgcggcctgccggcggcatcgacctcgaccaccatcgaatcgtgacaatggcgaatcctgccctcggcatcgagcagccggtaatccacggccagcgatacacgctgccccggatggctcgccgccgcttcgccgatgcgcgccatggccgcctcgtagtcgcccggcaggaagtggcgcgcgatcagttcgactccggattcgcgcaccttttcgagatccatcccgaacaggccggtggcggcgcccgagatgtactcgaagcggcccgtgacgaaatcgaggcgatagacgacccgcgcgatgctgtcgagcagctcctcgtagaacgacagcttttcgttatcttccagacaaccccctaatgcgcctggcggccgtgcggacgccagcgcttgagcaacagggaattcgacacgacggagaccgaactcatggccatcgccgccccggcgacgaccggattgagcgctccgaacgccgccagcggaattcccaggacattatagataaaggcgaagaaaaggttctggcgaatcttgccgagcgtcgcccgcgacagttcgatggcgtcgtcgacgccgcacgggtcgctgcggatcagggtcaggtcggcggcctcgatcgccgcgtcggaaccggcgccgatggcgaagctgacatcggccgccgccagcgccggagcgtcgttgatgccgtcgccgaccatcgccaccagcccgccgccggccttcagctcggcgaccgccgccgccttgtcgccgggcaggatgccggcgcggaattcgtcgatccccgcctcgcgggcgatggccgccgccgtcgccgcgttgtcgccggtcagcatgacgacccggatgccgcgcgcgcgcagccgggcgaccgccgccttcgaggtcggccgcagggcatcggcgatggcgaacaacgccagggcgacaccgttttcttcgagcaccacgacggtcttgccggcctgctgcaaggcgtgcaccgccggatcgccggccatccccagccaggaaggcgcaccgaggcgcagtagacggccatcgacctcgccggccacgccctgccccggtgtcgcgctgaaattggctgctttgggcaggtcgaccgcagcagcccgcgccaggaccgcacgcgccaggggatgctccgatccctgttcgagcgctgccgccaggcgcagtgcctgatctgcatcgagagccagcggcacgatgtcggtaacctgcggttcgccccgggtcagcgtgccggtcttgtcgagggcgaggatggcgatcttttccgcccgctccagtgcctcgacgttcttgaccagaatcccggcccgcgccccctgcccggtgccgaccatgatcgccgtcggcgtcgccagcccgagcgcgcacggacaggcgatgaccagcacggcgacggcattgaccagcgcctcggcaagatcgccggcatacagccaccaaccggcgaaagtcgccagcgcgatgacgcacaccaccggcacgaagaccgccgagatccggtcggccagccgctgcaccggcgccttcgaaccctgcgcctcgccgaccaggcggatgatgccggccagcagcgtctgctcgccgacgccggtcgcccggcagcgcagcgccccctgaccgttggcggtcgccgcgaagaccttgtcgccggccgccttgcccaccggcatgctctcgccggtcagcatcgcctcgttgatgctggaggcgccttcgaccacctcgccatcgaccggcacgctctcgccgggacggaccatgaagacatcgccgggcatcagcgcgtcgacggcgatctcgacccactggccgccgcgctcgacgcgcgccgtcttcggctgcaggcggatcagcgattcgatcgcttccgaagtgcgtgccttggcccgcgcctcgagcagcttgccgagcaggaccagggtgatgaccgccgccccggcctcgaaatagacgtgctgctcgaacccgaacagcgtcaccagcgccgaaaaaccccaggccatgctggttcccagcgcgaccagcacatccatgttggcgccgccgccgcgcagcgccttgtacgcgccatcgtagaagcgccagccgatccagaactggaccggcgtcgccagcgccatctgcagccagcgcggcagttcggcatggtgctgcgcgctgccgaacatgaacagcatctgcccgaccagcggcagggtcagcgctacggcgatccagaaacggtggagctcgcgccggtaatcggccgcccgccgcgccttctcgcgcgcccgcgtgtccttgtcgacgacgctggcggcaaagccggcgcgcgccaccgcggcgatcaccgccgcctcgtcggccgccccggccagccggacgcgcgcgcgctcggcggcaaggttgacagtggcctcgacccccgcctggcggttgagcaccttttcgagtcgcgccgagcaggcggcgcaggtcatcccggcaatcgcgaattcgacgacgcgaggggcgcccgccgtcgtttccacggcactggcgccagccttcacagcgcgggcgcccgcggcggcggcgttcatttcaccagcatcaccgggcattcggcgagatgcaggacacggctggccaccgagcccatcaccagcccggcgatgccggtgcgtccgtgggtgcccatgatgatcaggtcgcactccagttcgctcgccagccgggcgatcacttcggccggctggcccacgtggatatgggtcgtgtggatgcggccggcggcattgagccgctgctgcgcgcccagcaggtgctcgcggctctcctccatgtagtggctgtgcagggtttccttgctgacgtgggccagcgcgtaaccgatcgggatcggcggctggacgtgcagcaggtgaacctcgggaacttcccgaaaccaggcgctatgcgcgacaagatggccgacggcgcgcagcgagcagtcggagccgtcaaccggcagcaggattttcatggtcatcgcattctcctagatccagtgcaacaggcgcatcaggccgaacagtccgtggatgccgaaacccagtaccagcaggcccgaggccatgcggaccagcgggcgacggacgaattcaccggcccttgccagcaggatgcccgccagcagcaaatttggcaacgttcccagcccgaaagccagcatcagcagcgccccgcgcccgggcgacccggcgccgagggccgtggtcagcgcgctgtagaccagcccgcagggcagccagccccacaggacaccgagcggaaaagcctgggccaccgtcctcgccggcacgaaacggcgcgtcagcggctggatgtggcgccagaggtgctggccggcgcgctcggtgaaggccagcgcccgggtcaggccgagcaggtagagaccgagcgccacaagcatcaggttggccagcagggagagcgccaggcgcaccggcgccggcccgtcgagcgccaggctggcggcgccgagcgcgccggcaaggacgccggcaacggcataggacgcgatgcgcccggcattgtaggcaaggtgcatcgaccagcgggcgggcgcgccgagcgacagcgccccgacgatgccgccgcacatgccgacgcagtgggtgccgccgagcagtccgacgaggaacagcgccaggtaggcggaatcaggcatctgcaggggcgcatccggcgcgacaggtcacggcgcaaggatacttcactccggcgtccttgccgaatcgccgcgcctcattccatttccggatcaatcgagacgcaaggacgagccgccgacagtgcaggtggcacggcaaggcgaagtcgaaaaggtcacggttggttgggaaatcgaatcagatcaccttcgagtagcgggtccgctggcgatcggcccgcaggtagcggtcgaagaccatggcgatgatcctgaccagcaggcgccccggcggaagaaccgttatccattcgcgctcgaccttgagcaggccggcgcgctccatttccttgagatcgtcgagttcggcggcaaaatactggtggaaatcgatcaggtgcgcgctttcgatcgactccagcgacagctcgaagtgacacatcagcgcctggatgatcgagcgcctgagaatgtcgtcggcattgagttcgatgccgcggaacactgggagcatccgggcgtcgaggcgatcgtagtactcgtcgagggtcttgacgttctggctgtaggtcggcccgaccttgctgatcgacgagatgccgaacgacagcatgtcgcagtcggcataggtcgagtagccctggaaattgcggtgcaggcgtccctggcgctgggcgacggcgagctcgtcgtcgggcttggcgaaatggtccatgccgatgaagacgtagccggcctcggtcagtttcctgatcgccagcgcgaggatctgcagcttgctgtcgggcgaaggcagatcgggctcggcaatgcggcgctgcggcttgaacagacccggcaggtgggcatagttgtagatcgagagccgatccggatccatcgccagcacccgctcgagcgtgcggttgaagcccatcaccgtctggtgcggcagcccgtagatcagatcgaccgacaccgacttgaacccgttggcgcgggccgcgtcgatcacggtggccgtctcttcctcgctctggacacggttgaccgcaacctgcacgcgctcgtcgaaatcctggacgccgacgctcatgcggttgaagccgagctcgccgagcagcgccaccgtcgccgtgtcgaccttgcgcgggtcgacctcgatcgaatactcgccgccgtcgagcagcctgaagtgcctgcgcgtctcgcccatcagctggcgcatctctccgtgcgacaggaaagtcggcgtgccgccgccccagtgcaactggatgacctcgtgctcgccatcgcgcccttccaggctcgcgctctgcagggcgagttccttgccgaggtatttcagatacttggcgctgcgcccgtgatccttggtgatgatcttgttgcaggcgcagtagtagcagatggtgttacagaacgggatgtggaagtataatgacagcggacggccgatgccgccgatggtgcgcttgcccagccagagcgtggccgcatcggaatcgaaggcctcgacgaagcggtccgcggtcggatacgacgtgtagcgcggcccgctgacatcgaaacggcgaatgatccgaggatcgaaaacgaggttttcagttgcgaaattcattgaacgagccggcaagaacggtgtcgattatgtccggatgccgcgccaccccggttgacgtggatcaagcttggatgcgttcctgatgccccccaaatccgccggcaatcccgtctccctcgcagtcatcaagaccgcctgttcgaactgcaacctgcgcgaactgtgcctgcccctcggcctgaccggcgaagaactgcagcgtctcgacgacctcgtgtcgaatcgccgccgcctgaaacgcggcgatcgcctctacagcttcggcgcccccttcgacgccatctatgcgatccgcagcggcttcttcaagaccgatgtgctgcttgaggacggccgcgaacaggtcaccggcttccagatggccggcgaactgctgggcctcgacggcatcagcagcgaacaccacacctgcaacgcggtcgccctcgaggacagcgagatctgcgccattcccttctcgcggctggaaggcctgtcgcgggaaatccatacgctgcaacatcacttccacaaggtgatgagccgcgagatcgtccgcgatcatggcgtcatgatgctgctcggcacgatgcgcgccgaggaacgcctggcggccttcctgctcaacctgtcgcagcgcttcacggcgcgcggcttctcgcatgccgagttctacctgcgcatgacgcgcgaggaaatcggcagctacctcggcctcaagctggaaaccgtctcgcgcaccttctcgcgcttccaggaagatggccacatcgcggtccagcagaagcacgtccgcattctcgatgtcgccggactcaaggcgctgatgaagcattgcgcctgattgtcacgtcgtcattcgccagagatggccgacgctccgcacacctcaagcgaaaattagaaggcccggcaggtttccctgccgggccggattcggtcgtcacccgaaggcgacaccttattgtagcaacggctctcaccccggaaaactacaacgggagtattctacccgtttcgaatgacaatgggtagatatcatggagtcgcgctacaccctcggtctggatatcggcatcgcctctgtcggctggtgcctgcttggcgaaaaccgcatcatcgacttgggcgtccgcgccttcgacaaagctgaaaccgccaaggaaggcgacccgctcaacctgacccgccgcatggcccgcctggctcgccatcgactggcccaacgcgcatggcggctgaaaaagctaacgcgcgaactcaagcgccatggcctgatcgacgacacgcgctttttccagccgaccaatcctgttaccacctccccgtggcagttgcgcgttcaaggcctcgaccgcaaactcgaaaccgacgaatgggcgcgcgtcatctaccatctctgcaagcacagggggttccactgggtcagccgggccgacaaaaagaagtccgaaggtgatgccaaaggtgaaggcggtcgagtgactgcagcactcaatgacaccagcaaacgaatagacggttaccgttccgctgccgaaatggtgattcacgaattcctcaaacccgcacagactgataatggtctcccattactcgacaaaattgggcagccgattccatctggtgctgctcgcaacaagcggggcgaatacaccaaggcgctatcccgcgtcctgctcggtgacgagctgaagcaactctttgccgaacaatgccgcttgggcaacccgctggccagcgaatccctggaaaccgccatcctcggcaacggcgaccgcaagagcggtctgttctggatgcagaaaccgccgctctcgggcgccgccctgctcaagatgctcggcaaatgcaccttcgaaaagggcgagttccgcgcccccaaagccagtttcaccgccgaacgccatgtctggctgacgcggctcaacaatctgcgcatcgtcgtcgatggcgagaccaggccgctcgatgcggaggaacgcgccattgccctgccgctcccgtacaaacaagccaaggaacttacctacaagcaactgcacagcgccttggtcaaaagcgggcgcctgccggaaaccttcgagtttgccggactacgcccaaccaaggacggcaaagaccccaaatccgaaagactcgtcaaactgcccgcgtggcaggaactgcgcgcgacgctcaaggccgccggactcgaaaccgagtgggaaagccttgccggggccgccggtcgcggtcaaccgcaaattctggacgaaattgctcgcgtactcagcatctacaaggacgacgacgaagcgcgcgcggaattgaacaaacttgccctgcccaaccgggaagccatggtagaagccctgctcgatatccgtttcgacaagttccatgcgctatccctgatggcactgtacaagatcgtcccgcgcatggaggccggtttgcgttacgacgaagccgtcgccgcaatcccggaatacggccaccacagccagttgcacaaacccggcgaaggcgcctcgcgcaccctgccgccgctctatgccgggcgcaaccccgacggtcgcatgcgctttgccgaggacgaagacatcccgcgcaacccggttgtgctgcgcgcactgaaccaggcgcgcaaggtggtcaatgccatcgtccgccgctacggctcaccgatggccgtcaatatcgaaatggcgcgagatttgtctcggccactcgacgagcgtaacaagatcaggaaggagcaagaggactaccgcgcccgcaacgaaaaggacaaggcgttctttgccgaggagtttggacaagcgcccaagggcggcgaattcgagaaattccgcctgtatcgcgaacaactcggcaaatgcgcctattcgcaagaaggcatcgtcatcgaacgtctgttggaagccggctatgtcgaaatcgatcacgccctgccctattcgcgcagcttcgacgatagcaagaacaacaaggtgctcgttctcgccaaggaaaatcgcgacaagggcaaccgcaccccctacgaatacctcggcggcgaagaaaacagctttcgctggcaacagttcgtcgccttcgtcgaatcgaccaaatcctaccgcctcgccaagcgcagccgcctgctacgcaaggatttcggggccaaggaagccgaagacttcaaggaacgcaatctcaacgatacccgctacatctgcaaattcttcaagaactacgtcgagcgtcacctcaagctggcggatggcagcgaagcccagcgttgtgtcgtattgagcggccagatgaccgccttcctgcgcgcccgctgggggatcaacaaaatccgcagcgaaagcgaccgtcaccacgcgctggatgccgcagtggtcgccgcctgtacacatggcatggtcaagcgcctggctgattattcgcgcaccaaggagctggcgcaggtacataccggcttcgtggacacgacgaccggcgaaatcgtcgatcccgccatattccgccaactcaagcagcactttcccgaaccgtggccgcacttccgccacgaactcgaagcccgcttgaagattgacaaccccgcgctgctacgcgaggagatgacgcacctgggcacctacgacaccacggcactggacgaaatccggcccttgttcgtttcgcgggcaccgcagcgccgcaatggtggcgccgcccacaaggacaccatctacggtcaaccggaaaaattgcgggaaaacgggagcgtcacgcagaaagtacctctcaccagcctgaccctgaaggatctcgacaaactcatcgacccccatcgcaacgccaggctttacgctgccatccgcgagcgcctggaggcacacggtggcaagggcgacaaggcatttcccccggacaaccccttgcgcaagcccgcccgcgcaggcaagccgaccggccccgtcgttcgcacggtaaccatgctgatcgacaaactttcaggtattccggtgcgcggcggcatcgccaagaacgactccatgctgcgtgtcgacgtgttcaccaaggctggcaagttccatctggtgccggtgtatgtacatcacaaggtggccggcttgccgaaccgggcgattgtggccttcaaggatgaagcggaatggacactgattgatgacagcttcgcttggtgcttctcgctatatccgaatgatttggtacagatcacactgaaatccgaatctcatctcggctattacgctggcgtcgaccgctcgacaggaggcgtaagcctctgggcacatgaccgaaatcactccgtcggcaaggaaggcctgattcgtggcattggcgtaaaaactgccttatccgtcgaaaaactccatgtcgacaccctcggcaacatccatcccgccaaatcggagccccgccgtgggctggcgtagcgtgatgatttcccggccagccaagctgcgccgggaacacttctccttggccatcgagcaggaacaaaccgactttgtccccttcgaggacatcgccgtcatcgtcctcaatcatcgggaaatcaacctcacccacccggtgctttcggcctgcgccgagtacggcatcgggctttacgccacgggtcacaaccaccagcccagcgggattttcctgcccttcctctcgcactcgcgcacgacacgcctgatgcgcaagcagctcgacgttggcaagccaccgatcaagcaagcgtgggccaacatcgtgcggcgcaaaatagaaaatcaggcgcattgtctgcacctcacgggccgcaaaggggtcgagcgactgaactcctgcgccaatcgcgtgcgctcgggcgatggagaaaatctcgaaggacaagccgccgccttttattttgcccagctttttggccccggcttccatcgggccgaggagcgctgggccaatgccgcgctcgattacggctacgcggtctttcgcggcgccatagcgcgcgggctggtcgctcacggcctgcatccacccatcggcatctttcacgccagcgaacaaaatgccttcaacctggccgacgatctgatcgagcctttccggccattggttgatctgcatgtcgccaaatacccggccagtaccgaaggcaatctttcgcccgaggacaaggcaacgctggtgagtttgctcaatgtcgatgtcgccatgcgccaaggcaagatgtccgcgctatcggccatcgaatacgccgtggaaagcctggttcgcctgttcgagcaggaagacagtaacctcgacctgcccaaactccttggcctgcacgcgcatgtgctggaatgctgagacatgagcaaggagacgcgacgctttatgcgactgctcctcttcttcgacctgcccatggtcaccaagaccgaaaagcgcgcctacgttcaattccgccgctttctcctgaacgatggctacgacatgatccagtggtcggtctatggtcgcctgctcaatggcaacgacgatcaggagaagcacctcaaacgcctggtcggcaacctgccgcccgccggctcgatccgttgcatgaccgtgaccgaaaagcagttcgccggcatccgcctgctggtcggcatgccgctttttcaggaaaaaaaggtcacggcgaaccagatgttgcttttctgatgacgggatcccacaaaaatattcccgcccagcttgcgccgggattgtgcaactttctttctgtaaataacccgtggcgattccattgggatagtgggatcagtctttcaagttgagatagaccttgccggtcatccactcctcgtcgcactcggcgagcagtgcggagacgagccggagacaggac

SEQ ID NO: 2912 - DNA, 14784 bp, synthetic construct
  source 1..14784: mol_type = other DNA
  misc_feature 1..14784: note = Synthetic
gcggatttcgacgccagcgtgttggcctcgcggttgagttcctgcatcaggaagtccaggcgcttgccggccgcaccgccggccttgaggatgcggtccacctcgtccaggtgggtggccaggcgggacagctcctcggccacgtcgacgcgctgggcgaagagggctacctcctggcggatgcggtcttcgtccaggctggcgaccgcgtcgcgcaggcgggtagcgagcttttcctggtgctcggcgacgatggcggggatgcgcggtgcggcctgatcgaccagttcgcgcatgcgcacggtgcgttcgcggatcatgtcggcgagcttgtcgccctcgcgccggcgcgcggcggcgagttcgtccagcgcggcgcgcgccagttcgacgatggccggctgcagctcgtcgaaggccggactgtcgtcggccagcatgccgggccagcgcagcacctcgcccaccgtcaggcgggcggcctcgggcagacgctcgcgcactgcggcttcggcctcgcgcaactgttccagcaggctggcgttgagcgccaggctgcgcggcgcggcttcggtggtctgcaggttcaggcggcattccaccttgccgcgccccaggcgcacggagatcagctcgcggatcgccggctcggcctggcgcaggtcgtcggtgatgcggaaggcgaggtcgaggtagcgcgaattgacgctgcgcagctccagatggaggctgacgcgccccagatcccgggtctgcgccgcaaagccggtcatgctatgaaccatgggtaaatctccgggaaatgtcgggatcgtttacactttgcaacttctgcccgaccccgtgcgacgaaacgcccatcctaacccgcccgcagatgccgcctcaagcgaacgctcctctgccgaccggcttccagctcgatcagtaccgcatcgaccggcagctttccctcggcggcttctccatcgtgtacctcgcctacgacgaggacgacacgccggtggcgatcaaggaatacctgcccaattcgcttgccgtgcgcaaggatggcgaactggagccccaggtgcccgaggagagcatgccggccttccgttacggcatgaagtgtttcttcgaggaagggcgctcgctggcccgcctgatgcatcccaacgtggtgcgggtgatgaatttcttccgcgccaacggcactgtttacatggtgatgcagttcgagcgtggccgcacgctgcacgactacatccagcgccatcgcgggcaggtgagcgaacgcttcatccgcggcgtgttcacccggatgctcaacggcctgcgcgaggtgcacgcgcacaagctgctgcacctggacatcaagccctccaacatctacctgcgcaacgacggcacgccggtgctgctggatttcggcgccgcgcggcagacgttgatgaccgaccagcccatgctcaagccgatgtacactccgggctttgcctcgccggagcagctcaacaaccgcgacgcgctgggcccctggagcgacatctacagcgtgggcgccagcctctacgcctgcatcgagggctgcgcgccgccgcgctcggacgagcggcagcagaaggagacgctgcagcccgccacccgcagccatgccggacgatattcaagccaactgttggaaaccatagactggtgcctgaaactggacccgctggagcgcccgcagagcgtttattcgctgcagaaggcgctgatgcgcaaggaacccggcgatgcaatgccggcgggttggttctcggatctgggcagccgactccggtcgttcatcggccgtagctgagggacatcgcgttgaaattcaccatctaccaggaaagccgcatcgggcggcgcaaatcgaaccaggaccgcatcgcctactgctacacgcgcgacgcgctgctgctggtgctggccgacggcatgggcggacacctgcacggcgagatcgccgcgcagatcacggtgcagttcgtcgcccaggccttccagcgcgaagcccagcccatgctgcaggacccgtccatgttcctgtcgcgcgcgctgaccaacgcgcacaacgcgatcctcgactatgccttcgacaaggacctgccggaggcgccgcgcaccacggtggtggcctgcgtgctgcaggaaggccacgcccattgggcccatgccggcgattcacgcctctacctgctgcgcggcggcaagatcgtctcccagacccgcgaccactcccgcgtgcaactaatgatggaccagggcctgctcgacgcccagagcgcggcccgccacccggggcgcaaccgcatctactcctgcctgggcggcaatcacccgccgcaggtcgagttctccgcccgcatcccgctgcgtgacaacgacaccatcgccctgtgcagcgacgggctgtgggggccgctgggcgacaccggcgtgctgctcggcctcaccgaccagttcgtccaggaagcggtgccgcgcctgatggacaaggccgaggaactgggcggtccgagctgcgacaacctctccctcatcgcggtgcgctggcacgacgacagcgcgcccctgtcggcggacggggtgtccacccagaccatgaccctgaacgacttcaccacccagctcgaaaccttcgaccagagccgcagtccgaccaccgcgccggacctcaccgacgacgagatcgaacgcgcgatcgccgagatcaacgccgcgatccagaaattcagcaagtaggacccgccccatgcgccccagccagcgccggccggacgaactgcgtccggtccgcctcacccgccattacagccgccacgccgaaggctcggtgctggtcgaattcggccacacccgcgtgctcgtcaccgccagcgtggaggacagcgtgccacccttcctgcgcggcaagggccagggctggctgaccgccgaatacggcatgctgccccgtgccacccacacccgcaacgcgcgcgaggcggccaagggcaagcagagcgggcgcacccaggaaatccagcgcctgatcggccgcagcctgcgctcggtcgtcgatctggccgccctgggggaacgccagatcaccgtggattgcgacgtgctgcaggccgacggcggcacccgcaccgcggccatcaccggcgcctgcgtggcggtgcatgacgcactggcgaagctcgtggccgacggcaagctcgccgcgaacccgctgcgcgacttcgtggccgccgtctcggtgggcgtgtatcgcggcacaccggtgctcgatctcgactacgatgaagactcggactgcgacaccgacatgaacgtggtgatgaccggcgccggcggcttcgtcgaagtgcagggcacggccgaaggcgctcccttcacccgcgccgaactcgacgccctgctcggcctcgcggaacgcggcatcgcccgcctgatcgaaatccagaaggccgcgatcgccgcctgagttcgcctgaaatcgccggaacccgagccatgagcacccccgctgcccgcctcgtcctcgccagcaacaacgccaagaaggccgcagaaatgcaggccctgctcgccccgctcggcgtgcaggtgattccccagggcgagctgggcgtgggcgaggcggacgaaccacatgccacctttgtcgagaatgcgctcgccaaggcgcgccacgctgccatggccaccgggctgccggccgtcgccgacgactcggggctgtgcgtggccgcgctgggcggcgcgccgggcgtgcaatcggcccgctatgccggcgaatccaagtccgacgcccgcaacaacgcgctgctgctccagcgcctggccggcgtcgccgaccggcgcgcgcatttctactccgtggtggtgctggtgcgttccgccgacgacccgcagccgctgatcgccgacggcgaatggcacggccagatcctcgaagcgccccgcggcgagggcggtttcggctacgacccgctgttctggctgccggaactcggccagaccgcagccgaagtcgacgccacgctcaagaacaccctgagccaccgcggcgccgccatgcgccacctgctcgcccgcctgaagatcgaaccgctgtgagcgcacgccgcaccattccgctcatccccgcgccgcttccccccagcacccagcccctgccgcaacatccacagctcacggccccaccgccgctggcgctctacatccactacccgtggtgcgtcaggaagtgcccctactgcgatttcaactcccacaccgcgcgtgccgccgaaccgccccacgaagcctacgtggacgccctgatcgccgacctgcaggccgcactgccccaggtctggggccgacgcgtccacacggtgttcatcggcggcggcacccccagcctgctgccggccgcggcgctcaatcgcctgctcaccgcggtacgcaccctgctgcccctcgacccccaggccgagatcacgctggaagccaaccccggtacggtggaagccgcccgcttccgcgactaccgtgccgccggcgtcacccgcctgtcgctgggcatccagagcttcgacgaccgcatgctggccgccatcggccgcatccacggcggacgcgaggcgcgcgccgcggccgatctggcgctggaaaccttcgatcgcgtgaacttggacctgatgtacgccctgcccggccagacgctggatcaggccctcgccgacctgcgtaccgccatcgccagcggcgccgggcatctctcctgctaccacctgacgctggagcccaacacccccttcgcccaccacccgccgcccctgcccgacgccgacctcgccgccgacatgcaggatgccatcgaagcggaactggccgccgccggcttcatgcactacgaaacttcggcctttgcccgcccgggccagcagtgccgccacaacctcaactactggaccttcggagactacctggggatcggtgccggcgcccacggcaagctctccagccatgaaggcatggtgcgcgagatgcgccacaagtacccggagcattacctcgccgccgccgcgcgcagcgacttcgtccaggaacggcgcgaagtgggggtggatgaactgcccttcgaattcatgatgaacgccctgcgcctcacggacggattcccccgcggcctgttcgcggcccgcaccggcctgcccctgggtgcggtcgaggccggactgcgggacgcacgcaaccgcggcctgctggaaatcgatgccgaaacgatacggccgaccgaacatggccgccgcttcctcaacgacctgctgcagatcttcctgcgcgacgagccctgaccgccgacgcgcggctcagatcacttcgagcagcttggcgcgcagcgcctcggcctcgcgccggccttcgcggctgccgaccagcgagtgataccactcgtcgaacaatgcgcgcagctcgccatgatcggccgcctgctcgatgcgctccagcagggaacttgcccccacgcggccgacgaaggcgctgacggtgttggccatgaaattgcgcgcctgcttcaggcgcagcgaatcgcccgcggcgggcaatttcctgaacgcggtgatcgacggcagcggcccggccgccgcgccggccttgccctgcgcgtcgatcacggcacccacttcgatatatccggactcctccagcaggcccagcgtgtgctgaagatcatcggactgcagcatgccgcgcagctcctcgacggtgcgcttgccatcgacgaagatcagcacccgccgctgccgcggcgtcagtgcgccggcccggccgttgatctcttcctgccccttggcggtcttggtgaacaccacagccatgtttgtctccggtttgtagttgtcatgggccgattctggcatgacgaacagcgacttggaaacatggtgctacacctttccgcccaaaccccaggctcagccagtgaggcaccgcccttgccaaactggcgccgtcgatgggaggaaagacatcatgaaagaacaccaggccggcagaatggaaatgagcatcgtggtgccgttggcaggtgcaggaatactatttgccgtcatcctcgtgctcgcacctcactaccgggtttactccgaggaactgcgcggcaaagccatactgatcgaagccgaatccagccgccgcgtggccgtgctggaagccgaagccacaagggacgccgccctggccctcgcggcggccgaaatcgaacgcgctcgcggtgtagccgaagccaaccgcatcatcggcgacagcctcaagaacaacgaggcctacctgcgctacctgtacatcgactccctcaaacaggcccccaaccagatcatctacgtgcccaccgaagcgggcttgccgattctggaagcgggtagaagcctgcagccggcacagaacggccgatgacggacacccggccatggatctgctgctgcagatccgtcacattcagggaaccgcttgccgttcaccgtcgcctcggcgatgatccgcgcattatccatccaggattgcaggcaaccgtcccgcatgaaccgcgccgaacgtattttccacctgcatcgcctgctcaaggccagacagccgccttccctctcccggctgatggaagaactgaacgcttcccgcgccaccatcaaccgcgacctggaatacatgcgcctcttcatgggcgcacccatcgtctacgaccgcaacaccaacggttaccgctacgacccggccgcgccggagttcgaactccccggtctgtggttcaaccactccgaactgcatgcgctgctggcctgcgaacaactgctcgaagaagtccagcccggcctgctctcgccctacatcggcccgctgcgtgcgcgcatccgcaagctgctcggacaaggcggcgcctcggccgaaaccgtccgggcccgcgtgctcctgcgcagcatcgcgcgccgcggcgtcaatgccgagagcttcggcaccgtcgcctcggccgtgctcggccagcgccaaatccgcatcgactacaccggccgcgagcgcgaggagaccaccacgcgcacggtccatccgcagcgcctcgtgcgctaccgcgacaactggtatctggtcgcctggtgcgaaaccgccggcaacccgcgcatcttctccctggaccgcatcgaaaccgcccacccgacggacgaaccggcgagagacctgccggccgacgggctcgaccgcttcatgaacgcaagcttcggcatcttctctggcgaagcccgcgcctgggccgtgctgcgcttcaccgcccacgccgcgcgctggatagaaaacgaaacctggcaccccgaccagatcggccaatggcacggcgacagctacgaactgcaggtgccctactccgacccccgcgaactgctgatggacatcctgaagtatgggccggaggtggaagtcctcgcccccagggaactgcggcgggaaaccgcggagcgcctgcgcgcagcggcggcacgttaccagaccatgacgtgacacccgcaggttcatccccatgccatcctggaaggcaagaggcttgccgggacaaccggcaccacagcgaggccggatagcacggaaaacagatgcaatgaacgaaacgcaagaagcccccgtaggttgggacagtacgagttttgaaggcagccgccaggagcagttgcgcagggcgctggcgatgaccgtacggcagaggctggaagcgatggatgagctgagtcggctatcggaagggttgcaggccatgcctcactggtttggttcaaatgcgactcccgaacgcggacagtacccggcatcgggtacttgagcccggtcgcattcaaacacctcaaggagcacgggcgatggggacaggccgccaccgcacccttacgttgtagcgacagcgcatggggtctgcagagcgcctgcagctcaccgtggtgagaatgcccaaacgtgccgtaccgctgctccacaggactccaagcgctggatcacgagcacctatatggatatcgtcatgcgctgccgggagagcaactttgctttttccacgatgcggtgcgtagctcggctcccgtggaagtggcaggttccggacggagcgcaggtagcgtcacgggtagagtcgcaggtactggtatcgtcggccgccgccccgctcgataaagccggacgttgtcagcgtgccgtcaccaatatagctgcaatccaacgaaccgggccagatgactacctggcaccccttgataagcctctcgcgaggcaagcacgatgtaccagcgacgaaggacaggcatacgtgaatcatcagaggcagcatagtggaccgtgctgcttccaatggctgccaactcgttccggccacgattctccgggccagcgaccttcggcgatatcaagcgcctcattgccgctttcgatggcctcgtccgccaatgctcgtgcctcgcgtgcacgccccctggcgtgagccgcccgggtttcggcaaccaactccgtcatgaagcgctcgcgcaaatcgcgaacggctgcgcaattcggcctgctctgcaaccttggtctggaacgtctattaacccggcaaccaaatagaagctttattgagcatagcgaacagcctcatgcttgaagtacgaccgcacgcgctcaggcagcgcggcaatccgcaccatgcatcgctttgccttttcggtgagggcgtgtgccgtgcgggcgatcggcccggagcgcaacgtcgtcttgagatcgcggttcaggtactcgtcggggttgtgctcgggcgcgtagggcggcaggtaaaagagttcgatcttgtcggtgcgctcggccgcccactcggtgacgcgcttggcccgatgcaccttgaggttgtcgacgatcagaaacaccttgcggcccgcgtccttgatgagatcgctcagaaaggcgatgaagcggtcggtgtcgagtgcgccgtcgaagaaggtgaagcggaccaggccctggttggtgatcgccgagatcatcgttgtggcagcgtggcggccagccgggatgcgcatctcgggcgtcacgcccgccggcgcatagccgcgcacccagtgcgtgtcctggcgaatcgccgtctcgtcggcccagtagatctcgcccccctcggccttggcccgcagggcgattgcgggatagtcgatctcgagccactgacgcagtttcccctcgtcttgctcaagggctcgtttgaccggccgctgcggtgtgaagccccagcgcaacaggtactggccgaccgtgcggatcggcatctcgataccgaacatcgtcttgatcgccatcatcactgcacgacggttccacagtgcgaactccaacttcagctgcgccgggttcgatcccacgatcgccagtcgaagttgctcttcctgaaccagcgtcagcgtacgccccgagccgtgccgacggccgcgctggccgcccttgaccgctccatcgaaaccgccttcggcagctcggcgtgaccacttgagaaccgtgccgacatgaaccccacaaacctcagcgatatgcgcccacgtgtaaccctgcttgcgcagcacgaacgcttgccggcgaatgtgttcgagtgcttccggagggagcttcctagcgtcgatcttctccatgccggcattatagcgtcagctgtttgattgccgggttaatagtacgtcttctatactacaaaccgtgaaatactcgatcccattcggttatgaagagtactaagtttgggccgaacgttggggtcgctcttccgcatccaccgagattgcaccatgaatagctagttcggttgacgttggatgctactcgcgtaggcaaggggactttatggacatacaatgaaaagcccggcggggtcaccgccgggctgggtacaggttattcacctttattgtagcaacggctctcaccccggatagccacaacggggcagattatggggaaggatgggatggttgacaagacgcttggcccactgaccttcggcttcgacattggcattgcctcggtcggttggtgtgtgcttgcggaaaaccgcatcatcgatctgggagtgcgctgttttgacaaggcggaaactgccaaagagggcgaatctctcaatcttgcacgacgcaccgcaaggctgatgcgccgccgtctgcgacgtcgcgcttggcgactgatcaaactcgcacgactactcaggcacaccggactggttgccgacaccgatcaactgcaccaaccgtccgctgtctcaccgtggcggctgcgggtcgaggggctcgaccgccgcctgaccgatggcgaatgggcgtgtgtcatctaccacatctgcaagcatcgcggcttccactggatcagccgtgccgaagaacggaaagccgaaggcgatgccaagggcgaaggcggacgggtcaagaaggggcttgccgacacccagcggcgcatgcaggagaagggataccgcagcgctgcagaaatggtgctggccgaatttcccgatacccagcgcaacaagcagggtgactacagcaaggcactgtcgcgcatcctgctcggagaggagcttgcccggctcttcaagcggcaacacgaacttggcaacacccacgccgacgccggactggaagcgaagattctgggcgtcggcgaccgcaagagtggccttttctgggagcagaagccgcctctggccggcgtcgacctgctcaagatgctcggcaaatgcacgttcgagaaggacgagtaccgcgcccccaaagccagcttcaccgctgaacggcatgtctggctcacccgcctgagcaacctgcgcatcatcattgacggcgcaacgcgcccgctcgatgaggaagagcgccgtgccgcgctaccgctcccctacaagcaggcaagcgatcttacgtacaagcagttgcgcgtcgcccttaccaaggcgggactgttgccggacagtttccggttcgctggcctgaactacccatacggaaagcagcctgacgaagccaaggtcaaagacccggaaacggaaaagctcatcaagcttcccgcctggcaggaactgcgcaagacgctcaaggacaaggggctagaaaccgagtgggaaggcatggccggcgcggcgactggtggcgaccccacacttctcgatgaagtcgcgcgggtactgtccgtgtacaaggacggagacgaagtaacggcggaattgcgaaaactcccgctgcccggcggtgaaaggatgatcgacgcactgtccgaaatcagcttcgacaagttccacgccctttctctgaaagcactacgcaggatcgtcccgcacatggaagcgggactgcgttacgacgaagcctgtgcagcggcgggctaccaccacagccagttgcatgcagcgggcggtggcgaacagacctatctgccaccgctctactccggccgggacaaggacgggcgcatggtcttcaaggaagacctcgacatacctcgaaacccggtggtactgcgctccctcaaccaggctcgcaaagtactgaatgccttggtgcgcgcctatggttcgcccgctgcggtacacatcgaaatggcccgcgacctctcccggcctctcgatgaacgcaacaaggtcaagaaagctcaggacgagtatcgcgagcgcaacgaaaaggacaaggctgccttcgccgccgaattcgacatgccagccaagagccgtgaattcgaacgtttccagctttaccgggaacagcaaggcaagtgtgcctattcgttgaaaccactcgatctgaaccgtgtgctacgcgacatcggctacgccgaagtcgaccacgccctgccttattcacgcagttacgacgacagcaagaacaacaaggtactcgtgctgacggaggagaaccgcaacaagggcaaccgcacggcttacgaatatctatcgtctttccctggcggtgaagatggcgagcgctggcacaacttcaagatttgggtcgagagcaacaagtcgtaccggcaggccaagaagacgcgcttgctacgcaaggatttcggggacaaggcggccgaggaattccgcgagcgcaacctcaatgacacccgctacatctgccgcttcttcacgaactacgttgagcgccatctgaaaatggccgccggggatgacgggacggcggcaaagcgctgcgtagtgctcaacggccaggccaccgctttcttgcgcgcccgctggggtctgtccaaagtacgcggaggcagtgaccgccaccacgcgctcgactccgccgtagttgcagcctgcagccacggcatgatcaaacgccttggtgactatgcccgcacgagggagctcgaaaaggtccgcgacggattcccagacccggaaaccggtgagatcgtcgaccccgccaagtatcagcagttgcatacccatttccccgatccttggccccatttccgctccgaactgaagatacgcctcggcgtcgacgatgaaaacgaattgcgcgaacggctggccatgttcgatacctacccaccggaggcgttggccgccgtacgcccgttgttcgtctcccgcgcaccgcaacggcgtaacggcggcgcggcacacaaggacaccatctacgcgcaacccgaacggctcaagccccaaggcagtgtgacgcagaaggtgcccctgagcagcttggcgctgaaagacatggaaaagctgatcgaccctcatcgcaacgaaaaactctacgccgcgatccgtgcccggctcgaagctcacggcggcaagggtgacagagccttcccgccagacaatccgttatgcaaacccgatcgggatggcaacccgactggacccatcgttcgaacggtgacgatggtcatcgacaagctatcgggaattcagattcgaagcgggatcgccaagaacgactccatgctgagggtggacgtcttccgcagcaggaaggacgggaagtttcatctcgtgccggtgtatgtacatcatgcggtggcgagagcgctgccaaaccgggcaatcgtggcgttcaaggacgaagatgaatggacagtgatgaatggggatttcgacttccatttttccgttcatcctaacgacatgctgcgaatcaccctcaagaaagagaagcatctcggatattttgcaagctgcaatcgttctactggcgccttcaatctttggttgcacgatcgcaactcgcgggagggcaaaggaggaatgattgaaagcatcggtatcaagactgccgtagcggttgagaagtttcacgtcgacgtgctcggcaacatctaccccgcccaaccggagacccgccgtggtctggcgtagcgtgatgatctcccgtcccgcccggctgcggcgggagcatttctccttggcgatcgatcaggaggaaacagcgtttgtgcctcttgaggacatcgcggtcatcgtactcaaccaccaagagatcaccttgacccatccggtgctctcggcctgtgcggagtacggcatcggactttacgccactggtcgaaatcaccagcccgccggagtattcctgccctttctgtcccactcgcgcaccacacgcatgctgcgcaagcagttggacatcactcgtcccacagcaaaacgtgcgtgggccagtatcgtccgccgcaagatcgagaaccaagccacttgcttgcggctgtgcggcaagccaggcgaagataggctcgcctcctacgcccggcggatacgttcgggcgaccccgataacctggaggcccaagccgcagcgttctattttgtgcagttgttcggctcggatttccatcggtcagacgaacgctggatgaatgcggccttggactatggctatgctgtgttgcgcggcgccatcgcccgcggactgatagcccacggcctgcatccgaccatcggcctgtttcacggcagcgaacagaacgcattcaatctcgcggatgacctgatagagccgtttcgtccgctggtcgacctgcatgtcgttaagcatacagcctccaccgagggcgatctgatccccgcagacaaacaggcgctgatagcgttgctcaacgtagacgtcgccatgccacaaggaaagatgtcggtactttcagccatcgagtacgccgtcgaaagtctcgtacgggtttatgaagatggcgaatctgctcttgagctacccactctcgtcggcttgcgggcacaccgactggagtactgagtgagccacgagacgaggcgatacatgcgcttgctcgtcttcttcgatctgccgatggtcactaaggcggaaaaacgcgcctacgcgcaattccgcaagttcctgctcaacgatggctacgacatgatccagtggtcggtctatggacgcatcctcaacggcagcgacgccgaaaagaagcacttggcaaggttggccgacaacctaccgccggaaggttctgtgcgttgcatgacagtgaccgagaagcagtatgccgggatgcgcctcatggtgggcatgcccctttttcaggaaaaaaaggtcgcggcggctcagatgctgctcttctgagcaaggaatgaaaaagagaagcccccgccccgaccgaagccgggtgggggttaaggcgaggtctagggaagtgctgaacaaatgcccgcggaccgatttcgagcgcgtatcagtgacgggctttcgactttgatggcgtttttcgcttccgatcgggtcgtcctcgggctgttgccctccgtttttgctcctt

SEQ ID NO: 2913 - DNA, 14440 bp, synthetic construct
  variation 5129..5344: note = note, n is a, c, g, or t
  misc_feature 1..14440: note = Synthetic
  source 1..14440: mol_type = other DNA
gcgcgtggcgaacggcgcgccgacgcgcacgcacgggatatgcgggatcgggcgcagcacatgcgtggcgccccagccgcgtatgatgacattgcccttcgccgccagcgcgagtatctcttcagacttgaacagtgccaggttggcctcatcggtgccccagcgttcgagcaatccggccttgccctcgaggaagcgctgcagcgcgctcttgcgcagatgcatcttctgggccacgtgatcgatgatctcatggcgcacgatctccaggcccagttcctcagcgagtttttcggcgacaaattttccctgcgaacccatttcctgattcattgcgatcaccggcatgacagacccccttccctattccaccggacgttgctcgtccagatcgttgttgccgcggcgcatccgctgcagcattttcgagatgaccggccagaacagcatcagcatggccaggccgcaaatgctgccgaccagtccgttcgaccagaatatcgagacctcgccgcgtgacaacagcatcgactggcggaaggaactttccgccatgtcacccagcaccagagccagcaccataggcgcaagcggataatccagttttttgaacaggtaacccacaacgccgaacaccagcatcagcacaacatccagcatcgcgttattcacagtgtaggcgccgatcgcgcagatcacgacgatgaccggggcaatgatggaaaacggcacgcgcaggatcgccgcccaccagggcaccgtggtcagcacgatgatcaagccgacaacgttgccgatatacatgctcgcaatcaggccccacacgaactccttctgttccacgaatagcatcggtccgggctgcaagccccagatcagcaggccgcccagcaataccgccgcggtcggggaacccggaatgccgagtgtcagcatcggcaacaacgcgctggtgccggcggcgtgcgcggcggtttccggcgcgatcactccctcgatctcgccggtgccgaatttttcgccgttcttggaaaaacgcttggcgataccataactcatgaacgatgccggtgtcgcgccacccggcgtgattcccatccagcatccgatcagcgtggcgcgcagcgccgtgaaccagtatttcggcagttgcttccaggtgtgccagacgacgcgcgggttgatgcgtgcgtgcacgcccttgaacgccaatccctcttccatggtcagcaggatctcgccgatgccgaacaagccgatcaccgcgatcaggaagttgaagccgcgcagcagctcgctcgtgccgaaggtcatgcgcagggtgccggtcacggagtcgagcccgaccgcggcgagcgcgaaaccgagcatcatggcggtaagggtcttggcgggatggcccttgccgaggccgacgaagctgcaaaaggtaagcagctgcacggcgaagaattcaggcggcccgaacttcaatgagaatttcgccaccaccggcgcgagaaacgtgatcatgatcaccgcagccagggcaccgacgaacgatgacgtgaacgccgcagtcaatgcctcgccggcgcggccggccttggccatcgggtggccgtcaaaggtagtcgccaccgaccacggctcgcccgggatattgaaaagaatggacgtgatcgcgccaccgaacaacgcgccccagtagatgcaggacagcatgatgatggcgctggtcggcggcatcgtgaacgtgagaggcaacaggatcgccacgccgttggcgccgccgagtccgggcaacacgccgatgagcacgcccagcaggatgccgatcagcatatacagcagattgtgatacgtgagcgcgacactgaagccatgcatcaggctgttgaaatcatccacgcttcattctccccttttacgggtagcggttgcttatcaccgcacaccctgaatatgcaccctgccgcggccatctgtcacgcggtcagtaaccgaacagtgcctccagcggccccttgggcagcggcaccatgaaccatagctcgaacatcaggaacatggacaccggcacgatcaaactgaccgggataatcttgatccacggaaaccttccatgccaatacatgaacgcgccgatgaacagcgcggatgcgacgtagatgccgatgaaatagatggcaatcacgtagatcagggacgggaaaaaaaccgacagcaccagccggagcttcttgcggctgacgaacaactctgcctggtcgcggttggaaaacgcggcctgcagcagcgtccacgcgctcgcggcacagagcatcaggccgatatagaaggggaaataacccgcttggggaccatcgtcggcccagccgtatccgacacggcggctgtcgaaaatcaccaccagtccgagcccgaacatgaccgcggccacggcgatttccaccgctctcgtggagatgccgtgctgtcttctgtcttttttcaccggcacgcggtgctgtcttctttctgagtagacaccgtgctgtcttctgtctttttccaccgtcttagtggagtgtcttctgtcttcgtcgttgtcgtgcatccccaactcctcagtcttccatcacgcaccgtgatagcccggcaaaaaacagggtgaagaccaggatacgatcctcaccccgttctgccggttcccaggcgcaactgcccaagcccgcctgtcagcgggcctgtgctacttacttggcgaggaacccggcgtccttcatcaatgttttatgcgtatcctcggccttctgcacccagtcggcgtattccttgccagtcatgaaactcgtgttgaacgcgcccttttccatgaattccttccactccggcgtttcgcgcactttcttgaacaggttgacgtaaaaatttacctggtcctggctgacaccgccgggcatgaaaatgccgcgcagcatcagataatccacattcacaccggcttccttgcaggttgggatatcgttccacgacatggtgtcggtgaccttttccttgtacggcatgcgctgatcgtcgaacacacacagcggacgcagcttgccggcgcgccagtgagccacggcctcgatcggattattcacggtcgaatcgacatggccaccgaccagttgcacggcgacatcaccgccacccttgaacggcacataggtgaatttcttgccggtgaacttgtcgagggcgaccgtgatgatctggtcttcctgtttcgagccggtgcctgccatattgaaatggttgtcgtcagcggctttcaccgccgccagatagtccttggcggtcttgtacggcgaatctgcgttgacccacaacacgaactcgtctagcgcgagcatcgagactggcgtaaggtccttccagttgaacggaatgccggttgccagcggggtggtgaaaagattgctcagggttatgatgagcttgttcggatcgcccttgctgtccttgaggtagaggaagccctcgccgccggctccgcccgacttgttgacgaccactatcggctgcttcatcaggttatgtttcgcgaccacgccctgaataaagcgcgccatctggtcggcgccgccgccggttcctgcaggaatgataaattcaaccggcttggtgggttcccagtccgccagcaccgtggccggaaccgacaatcccagcatggtcgcggcggtgatagctgttctgacaaaggtgttacacaaaatgcttgcagtagtgtgtttcattaatcctcccagtccattatgtacgttgattatatctgtcgttattttttgcagtctccactcggcaaacatccgcggtacaacaagatccgaagacgatcacctaacggcaggaacccggtttactccctccaaacccctctagcgtcgtggttacactgaggactaattgttttcgcttatccttgatcccggcactcgatgtaacgggaggattcacgaagaataggaaatccaaccgcacaagtcaaatcaaactcgtcccagaatccccatcaaaccggagctgacactccgtatgtgttgcgaagtatgccgataccctcgatatgcacttcgacaaccgaacccggcttcatcggcaatacgcccagcgaagtgccgcaagcgatcacatcgcccggttccagtgtcatgtcctgactcatggcatgaacgatcttttccggtgagaatatcatgtcgctgcatggataattctgccgctcctttccattgagcagggttctgacatgcaaagatttccagtcgagtccggttgcgataaccggaccaatgaccccgaatccgtcaaagcacttggcccgggtccattgcgcgaacgaagcatctttggcgatcaagtccagcgccgtaatgtcgttgatgcacgtataaccgaatatcgcctgcctggcttcttgctcattcgcgttcttgcatcgtcggccgatcacgacacccagctcgccctcatagaccacgcgcccatcgtagccgatcggtgacggaacggcttgatcgtgcgcgcagtaactgttgggcgatttcaagaaatacagcggctcggcagggatcgccagattctgcttggccgcctgcgcatggtagttgttccagagcgcgatgaatttgccaggccggcagggcaaatcgacactgacatcagccaacgcgagttctgcacccgcgctgcgcgtcccggcaaacatctccccctcgtagactatgacccgatcgccttcgagctggccgaaccccggcttgcctccgtgagtgtatgcgatccactgcgccataaattcctccgggcaaattgattaaccactctggccgttatcagttgtcacctggcgagccattgaacctggcaataacttggcgccgccaaagttcatgtatcgcaattgccggcagggcagccaggatatttgcgcctgctgcaatgatgaacaccattttccaaccagcattgtcttgaccagtattattagaaatatagattccgaatgcgaatgcaattattgagctttacataattcatgactgttaagtgatttaccgcagggcgggcttaaccagcggcttatgtcaccgttttttggtgacttagccgaatggctnnnnnnnnnnnnnnnnnnnnnnnnnnnnnnnnnnnnnnnnnnnnnnnnnnnnnnnnnnnnnnnnnnnnnnnnnnnnnnnnnnnnnnnnnnnnnnnnnnnnnnnnnnnnnnnnnnnnnnnnnnnnnnnnnnnnnnnnnnnnnnnnnnnnnnnnnnnnnnnnnnnnnnnnnnnnnnnnnnnnnnnnnnnnnnnnnnnnnnnnnnnnnnnnnnnnnnnnaaagcttgcccgccgcgtcgggcgtagcccgacctacgagatgcggagactctgtcttcaaatatgtaatcctcaataaggcatgccaatgcagatagcgaagatcaatgtgcggacacatgctggccgatcatccaatatctgcgcccctcattttggcaacaccgggggtttcagatatatggaccgcaatctaacagcaaaaatcatattccgccataagataaaatttcaacaggcgaaatttccgattcgagtgacagattatgtctctgtgcacgggttgccgttcatggttggatccatagtccggattcaggagccgattcaattatccgttaaatgttgacagtggctacttagctatgtattttgcatccagatcaaaacaattgaatttcaagttcaaacgatcgttgttcctgatccgtactgctgtcgtccagccccacaacaaccagaggagaaaaacatgaagtcctgcgcacggagtttggtattgtctgtttttgccggtatcttggccttgggtctgtccgcgaccagtcaggcacaggatgtcaaagttctcaagctttctcaccagttccctgcatcaagcggcgatgatggggatttccgcgatatcctggcacgcaagtttgccaagcaggtcgaggaaaaaaccggcgggtcgctcaagatcgaaatctatccgagcagctcattggtaaaaaccatgagccagttcggcgcgctgcgcaaaggcacgctggacatgtccgtgttgcccctggcctacggtagcggcgaggtgcctgaagtgggcctgaccctgatgccggccctggtgcagagctacgatcaagggctgcgctggaagaccgcgccgatcggcgctgaactggagaagatccttgatgccaagggcatcaagatcgtgacctgggtgtggcaggccggcggcaccgtcagtcgcgacaagcctatcgttaacccggatgacgcgaagggtctgaagatccgcggcggcgacaagaccatggatctgatgctgcagggcgcaggcggatctcccaccaacgtgtcttccagcgaaatctacagcgcgatgtcctccggcgtgctggatgctgccgtcacctccagcacttccctgatcagcttccgtctttatgaagtttccaaggcagtgaccacggcgaggaacaagtccttctggttcatgttcgagcccctgctgatctccaaagcttcctgggacaccctcacgcctgcccagcagaaagtcgtgatggaggtaggcgcatccctcgaaccattcgcagtggaaggcgcaaagaaggatgacaagctgctcgccgaagtctatgcgaaagcaggcgccaaggtggtggacatggatcaggccgctttcgacaagtggctggccatcgccaaggcaacctcttacaagaatttcgccgagaatgtgccaaacggcaagcaactgctggatatggccctttcggtcaagtgacatgagtgcgactttccatcaacgctctggcaagattccggcaaagctccggcatggagccggcatggagccggctgaggtgggaggccgctccgtctggcggcatttcgcacaggctgtgaagggctttaatgtcctgaccggctatctttccggcatcactatcgttgtcacgagtgtcatcgtctgctatggcgtcgtgatgcgttattattttgcatcgtcgatggactgggggctggagctgtccatcttcctgctcatcattgccactttcatgagcgccggctatacccagttgcagcgcgggcacgtgaccatcgaggtactggagcacctgctctcctcgcgcgccagcaagtggcgctacctgatcggcgacgccctctctttgctgttttgcgcgttccttgcctggaattcctgggagtatttccgggaagcttacacggacgggagagtaaccaacagtacctgggcccccaggctgtggatcccttacatcttcatggcgatcggaacgacggcgctatcgctgcaactgctggttcagatcgtggatgccctgattgattggaagggggtcggctggaaggggcatccacatgtaaccggagctgagtggaaagaatgatgggcccaaataatccattagccaaaaaatttcgtcattcccgcgaaggcgggaatccagcaagaatagacatcccgcatagcggacaatattgttatgcagctccgcttcgcgggggctttttgattaactggattcccgccttcgcgggaatgacggcctaatggattatctgcgatgagtacaagcacgatcggcctgctctacgctggcataaccctgctgctgcttttttcgggcatgccgatcgcattcgcgctgggtctttccgctctgggtttcatggcagccttcatgccggcgccgatgatccattccgtggccgataccatcttctccgagctggataacttcacgctgctgaccattccgctgttcgtgctgatgggcgcggccatcggcaaaacccgggcgggtgcggatgtatataattccctcaactcctggatgtacaagatcccgggcggactcggccttgccaatgtgtttgcctgcgcggtattcgccgcgatgtgcggctcgagcccggcgacctgttctgcgatcggttcctcgggaattccgcaactgatcaagcgcggttattcggaaggcttggccgcaggccttattgccgcaggaggcacgctgggcatcctgatcccgccttccatcacgctgatactctacggtctcgcgtccgagcaatccatcgggcggctgttcatggccggcatcgggccgggcatactcctggtcgtcctgttcgccttctgggtcatgttcaagtacagcctcgaacgcaagaccgcgttcgcggcaatcgacggagccaggcacgcgatcacggaagacgaccacttcacctggcgcgaccgcctggagtccctgccgcgtctgttgccattcctggtcctgatcgcggtcatcatgatcgcgctgtacggcggctgggcgacgccctcggaagtggccggcatcggcgcggccggcgcggtgatcatggtggtgaccgtctataagtgctggaaaaaagaagatgtcattgcgattctttccggcacggtacgcgagagcacgatgatcatgatgatcatcgccgcctccgcgctgttcaccttcgtaatgagctatctcggcgtgacccagcagacagcagtgtggctggtcggattgggcctttccaaatgggccttcttcttcggtgtgaatatattcatcgtcgtgctgggcttcttcctgccgccggtggccatcatcctgatggtgacgcccgtcatcctgccgtcactcaaagccatggggatagacctggtctggttcggcatcatcatgaccatactcatggaaatgggcctcatccatccgccggtcggactcaacctgttcgtgatcaacggcatcgcgccggacatcaagctgaaaagcatcatctggggcaccatgccctttatcggcctgatggtgttgggcatcttcatcctgtgcgtgattccggacattgccgtgtggctgcccaaccatttttacaagggcagctgagcttagtgcaatagcgaacagactgagatattttgattcatttcaccacggcggaagaatggttctgcgcggcgtatggttgcagactgctacgttgccagacctcgggttgtcttgtcgggtatttgctatcctgcttatgaatagcaacatgcgcgggatgtggtgacgcagaaactgcatcattcgcatatacggctctgcacccatcctgccgtgctaagtgcgtagcgcatccaagatgcgtgatggcttctgccgacagtccaggacgcgccatacttgaatggtttgttcactcacccggtagtaaattgcgtaggggaaccgtttcgagagcgcacggtaataaccaaaaaactgctggtgaatacctgcatacagcaaaagagcatcgatgtcggaaaacagcgaatccagaaaataagcgcccaacccttcctgctgctgctcataaaagtgttggccggactgaatatcaaccaacgcgatactcagaatttcgattttcatcgaggactatcacgcagcatcttcttggcggtttcccaggaaacaaaatgcgtctggttttcagcaagcgcacgttccgcttccttcaacgcttgcgcgtgccattccggcgatgaaaatgtttccgcatcacgcgacagatcatcccaaatcacttccatcatgcgcaacttctccgtgcgggtcagattttctatgcttaacatggcatacctccaagtttggactgatgtttattctaacaaacgtatgctaaagatatgtccaaaattttattcgatcctggccccttatcgttcttattatcgttcttatcgttgcataagccggcaatgaccatgatgtaaacattgtcggcacaaccaagaggccgtatccttgccgctgcgagaccgccaaagagaaagcccaacaggtttccccactgggctttcggatacagactcaacctttcggttgatctttattgtagcaacggctctcaccccggatgaactactacaacggtttcattatcacggagaacgcaatgacaagcaagcaagataatctcggcgcactgactttcggattggacattggcattgcttcggttggctgggcggtgctaggtgaaaatcgcatcattgatcttggcgtgcgttgcttcgacaaggcggaaaccgccaaagaaggcgaatcgctcaaccttgcccgccgcaccgcgcgtctgctacgccgccgactgcgccgccgtgcatggcgactcaccaagctagcgcgcttgctcaagcgcgaagggctgattgcggatgccaacctgttcaaactaaaaatcgagaagaacacgccagtcccaaaatcagcttggcaattgcgcgtggatgcgctcgaccgtccactgagcgcagaagaatgggcgcgcgtgatctatcacctgtgcaaacatcgcggcttccactggatcagccgtgccgaagagaaagcggcagaaagcgatagcaaaagcgaaggcggcaaggtcaagcaaggactggctggcacgaaaagactgatggcagaaaaaggctatcgcactgccgccgagatggtaattacggaattttttacacaacgcgtagatgaagatggaaagcctgcactgacaaagaaaactagtgagccgattctggatggggctgcccgcaacaaacaaggcgactacagcaaggctctatcgcgcatcttgctcggcgacgaattgaagaaactgttcgagcatcagcgccaactcggcaacccctttgccaccgaaaaactggaagccgccattctcggcaacggcgaccgcaaaagcggcttgttctgggcacagaatcccgcgctggctggcaacgatttgttgaaaatgctggggcattgcacctttgagaaaagtgaataccgcgcgcccaaagccagcttcaccgccgaacgccacgtctggctcacccgcctcaacaatctgcgcatcgtggtcgatggcacaactcgaccgctgaatgaggtggagcgtcgcatcgctcttatgccttatcagcaagcaggcgactttacctacaagcaactgcgcaccgcgctaaccaaagcgggctatttgcctgggtcattccgctataccgggctatcgtatgccagcggacaaaaaaccgatgagaaaaccaaagatccggaatccgctacgctggtgaaacttcctgcttggcaggaattgcgtaaaacgctggagaaaaaagaactcgcatccgagtggcagaaaatctctaccgatgcgctggaaggcagacctcaactacttgatgacatcgcttgggtgttgagcgtctataaagacgatgacgaagtaaaagccgagttgagcaagctgaacttgcccaatcctgaaaagatgatcgacgcactgttggatattcgcttcgacaaattcagcaacctctcgctcaaggcactgcgccaaatcgtgcctctcatggaacaaggccagcgttatgacgaggctgtcgctaacatcccggaatacggccaccacagtcagttgcacaaagttggcgcaggcgtacataaatacctgcctccgttctacaaagagcgcgataaaaccgggcgcatggtgttcaacgacgatatggacatcccgcgcaatccggtggtgttgcgcgcactcaatcaggcgcgcaaggtcgtgaacgcgctcatcaaagaatatggttcaccgcatgatgtgcatatcgaaatggcgcgtgacctatcacgcccactcgatgaacggcgcgatatagaaaagctgcaaaaagaattccgcgacaacaacgaaaaaggcaaagctcagttcgctcaagacttcaacatcatgggcgcagtcaaaggcaaagagtttgagaagtaccagctttatcgtgaacaacaaggcaagtgcgcttactcgatagagccgatagatattcaccgtttgtttgaacaaggctatgtcgagatcgaccacgcactgcctcgctcacgaagctttgattacagcaagaacaacaaggtgctggtgcatatcaaagagaaccaaaacaaaggcaaccgcacgccttttgaatatctcgatggcaaagacaacagcgaacgttggcggcaattcgtcgccttcgtcgaaggaaacaaagcctatcgcctcgccaagtgcagccgcttattgcgcaaggacttcggcgaaaaagaagcgaaagaattccgcgagcgcaacctcaacgatacccgctacatctgcaaattcttcaagaactacgtcgagcaatatctgcaactgcatgaagatagcgaagccaaacgctgcgtggtgctcagcggacagatgacctcgttcctgcgcgcccgctggggcttagtcaaagtgcgctccgactccgaccgccaccatgcgctggatgccgccgtggtcgccgcatgcagccacggcatggtcaagcgcttgtccgattactcgcgctgcaaagaactaaagcaagtgcgcgaagggtttgtcgatgtcaccacgggcgagatacccaaccccgcgatgttcgatcaactagagcaacatttccccaagccgtgggaaaatttccgcaatgaactcgaagcacgtttgaagattgatgacatcgcgttactgcgtgaagaaatgcaacgcttaggcacatactcagaagaagcgctggaagccacgcgcccgctgttcgtctcgcgcgcaccgcaacgccgcaacagcggtgcagcacataaggacacgatctacgcgcaagcaccatcatcggataaacctaaccgcgtcacccaaaaagttgcgttgaccaaccttacgctgagtgatttaggcaaaatagacgattccgatacatgcaagctaatcgacccgcatcgcaacaaaaaactttacgatgccatccgcatgcgcttggaacaacacggtggcaaaggcgacaaggcattcccagccagcaacccgctacgcaagccagaccacgagggcaatccgtccggcccgattgtgcgcggcgtaacgatggtgatcgacaagctttccggcatacccattcgcggcggcatcgccaagaacgacagcatggtacgggttgatattttcaccaaggcgaacaagttccatctcgtgcctgtgtatgtgcatcacactgtggcgaagacgctacccaatcgggcggttgtggcattcaaggatgaagatgaatggacgttaatcgacgacagttttcaattctgcttctcgatgtatccgaatgatctgcttcgagtgaaactgaaaaacgcatcccacctcggttactacgcaggctgtaatcgctcaacaggtgcgattaacctttggtctcatgaccgaaatcatctggttggcaaagatggaatgattgaaagtatcggacttaaaaccgctttgagcatcgagaagtttaacgtcgatgtcctcggcaatctcttctccgctccgccagagaaacgtcgtgacttggcgtagcgtcgtcatctcacgcccagccaagctgcggcgcgagcaattccggcttgccattgagcaagagcaaaccgccttcgtgccattcgaggacattgcagtgatcgtactcaaccaccgcgagatcaccctcacccatccagtgctttccgcctgtggcgagtatggcatcagcctcttcgccacgggcgatacacatcatcccagcggggtatttataccgttcctatctcactcacgcgccacacgctggatgcgattgcagctcgatttgccgcgccctgtcgccaagcaaacttgggcaaccatcgtgcgccagaagattgccaaccaagccgcctgtttgaaactcacagggcgcgaaggtgcggatcgtgtggactcctacgcacggcgtgtgcgctccggcgatgtcggcaatctggaagggcaagctgccgctttttatttcgtgcaacttttcggcaaggggtttcaccgtgagcaagcacgctttgccaatgcagcgctggattatggctatgccgtgctgcgcggcacgattgcacggggcttggtagcacatggcctactgccttccatcggtctgttccacgccagcgagcagaatgcgttcaacttggccgatgacgtgatcgaacccttccgtccggtggttgatttgttcgtggcgaagcacatgtcgctggctggcgatgagttaaacccgcaggacaaagcggcattggtcggcctactcaatgtggacgtgggaatgccgcgcggcaagatgtccgtgctatccgccatcgaacacagcatagaaagcttggcacgcatctacgacgggggcagcgaatcgctgctggaactgcccaccctcattggactggaacagcaccggctggagtgctgaaatgagcgaggagacacgacggtttatgcgactacttgtgctcttcg

SEQ ID NO: 2914 - DNA, 14369 bp, synthetic construct
  misc_feature 1..14369: note = Synthetic
  source 1..14369: mol_type = other DNA
cacgtttcgcgagagcagcacctcgccggttgccaggtcgacgatgttggcaatgccatcttctggaatttcaaaggttttgtcgtgcgagccgtattcttcagcctgctgcgccataaggccgacgttaggcacggttcccaaggtccgaggattgaacgcgccattggttttgcagaagttgatcatctcctgatagatgcgggcaaaagtggactccggcatcacagccttgacatctttctgtttgccgtccgcgccgtacatcttgccgcccgcgcggatcatggcaggcatggaggcatcgacgatcacgtcgttgggcgaatggaagttggtgacacccttggcggaatcgaccatcgccaattcgggacgatgttcgtgacaggcatgcaggtcgcggatgatttcatcgcgccaagtctctggcaggctggcgattttctcgtagagatcggccatgccgttgttgacgttgacgcccagttccttgaaaagccgctcgtgcctggcaaaagcctctttgtagtagatgcgtacgcaatggccaaacacgatagggtgcgagactttcatcatcgtggccttgacatgcagcgagaagagcacgccggactcgagggcatcctgcatttgttcttcatagaacgcgcacaacgccttcttgctcatgaacatcgagtcgatgatttcgcccgcgagcagcgggaccttgggcttgagcagaagggttttgccgctcttcgtgagcagttccatcttcacgtcacggtcgcggtcgaccgtcatcgacttttcgccgtggtagaagtcgcccgccttcatgaatgaagcatgggtgcgggatgcctgtttccacacgcccatcgagtgcggatgcttgcgggcgtagttcttcaccgacatcggcgcgcggcggtctgaattaccctcgcgcaacacggggttcacggcggaaccgaggcagcgggcataacgcgctttgatggctttttcttcttcgttttgtgggtctgccggatagtcgggaatcctgtaacccttgccctgcaattcacggatagccgtaaccagttgaggaaccgaagcgctgatattgggcaacttgataatgttggcctcggggcgcagggtgagttgccctagttcggtgagggtatcgggcactttctgcccgtcttcgaggcaatcgggaaactcggcaaggatgcgcgaccccagggaaatatcggcctcggccacatggatgcccgcttgcacggcaaaagcgcgcactaccggcaaaaaggctgctgtcgccagcattggggcttcgtcggtgatggtgtagacgatggtcggctgttcggacatagctgaaatcctctcgatctctgatggtagtgatgtgggacgtgccatgacacggcatttacccgccagacggctacgatgcgaggggtgggattatataccgatacagcgtcggcattgggcgaaggaaaggcacggcgatattccagaggctaccatcccaattcctgcatccatccgccctcccccgcgcattccttggcttgaagcgccactttcacatacggcacgatttcttccggcaaaccatcgcgcgcgaaccaccccatgccgccacattttcccggctcgcgcaggacgggttcgccctgccagcgtagcgcgcgcacgaaaaagtcgatgcggttggtgtccgagcggcgatggatgataccgagccagccaaaatcgccgggtgcaatccgcaagccggtctcttcttccagttcccgcgccgctgcctggaagatggattcgcctggttcgacatgcccgcccggaaggctgtagaggccgtcaaaaaaccctgtccccgcgcggcgcagcagcaggacgcgcccttcgcgttcgcacaggatatgtacaccggtgggaatgcccaagcgctccgtcatcattcattccactccacgcgctctcaatgcttgccggtactgccgaaaccaccctcgccgcgatcagaagcagcgaattcatcgacgacgttaaacccggcctgtacgacgggcacgatcacaagctgcgcgatgcgctccatcggctcgatagtaaacgcctcgctgccacggttccacacagagaccatgacctgcccctgataatcggaatcgatcagcccgaccagattgccgagtacgatgccatgcttgtgcccaagcccggagcgcggcagcacgattgccgccaagccggaatcagcaagatggatggcaatgccgcttggaaccagcgtggtttcacccggacgcaacatgaccggcgcatccagacaggctcgcaggtcgagaccggcagaaccggcagtggcgtaggccggagtttgctcgcgcaagcgcgggtcgagcagtttcatgtcgatgcggtgcatatttttttatctccaaaatctgattcgactcacttcgtcggcagtaaacgggcaatgcgttcaacgatctggcgcgcgatgaaagttttgggcgcgcgcggcagcgggtggcgcccttcctcgtcgtaaatgacaacggtgttctcgtcgccgcccaatccatcgccgatcaggttgcctaccagcatgggcagacgtttggcacgccgcttctcctcggcgaaagtatcgagatcgcggctctcggcagcgaaaccaacacagaacggcgcctccggcaaagccgcgacttcggcgaggatatccgggttgggaacgagttcgagatgaatcgccgcacccgacttcttgattttgtgcacggcaggctccgcagggcgatagtcggccaccgcggccaccgcgatgaacacgtccacacccatcaccgccgcaaacaccccatcacgcatttgcagggcgctcgtcacctcgatgcgccgtacccccacgggaacgggcaatgccaccggcccgctcaccagcacgacctcagatccggcgcgcgcgcacgccgccgccagcgcgtaccccatcttgcccgaactggcgttggtgatgccgcgtaccgggtcgacagcctcgaacgtcgggcccgccgtcaggactaccttacgcccggccagcagtttgggcgtgaaaaaagcattcaattcctcgcacagcacctcaggttccagcatccgccctggcccggtttcgccgcatgcctgctcgcccacggcggggccgaggatggtgacgccatcggattgcagcgtcgccacgttacgttgggtcgccgggttctcccacatctggcggttcatcgcgggagcaacgaataacgggcagtcgcgcgccaggcagagcgtggaaagcagatcactggccaagccagcggccaggcgggcaatgaaatcggcgcttgccggagccacgagaatggcatccattccgcgcccaaggcggatgtgtggcataccgtcttccattttctcgtccaggaaccccgaccacgcccggttgcccgacagagcctggaaagtcagcggcgttacgaaacgcgccccggcttcggtcaagaccacatggacgtccacccccatatgcccgagggcgcgcgtaagttcggcggacttgtacgccgcgataccgccgctcacgccgagcacaatcctgcgcccgcgcaacccgtcaatgacgtgtgtataatccggcatttcttcctccaatccttctgtcatggcaattaccgactggcctgcggacgaacgcccgcgcgaaaaactgcttgcgctaggcgcgcaggttctcaccgacgccgaactgcttgcaatcttcctgcgtgtcggcataaaaggccaaagcgccgtcgacctcgcccgcaccctgctcggccactttggcacactaaaccacctgtgcaatgcttgcgcggacgaattcgcctcgatacccggtatggggctggcgaagtatgcccaactccaggcggtgatggaactggctcgccgcgcgctcgccgaacgcctgactgaaggtgccctgttcgattcgcccacggaagtcagggactggctgcaactgcggatggcacaccttccccatgagaccttctgcatcctgctgctggatgcctgccaccggctgatcgaagccgtcgacctctttcgcggcacactgaaccagaccagcgtctatccacgggaagtcgtcaaactcgccctgcgctacaatgccgccgccgtcgtccttgcacacaaccacccctccggtgtgcgcgaacccagccactcggatgaactcatcacccgcgacctgcgcgacgcgctcgcgctgatcgacgtcaaggtgctcgaccacttcgtcgtccccgcgcacggcaaaccgctatcattcgctgaacggggcttgctatgagtccctcttttgcgatagcattgaatgtttcaaggaaatcacaaactttcaggagcacatcatggctcgcgtctgccaagtcaccggcaaaaaaccgatggtgggatacaatatttctcacgcccacaacaaaaccaagcgccgttttcttcccaacctgcaaaaccgccgcttctggtctgaggccgagaaccgctggatcagcctgcgcgtcaccaacgctgcgctacgcaccatcgacaaaaaagggattgacgccgtcgtcgccgagttgcgcgcgcgtggcgaaaaaatctaagctcacccattgaagaacggagacggtcatggctgctaaaagcaaaggcgcccgcgaaaagatcaagctggaatcgaccgccggcacaggtcacttctacaccacttccaagaacaagcgcaccacacccgaaaagctcgaattcaagaaattcgatccggttgcgcgcaagcatgtggtctacaaggaaatcaagctgagataagtttctcgccaaaaaaatccagcgagtacgttcacacggcaggcttacaaattcaagttttgtacctcccacaaaaatcacaaagggttacggcatatcaagccgtagccctttttctttacaaaaggaaaccctgaacaaccttggattcgcttcgctcgcaatgacacccatttttacccgtcattgcgaggagcgaagtgacgaagcaatccatcaaaaggggttatgcagaggttcccaaagggaaaacaatgtttctgcccgttcaaaactgacccgccctcgcctgtaaggccgccagcgccgccaacccggcagtttcagtacgcaagacgcgtggccccaaaccaatcgtccggctgttggcgcgcgagcagagcgccagttcctcatcgctccacccgccttcggagccgatgagaagatgaatggacgaagggacgggctgaatcgcagaaagaggctcgccgccgggcacaagaacccaccgcgcggcttccgtagcttgtgcgagataagcggcaaggctttgcaccggggcaacgaaaggcagcctattgcgcccgcactgctcgcaggcggcaaccacaacctgcctccagtgttcgagttttttttcggcgcgctctccggtcaggcgcaataccgagcgcgcggcctgcacgggaacgatgccactggccccaagttccaccgccttctggatgacccaatccatcttgtcgccacttgccaatgcctgtaccagaacgacatcgagcggcgactcccggctaacctcctgccattgggcatcgaccgccacagccaggcggccacggacatcgagccgcgcatgcaactcgccgccgctcccatcgaacagcaccacaacatcaccactaccgaggcgtaaaaccttcaaggcgtgatgtgtggcagcaggtggaagctcgacttctcccgcatgcggtaaaactccaggaaaataaaaacgtgaaaacgtcatagtatgtcagttagatttcgttaatctcatgaattataaagattttttcatcttcatgtctaagcgggcgcagcggtagcgaccccggcgacacggacgctgaaagcagtggcgtctacgcgaagtccgggtcgcgcataagttcggagatgtcgatcatttcaccacctgccattaaacacgtttgacgttaataacgcactgcattactattgcgccatgtcgattcaatccttctactgccctgacacaaaagccttgttcgagcgtcagcgcgtcgcccagtttgccaatattcaggccgtagcgcggcgcaagctggagcagttgcacatggctgggcggttggacgacctgcgtgtaccgcccggcaaccggctggaaaaactctccggcgaccgggaaggccagtggagcatccgcatcaacgaccagtggcgtgtttgcttcgtctggacaggggaagatgcagaatgcgtcgaaatcattgactaccactgacggagagcactcatgaacaagaagctcagccccatccatcccggcgaaatcctgcgggaagaattcctgataccgctcggcatcagccaataccggctcgccaaggaaattggcgttcctgcacagcgcattggtgaaatcgtagcagggcggcgagccatcaccgccgataccgacctgcgcctgtgccgcttcttcggcctttccgaaggctattggctgcgcgggcaggcgcgttttgacacggaaacggccaaggacgccctcgcgtcgcaactggcgaaaatcacgccgtggcacatggaaaccgctcacgcctgagcagacagccatcatttgtcaccacaccagcggatttcacgggttagagggcagcacccatcttagatacttacgttcaaggggaatgcccgtcgctgaaccagtctgtctgaagcgatcttagtcactttgccgaatttttagacaaaacagcctgtaaaccgcgtagttatcactgtcacagaaaccatcgtattattattgcgagtatgcctttgcctctccatctttcccgtcccgtgcaatcgcccaacatgctgtcggtctcccccgacacgttgttgagcaaggcgcgtttgctcgaagccctggtgcgcgaaatcgcggcctcagagattcttccacgctatctcaaggtgtcacgcggacgcaaggccgacggaacgctttttacagaagccgatcttgcctctcagcggcggctggtcgaggttttgccgactatcctgcctgggccggtgcttggcgaagagatgagcagagaaatgcaggcccgtttgtggggcgcgggacgtagcggcttatggtgcatcgaccccatcgacggcacaaccaatttcatcaacggcatcccgtttttcgccatctcgatcgcctggctcttcgatcacgaaccgcgtctcggcgtgatctacaacccgatcagcgaagaatgtttcctggccacccaaggcgcgggcgcttttctcaatgatgaagcgttgccgttacgccgcacgacccgccgcctgcgcgaagccgtagcaggtttcgacttgaagcaggtcagcccacacctaggcgacgaactggtgacgcgcccgccgtatttctcacagcgcaatttcggctccagcacgcttgaatggtgttttctcgccgccggacgcttcgatgtatacatgcacggcgggcaaatgctgtgggattacgccgccggacaactgatcctggccgaagcgggcggtcaagcctgttcgctggacggcggaaccttatcggcagggcctgcggtcaagcgtggcgtcatcgccgccgccaaccccctgctgttcgccgagtggcgcacttggctgcaatcgcattcctgatctgaacgcgaaaatacggaatttcacgccgacgcgcctttccgggataattcgcgctttcaccgcacaccataccgattatcgagtccaccatgccgcaaccacccgcccccgtgttcaacccgatcaccggcgcgctccgcgcgcttgccatcgacgccattcaaaaagccaactccgggcatcccggcgcaccgctcggcatggcggaaatcgccgaagtcctctggcggcgcacgttgaaacacaaccccgccaaccccgattggccagaccgcgaccgcttcgtcctctccaacgggcacggttccatgctcatctacgccctgctccacctcacgggctacgatctttccatcgacgaccttaaaaacttccgccagttcggctccaaaaccgccgggcatccggaaaccggccacacgcccggcgtggaaaccaccaccggcccgcttgggcaaggcatcgccaacgccgtcggtttcgcgcttgcggaaaaactgcttgccgccgaattcaaccgccccggccacaccatcgtcgaccaccacacctacgccttcatgggcgacggctgcctgatggaaggcgtctcccacgaagcctgttccctcgcgggcacgctcggcctcggcaaactgatcgccttttacgacgacaacggaatttccatcgacggccacgttgaaggctggtttacagacgacacgccaaaacgctttgaagcctacggttggcaagtcatctccgacgttcccggccacgacccccaggccatcgaggcggcgctggccgctgcgcgaaaggaaacccggaaaccctcgctcatctgctgcaagaccgtcatcggcatgggttcccccaacaaggcgggcagccacgactgccacggcgcgccattgggcgcggatgagattgccgccacgcgggaagccatcgcttggccgcattccccgtttgaaattcccgccgacgtctacgccgcctgggatgcacggcaaaaaggaaaatcgctcgaagccgactggcaacagcggttcgatgcctggcgcgccgccttccccgaacttgcccttgagttcgagcgccgcgtcatccggcgggagcttcccgccgactggcttcaggttgcagcgcagaccatcgccacttgcaaggaaaaagcggaaaacatcgccacccgcaaagccagccaaaacacgatagccgccctgctccctcatctgccggaactcttcggcggctccgccgaccttgccggttccaacctgaccttcgtcaagggcagccggggcatgacggctcttgagggcggcaactactgctactacggcgtgcgcgaattcggcatgaccgccattgccaacgggctggcgctccacggcggcctgattccctacaccgccaccttcctcgtcttctccgactatgcccgcaacgccatccgcatggccgcgctcatgcgccagcggcaaatcatggtctacacccacgattccatcggcctgggtgaagacggccccacgcaccaacccgtcgaacatatcccaagcctgcgcctgattcccaacctcgatgtctggcggccatgcgacgccgtggaaacggcagcagcctggattgcgggcatcgagcgcacggacggccccaccctgcttgccctctcccggcagaacctgcccaccgtcacaggcaacatcgacgcggacgacatcaaaaaaggcggctacatcctcgccgaagccgaagccggagcgcctcaagccatactcatcgccaccggttccgaagtcaagctggcgctcgacgccaaggccgccctggaaaaagaaggcatccccacccgcgtcgtctccatgccctccaccaacgtcttcgaccgccaaagcccggaataccgcctcaaaatcctcggccagcacgtccgccgcatcgccatcgaagccgcgcacggcgatttctggcgcaaatacgtcggtctggatggctcaatcatcagcatcgacaccttcggcgcttcagccccggcggggaggctgtttgagcatttcgggtttactgtcgggcatgtggtgaaggcagtgaaaggcgcaacaagcgcatagccaaaacacaaagagaaataaaccggtggcaaaataaaacagtccggcaggtttccctgccggactgctggatacgaattgcgttaaaaacgcatttcttattgtagcaacggctctcaccccggatagccacaatactgaaaattatgagggaggaagacatgcttggcaagcccaccgatccgctcacttttggtttcgacattggcattgcctcggtcggctggtgcgtactcggcgaaaaacatatcgttgatcttggtgtgcgttgcttcgacaaggcagaaactgccaaggaaggcgaatcgctcaatctcgcccgccgtaccgcccgcctcatgcggcggcgtctgcgtcgccgcgcgtggcgattgaccaaactggctcgcctattgaaacgcgaggggctgatcgacagcgtccaaaccatacaccaacctgccgcaaaatcgccgtggcagcttcgtgtagaggggctggatcgaaagctcgcgccacaggaatgggcacaagttctttaccacctctgcaagcatcgcggtttttactggatcagccgtgcggaagaaaaaaaagccgaagcagacggggaaggcggcaaggtcaagaagggtttgcaggataccaagcgccgcatgaatgaaaaaaattaccgaagcgcggctgaaatggtgctgaaggaatttcccgatgcacagcgcaacaagcagggtgaatacagcaaggcactttcccgccttctgcttgccgaagaactcgtcttgctgttcaagcgccagcgcgaatacggtaacccccacgcaacgcccgatctcgaaacgcacattgttggatgcggcgaccgcaaaagcggtttgttctgggaacaaaaaccggctctatccggggaaaaactgctgaagatgcttggacgctgcacttttgaaaaaagcgaataccgtgctcccaaggccagtttcactgccgaacgccacgtctggctgacacgcctcaacaatctgcgtatcgtcgtcggtggaaacgcacgtccgctcaatgaagccgaacgcagcattgccttgcccctaccctatcaacaggccagtgactttacttataagcagttgaaaagcgccttgttcaaggcgggtttattgcctgaaaacgtcagattcaccgggctggcttatccaacacagcaaaccgaaaacaaagccaaagacccggaatctgaacggctagtcaaacttcccgcttggcaggaactacgcaaaactcttaaagaaaaagggcttgaaaccgaatggcaaagtatcgccggagccgccgccggaggacaacccgaactgctcgaccaaatcgcctggacactcagtgtcttcaaggacggcgatgaggttgaacgagaattacgcaaactctccctaccgggtggagaaaagatgatcgaggcactcagcgaaatcagcttcgacaagtttcacaatctgtctctcaaggcgctccgcaagatcgttcctcacatggaagccggcttgcgctatgacgaggcatgcgaaaaagctggttatcatcacagccagttattcaaagcaggagaaggccagtacaaatacctgcctcctttctactctggccgtgataaagatggccgcatggtatttgatgacaaggaggacattccacgtaatccggttgttcttcgttcactcaatcaagcgcgcaaagtgctgaatgcgttggtgagccgttatggctcgccttctgccgtgcacattgaaatggcacgagatttgtcgcgtccaatggatgagcgtaacaaagtcaaaaaagcccaggaagagttccgcgacaggaacgaaaaagccaaagccgatttcatggccgaattcaatatgcccgccaaaagccgggaatttgaaaaatacatgctctaccgcgaacagcatggtaaatgcgcctattcactgaaaccgcttgatcttgatcgagtattacacgaccaaggttatgctgaagtcgatcacgcccttccctattcgcgcagctacgacgacagcaaaaataataaggttttagtgtttgccagtgagaaccgcaacaaaggcaaccgcacaccttatgaatacctgacttcgttcgcggggggcgaaaacggggaacactggcgcagctatgccgccttcgtcgaaagcaacaagtcctacaggattgccaaacgcagccgcttgttgcgtaagaatttcggccaggacgaatccagtgaattcaaggagcgcaacctcaacgatacgcgctacatctgcaaattcttcaagaattatatcgagcgccatttgcaactggccgaaggcagcgacagcaaacgttgtgtcgtactcagcgggcaactcacggcatttctgcgcgcccgctggggattgaccaaggtacgcggagacagcgaccgacatcatgcgctcgatgctaccgttgtcgccgcatgcagccacgcgcttgtcaaacgtctctccgactattccaggcgtaaggaactgaaacacgccgaaaatgcaattgacgcggaaactggggaaatctttgatctggatctgttgtcgaaactggaacaacattttccaaaaccctgggaatatttccgggaagaactcctgctgcgcctgaatacggacgatcccgctttgctcaagagcgaagcggaacgttacggctatccgccaaaaaccgtggaaaacctgcgtcccctgttcgtttcccgcgcaccgcaacgccgcaacggtggcgccgcgcacaaggacaccatctattcccagccagaacgcttgaagagtaagggaagtgtcacgcagaaagtgcctttgacgggtttgacgctcaaagacatggataatctgatcgacccgcaccgtaatgaaaaactttacgcagcaatacgcgctcggctggaagcgcacggcggcaaaggcgataaagccttcccctcggacaatccgttacacaaacccgaccgcaacggcaatccgaccggccccgtcgtccgtaccgttacgatgatcatcgacaaactttccggtattccggttcgcggcggcattgccaaaaacgacaccatgttgcgcgtagatgtgttcaggcataaaaaagacaagaaatatcacctcgtccccgtatatatacaccacgcggtagcaaaggaattgcccaatcgagcaattgtgcaagccaaagatgagaatgactggacgctcattgatgaaggcaacttcgatttttgtttctccctttatcccaatgatctgctcaaaattggcctgaaaaacgtggttattcagggctactatgcaagttgtgatcgctcaactggcaacataggactttggatgcatgatcggaatacagccattggcaaagatgggttcattcgcacgggcgtcaagacagcactatttctagaaaaattccacgtcgactccttgggcaacatctaccctgccccgccggaggagcgccgtggcctggcgtagcgtaatgatctcccgtccggcgcgtctgcggcgggaacattactcgctggccatcgaccaggaagaaacggccttcgtgcctttcgaggatattgccgtaatcgttctcgatcaccagcaaatcacactaactcacccagtactttcagcctgtgccgaatacggcatcagcgtctatgccaccggcggcaatcatcagcccgctggcgtttttctgccgtttctttcgcattcgcgcactacgcgcatgatgcgtaaacagttgaccatgacccgcccgacagccaaacgtatctgggccgacatcgtgcgccgcaagatcgaaaatcaggccacctgtctgcgcctgtgcggaaaaagaggcgtggaaaggctggaagcctgtatgcgaagggttcgttccggcgatccggataatctggaaggacaagccgccgcgctttactttgtacagttgttcggcgcggattttcaccgcaacgacgaagcgcgctggacgaatgccgcgctcaattatggctatgccgtcttgcgaggcgctatcgcgcgcggcctggtagcgcatggtctacatcccgccatcgggttatttcacgacagcgagcaaaacgcattcaacctggccgacgatttaatcgaaccttttcgcccactggtcgacctgcacgtcgccaagcgccccgccctgacggaaggcaatctgataccggaggacaaacaagccctgattgccctgctgaatgtggatgtcgacatggcacagggaaaaatgtcggcgctctctgccatcgagtacgctgtcgagagcttggcgcgcgcctacgaatccggccacgctgaactcgaccttccccgtctgatcggcctccaagcgcacaagctggagtattgttcacgccgaccgaaaactgagcatgtagcgaggggtataccggcccaaaattgaccagggtgtttaacctgttctgcctaatttttaggcaggggaaacgaggtgatcaccatggagttg

SEQ ID NO: 2915 - DNA, 14294 bp, synthetic construct
  misc_feature 1..14294: note = Synthetic
  source 1..14294: mol_type = other DNA
cttctttgccaggtcgattacgtcgtgaccggtaactttggaccaaccatcgaccgcaaccttgccatctttcgcatccagtcccaccatgatatgcccagggaaagcgtagcaggcatcgtgcaggaaccctggtgtcttcaccgctgcggtgccgataatgacataagtaataccattatcgagatagcgctcgatggtttcaagatcgcggatgccgccacccagctgaatcgggaccctgtcgccgatgctttcaacaatggcacgaatggctggctcattctttggtttgccggcaaatgcaccgttcaggtctaccaagtgcaggcgtcgtgcaccttgctccagccaatgcttagccatgacaccgggactttctgaaaatacggtggcatcttccattacaccttgtttaagacgtacacactgcccgtcttttaagtctattgcaggaataatcagcattttgaatcggagtaagagttagagttgagattttagattcgaagcaaattcacgcgcgaatctaactagtcttattatcagaattcggttcccagtgtacgaaattagccagcagtgtcagtcctgccgcatgacttttttccggatggaactgaacagcgaaaatattatcctttgccactgcacaagtaaactgaaaaggataaaaactgtaggctgctaccggctccgggttggtggcctcgacatagtaactgtgtacgaaataaaagcgcgcatcagtagtgatacctttccacaaagggtgatcaatagtctgatgtacctgattccagcccatgtgcggcactttgagtttttgcccgttggtgtcaatcattgccttagatggaaaacgccgtaccttgccaggcagaatcccgaggcctctcacatccccctcttcactggtgtcaaacagcatctgcaaaccgaggcaaatgccgagaaacggtttgctggccgcagcatccagcaccgcatcgcgcaagccgcgtgcatccatttcatgcatgcagttaggcatcgcaccctggccgggaaatactacacgcgcggcttgccgcaccacgaccgggtcgctggtgactatcaccgaagcggtaggggcaacgtgctccagagcttttgacacagagcgcaaattgcccatgccgtagtcaacaattgcaatatctgtcatgttgcgagggaaggtgaggggtgtttacaaagagcctttcgtggatgggatcatgccggtcgcgcgcggatcaagttctaccgccatacgcagtgcgcggccaaatgccttgaatacggtttccgcttggtgatgagcattgtccccggacaggttgtcaatatgcaacgttaccatggcatggttgacgaaaccttgaaaaaactcattcgtcaggtcgacgtcaaactcgccgatgcgggcacgcacaaacttaacgttaaattccatgccgggacgtcctgacagatccaccaccacccgcgacaacgcctcgtccagcggcacataggcgtgaccatagcggcgcaaacccttcttgtcgccgatagcctgtgcaaatgcttgacccagagtgatgccgatatcctccaccgtgtgatgagcgtcaatgtgcaaatctcccttggcggcaatctccaaatccatcatgccgtggcgcgcaacttggtccagcatgtggtcaagaaacggcacaccggtattcagcacagctttgccggtcccatccagattgagactgacgctgatctgggtttccaatgtattgcgggtgatttgtgtctggcgcatgattttgggagtttaattgatggaagcaataaaatcagtaaattggtttcttgagcgtagcctgcaatgccgtcaggaattgtacgttttcatcgggggttcccaccgtaacgcgcaggcagttcttcagcagcggatgtgatccatcgagattcttgatcaaaacgccgcgttgtttgagtccttgaaacacttggctggctgcatccacacgcaataaaataaaattcgcatcggtcggaaaaatatcaaccccatccagcacctgcaaacacttgcttagtactgtccgttcagctttgatcgctgcggcttgttgcagcaggacatcgggatactgcaatactttttctgcaatcaactgggtgacaaccccgacattatacggcaaacgcagtttttccagttgtatcaaccattccgacctgccaatcagcaaccccagccttaaacccgctaaccccagtttggagagagtgcgcatcaacaacaggttgggatattgtgtcagcctgttcatgaaactggcatcggcaaaagcatgataggcctcgtctattatcactatgccgggagcagcttcaataatacgcgagacagccgtggcgtcaaacagattgccggtaggattattggggtaggcgatgaagatcactgctggctggtgctgggtgatggcggcgagcattgcgtccagatcaagcgagaaatcagctttcagcggcacgcctgcataacccatcccggcgaaagtggcgatcatgcggaacatcacgaatgcgggttcaacgctcagcaacactgcccccggcttagctgcggccagcgcgataatctggatgatctcatccgaaccattgcctagcatgatgtccattccggcaggaattgccagcgcttctcgcaaccgggctttgagcggggcagcactcgcatcagggtaacggttaaccggcgcatccgccgccagtcgcgcgatctcatcgcgtagttcctgcggcagcgaatatgggttctccatcgcatccagctttaccatgccactcgcaggcggcacatggtaggcggaaagcgcgagaatttctgggcggatgatctgatcgggagaggggggcataaagtctagtttaaaccaaggtaattttattacacgacttgatgcgggtagcaagaacgagttgtctctttatcttggttaggccatagggataaagctccaagtcgtcgactccaaagtcggcatgaattgattcggtgaaagttttacgtgagcagattatgtcggtcatgcaaatatcttaaccgtttttcttgtaacggtattctgccgccattgcgtgcgcctgcaaaccctctcccctagccaggatggaagcgatcgcgccaagttttcccgcgccttgtgccgacacctggatgaggctgctacgtttctggaaatcgtacacgcccaatggcgacgaaaagcgtgcagtgcgcgaagtgggcagcacgtgattgggccccgcgcaatagtcgccgagggcttcggaagtgtagcgcccgaggaaaatagcaccggcatggcggattttttctgcccatttttccggttgctcaacggatagctccaggtgttccggcgcgatgcggttggcgatggcgcaggcttcatccaggtcgcgcacctgaatcagcgccccacggctttcaagcgaggtgcgtattacagccttgcgcggcatggctggcagttgccgggcgagacttgccgccactgcatcaatgaaagccgcatcaggggaaagcaggatcgcctgcgccatttcatcatgctcagcttgcgaaaacagatccattgcaatccagtcgggatcggttttgccgtcgcaaatcaccagaatttccgatggccccgctatcatatcgataccgaccacgccgaatacccggcgtttggctgccgccacataagcattgccaggaccgacgatcttgtccacttgtggcacagtctcggtaccgtaggccagcgcggcaacagcctgagcaccaccgatggtgaacacgcgatccacttcgcaaatcgctgccgctgccaataccaattcgtttttctcaccacctggagttggcaccaccatgatgagttcgcccactctcgctaccttggctggaagcgcattcatcagtaccgacgaaggataagatgctttgccaccgggcacatacaagccgacgcgatccagcggggttattttctggccaagcagtgtaccgtcaggttcggtatagctccaggattgcgccaactgtttctcatggtaagcgcgcacccgtccggcagcctgctccaaggcttcccgttgtactgctggcaaatcccgcaaggcttgtagcaagcggcttttgggcaattcaagttgtgccaccgaagccgcatccagatggtcgaagcggtgcgtgtattccagcagcgctttatcaccacgtttttttatatctgtgagaatagtggtgacgattgcatccactgcctcatcctgcgtatcttcaaaggccagcagtttttccagtgccgcatcgaatccggcgtcgacagaggagaattgtttaatgtgtagcatggattatcctaaaaacggacttcaccgcagaggtgcgggggatgtagaggaaagcagaagataaccttgtagcaagttccccatagtgcgaatacgctagctatattgcctgagcatttgaattccttcgcgtcctccgcgtccttcacggttcagttgttctttctagagttgtttgactgccgctgagaatgcctccagcatcggctggatcgtatgccgtttcaattttaatgccgcttggttgatgaccagccgggctgaaatcgacatgatctcttccactgctttaagatggttggcccgcaaggtatcgccgctggaaaccagatccacgatcgcgtctgccaatcctaccagcggcgcaagttccattgagccgtagagtttgatcaggtctacatgcatccccttcgccgcgaagtgctcgcgcgccgtttgcaaatatttggttgctactcttagccgggctccctgacgaacggcggattcgtaatcgaaatcgtcatgcactgccaccatcatacggcagcaggcaatctttagatccagtggctgataaagtcccgtgccatcgtgttcgatcagcacgtctttgccagcgatacccatgtctgccgcaccatattgcacataagtcggcacatcagcagcgcgcacgatgataagccgcacatccgcacggttggtggcaagtatcagcttgcgcgaggtttcgggattgtcgagcgcaaccacaccggctgctttcagcagtggtgcggtatcgtcaaaaatacggcccttggaaagggcgatggtgatgccggtcatgatagggatccatgaaaagttgtattttaccgcagagagtagacatgttctaacttacacgtctgacgctcgctcctaaccgggtcaatttttcctcaatgtgttcataaccacggtcgaggtggtagatgcggtcaatggtagtttcgccgcgagcaatcagcccggccagcaccaggctggcggaagcgcgtagatcagtggccataacgtcggcgccgtcgagacttgctacgccgcgcaccacggcggtattgccttccacttcaatgctggcacccatacgtttcaattcctgcacatgcatgaagcggttttcgaatatggtctcagtgataatggaggtaccttcagcaatgctgttcaagaccatgaattgcgcctgcatgtcggtggggaaagctgggtagggtgcagtccgcaggcttacagatttcaatgcgttattcatttttagactgatccagtccggccctgattctatcgctgcaccagcttccatcagcttgtcgagtactgtgtcgagtatgttggcacgggtttctctcaggtgaatctcgccgccgctggcagccgccgccaccaggaaagtgccggtttcgatacggtcaggcatgacccgatgggttgcgccatgcagcgtccggacaccttcaatagtaataatgccgctacccgcgccgtgaatttttgcgcccatcgctatcaggcaattggccagatttgtcacttccggttcgcgtgcagcattttccagaatcgttatgccgtcggccaaggttgctgccatcatcagattttcggtgccggtgacagtaaccagatccattacaatatgcgcaccattgaggcgtttcactttcgcatggatatagccgtgttcgatgtgaatctctgcacccatcgcctgcaagcctttaatatgctggtctaccgggcgcaaaccgatagcgcaaccgcctggcagcgatactttcgcctcgcccacgcgagccagcattggccccagcaccaggatggcggcacgcatggttttcaccatttcgtaaggtgcgaccagattggagagatgtgcggcagtcagctctacgccctgtttaccatcctgcgaaatatccatacccatctgcctgagcagatccagcatggtggtaacgtcattgagatggggaacattctcaattctgagggtatcagcagtgagcagagaagcgcacagaatgggcaatgcagcattttttgcaccggaaatacacacttctcccgtcaggggggtgccgccttgaataatcagtttttgcatggattaaaaatattgtctgcgagcatttatgtcaatccggtttttcagatcggtgataagagatgctggtaatggattattggttgaaatgtactgaagttcccttcatcatatcgcaaagggcgcttctataaatccaaatttgtgaatatttgctttgccttctcagcccagtagagtgcaagcacccaaatatttcaggagatcaaatgaaaaaacagacgattcagacaaatgatgcaccccaggcaatcggcacctattcccaagcgatacgcgtcagcccaggggagacggtttatctttcgggtcagatcgggctggatccttttaccatgcagatggtagtgggtatcgaggcgcaaatccagcaggtgttcctgaacctgagggcagtagcagtggcgagtggcggtgatctgagtgatatcgtcaaactgaatgtctatctgactgatcttgctcatttcgccagggtcaatgaaatcatggcgagctatttcagccagccttatccggcgcgcgcagcggtaggtgtggcggcgcttccgcgtggagcactggtagaaatggatgcggtgatggtgctgccaggatgaagggtgaaggctaatagcacagacagccccaccgttcctgttgccactggttttgtcagcaaggtaatgcaggaaaagcttgccagactcggcatcgtcaatgaattcgacctggtgctgcatttgccgctacgccacgaagacgaaacgcatctttatcccatcaacgacgttcctgcaggcgcgaacgtgcaggttgaaggcgtcatcatccacagcgaaatcatgtaccgcccgaggcggcaattggtgtgtcaggtggaagatggcagtggcattctgttcatgcgcttcctcaatttctacggtagtcaggtaaaagcatattctgtcgggacacgcgtgcgactgctgggagagacgcgcccaggtttctttggtcctgaaatggttcatccaaaatgccgtgtcgtgagtgaaggtgtgccgctggccgatgcgctgacaccgatttatccgaccactgcgggactttcccaggaggcaatacgcaagctgatcaggcaggcgctggttcatggcgatcaggcggacagcctcgcagaagttctgcctgttgaaatcatagagcatcaccagttacaaggtttccgcgatagcgtaatgtttctgcatcaaccgccgccggatgcatcagtcatcttgttgcaggaacgtacccaccctgcctggcgccgcatcaagttcgatgaattgctggcacagcaattatccatgcgcttgcattttcaacagcgccgcagccgtagcgcacccgctctgccggagaaaaacaaattaacccgctcactgctgcactcgcttccttttgaattgactgatgcgcaaaagaaagtattcgccgaaatcagcgaggatctcgccgcagtccatccaatgcaacgtctgttgcagggtgatgtgggcagcggcaagacagtggttgcggcactagccgcgttgcaggccatcgagaacggctaccaggcagccatcatggcgccgactgaaattcttgccgagcagcattatcagaaactttccggctggcttgcgccgatggggatcaagattgcgtggctgtccggtagccagaaaaaacaacaacggcaagtcgcgctcgccgatatcgccgcaggtaacgcaatgcttgccattggcacccatgccttgtttcaggagcaggtggaatttgaccaactggggcttgccatcattgacgaacagcatcgctttggcgtgcatcagcgacttgcattgcgcatgaaaggcgccaaaaccggtgcagtcccgcaccagttgatgatgagcgcaacacccattccgcgcacacttgcaatgagctattacgccgatctggatgtgtcagtaatagatgaattgccgccgggtagaacccaggtggtgactaaactggttgcggatattcgccgcgacgaagtggtcgcacgcgtccgcgaatcgtgccataccggcaaacaagcctactgggtgtgtccgctgattgaagaatccgaggccttgcagctcaagaccgctttggagacctacgaaacgctgacactgactttcccggatttgaaaattggtttggtgcacgggcggctcccaccgcaggaaaaatcggcagtgatggaagcattcaagcaaggggtaattcaattactggttgcgaccacggtaatcgaggtgggcgtggatgtgcccaatgcttcgctaatggtgatcgagcacgccgagcgtatggggctatcgcagttacaccagttgcggggccgcgttggacgcggcgcagaggctagtgtgtgcatcctgctgtaccaaaaaccattgtcggcaaccgcgcgcgaacggcttagaatcatttttgaacagaccgacggcttcgagattgcacgccaggatttgcgcctgcgcggccccggcgaatttctcggcgcacgccagagcggggtacccatgttacgcttcgccgatctggaacaggatgcggatttgctcgccgctgcccgcaccgccgccgaggaaatattgcgtaatcatccggcatcggcgcagcgacatctgcagcgctggctgggggggaagagcgaatacctgcgagtgtagaggttgtaatcgaaaaagtggcctaccactttcttggagatgatacgctgcacgatatcggaatcgggggtagatcccggcgttatcgacgttgtcagcaagcttgacagctcgtatccttactgccgtggggttattgccgtcaaggctgtttctagaaatgataaagcccgacgggtttccccgccgggcggatacagaattatctttcgattcttctttattgtagcaacggctctcaccccggatgaactactacaacggttccattatcacggagaatgcaatgacaagcaagcaagaaaatctcggcgcactgactttcggattggacattggcattgcttccgttggctgggcagtattgggtgaaaaccgcatcatcgatctcggtgtgcgatgtttcgacaaagctgaaaccgctaaagagggtgaatcgctcaaccttgccagacgctccgcgcgtctgttgcgccgtcgtttacggcgtagagcatggcggctcaccaagctggcgcgcttgctcaagcgcgaaggggtgattacggatgcgaatctattcaaacgtaaaatcgagaagaacgcccctgtttctaaatcatcttggcaattacgcgttgacgcgcttgaccgtcaactgaccgccgaagaatgggcgcgcgtgatctatcacctgtgcaagcatcgcggctttcactggattagccgtgcagaagagaaagcagcggaaggcgacagcaaaagtgaaggcggcaaggtcaagtaaggcttggctgggacaaaaaaattgatggcagataaaagctatcgaactgctgccgaaatggtgcttgctgaatttccagaggcacaacgcaacaagcaaggcgactacagcaaagcactttcccgcatcttgctcggcgacgagttaaaaacattgtttgagcatcagcgtaaactcggcaacttttttgccaccgaaaaactggaaaccgccatccttggcaatggcgaccgcaggagcggcttgttctgggcgcaaaaccccgcactggctggcagcaatttattggaaatgctgggacattgcaccttcgagaaagccgaataccgcgcacccaaggccagcttcactgccgaacgccacgtctggttcacccgactcaacaacctgcgcatcgtggtggatggcacaacccgtccgctgaatgagatggagcggcgcattgcattgcccatgccttaccagcaagcaggcgacttaacctacaagcaactgcgcgccgcgctaatcaaagcgggttgtttgcctgagtcattccgctataccggactatcatatgtcagcggacaaaaggccgatgagaaagtcaaagacctagaaagcgcagcactggtgaagattcccgcatggcaggaattgcacaaaacgctggagaaaaaaggactcgcatccgagtggcagaaaatctctaccgatgcgctggagggcagaccagaactgctcgaccaaatcgcttgggtattgagcatttacaaagaggatgccgaagtagaagccgagctacgcaaactgtctttacccaatgcagagaagatggtggacgcactgctggatattcgtttcgacaaattcagcaatctctcgctcaaggcgctacgccaaatcgtgccactcatggagcaaggccagcgttatgacgaggccgtcgccaacatccctgaatacggccaccacagccagttacacaaggccggagaaggcgaacataaataccttcctccgttctacaaggagcgcgacaaaaccggacgcatggtgttcaacgatgacatggacatcccgcgtaacccggtggtgctgcgcgcactcaatcaggcgcgcaaggtggtgaacgcgctcatcaaaaaatacggctcaccacatgaagtgcatatcgaaatggcgcgcgatttgtcacgcccgctcgatgagcggcgcgatatagagaaactgcaaaaagaattccgcgacaacaatgaaaaaggcaaagctcagttcgcccaagacttcaacatcgtgggcgcggtcaaaggcaaagagttcgaaaaataccaactgtaccgcgagcaacaaggcaagtgcgcttactctgtagagcctatagacattcaccgtttatttgagcaaggctatgtcgaaatcgaccacgccttgccctactcgcgcagctttgacgacagtaagaacaaccgcgtgctggtgctcgcaaaagagaatcgcgacaagggcaaccgcacaccatttgaatacctcgatggcaaagacgacagcgcacgttggcggcagtttgtcgccttcgtcgaatcgaacaaagcctatcgtctcgccaagcgcagccgcttattgcgcaaagacttcggcgaaaaagaagcgaaagaattccgcgagcgcaacctcaatgacacgcgctacatctgcaaatttttcaagaactacgtcgagcaatatctgcaattgcatgaagacagcgaagccaaacgctgcgtggtactcagcggtcagatgacctcatttctgcgcttgaaatggggcttcgtcaaaatacgcggtgacagcgaccgccatcacgcgctggatgccgctgtggtcgccgcgtgcagtcacggtatggtgaaacgcttgtccgattactcacgccgtaaagagatgcggcaagtgcgagaggggtttgtcgatgttaccacgggcgagatacccaatcccgcgatgtacgatcagttagtaaatgacttccctgatccgtggccacattttcacaatgaggtaaaggcgcgtctgaacattgataaccccgcactactgcgtgaagaaatgcagcgtttaggcacttactctgaaggagcactggatgccacgcgccccttgttcgtttcgcgcgcaccgcaacggcgcaacagcggtgcggcacataaggacaccatctatgcgcaaccggaacgactggtcgcacaaggcggcgtcacgcaaaaagtggcgctctctagcttgaccttgaaagacctcgacaaactgatcgacccgcaccgtaacgaaagactctatgccgccattcgtacccgtttggaacagcacggcggcaaaggcgataaggcatttccggccagcaatccactccgcaagccagacagtgacggcaatccgactggcccaattgtgcgcggcgtgacgatggtgatcgacaagctctcaggcattccgattcgcggcggcatcgctaagaacgacagcatggtgcgggtggatgtattcaccaaggcgaacaagttccatcttgtgccggtgtatgtgcatcacactgtcactaaggcgctacccaatcgggcgattgtgcaggccaaggatgaagctgaatggacgctgatcgacgacagcttcagtttttgcttctcgctgcacccgaatgatttagttcaagtgcagcaaaaaggtaagaccgccatccttggctactactcaagctgccaccgtggtacaggaagtctcaatctttgggcacatgaccgcagcatacaagttggtaaagatggaatgaccgagagcattggcgttaaaacggcactgagcatcgacaaatttaacgtggatgtgctcggcaaccgttacccagctccgccggagaaacgtcgtgacttggcgtagcgtcgtcatctcgcgcccagccaagctgcggcgcgaacaattccggcttgccatcgagcaggagcaaaccgccttcgtgccgttcgaggacatcgcggtgatcgtgctcaatcaccgcgaaatcatgctgacccatccggtgctgtcggcctgcggtgaatacggcatcagcctgtttgccacgggcgacacgcatcatcccagcggtgtgtttctcccgttcttgtcacacttgcgcgccacgcgctggctacgcctgcaactcgacttgccgcgtcctgtcgccaaacaatcgtgggcatccatcgtgcgtcagaagatcgccaaccaagctgcctgcttacatctcacggggcgcgaaggtgcggatcggttggactcctatgcgcggcgggtgcgctctggtgatattggcaatctggaagggcaagctgccgcgttttattttgtgcaattgtttggtaaaggctttcaccgcaaacaagtgcgttttgccaatgccgcactcgattacggctacgcggtattgcgtggcacgattgcgcggggcttggtagcgcacggcctgatgccttccatcgggctgttccacgccagcgagcagaatgccttcaacttggccgatgacgtgatcgaaccatttcgcccgttggtggatttgtttgtttctgggcatgttatgccggaggataatgagctgcgcccggaggataaggttgcgctggttggtttactcaatgtggatatggatatgccacgcggaaaaatgtctgtgctctccgccatcgaacatacgatagaaagcttggcccgtgtgtatgacggcggcagcgagacgctgcttgagttaccagtgctgattggattggagcagcaccgcttggagtgctgaaacatgagtgcggagacaagacggtttatgcgcttgcttgtattcttcgatcttccggttgtcaccaaagccgaacgtcgcgcctacaccctgttccgccgtttcctcatcaatgacggctacgacatgatccagttctcgatttatggccgcatcttgaacggtaacgacgcgctggaaaaacacatgaagcgattggtgaacagtctgccgccggacgggtcggtgcgttgcctgaatgtaacggagaagcagtttgccagcatgaagatgctggtcggcctaccgctttttcaggaaaaagcggtcaagactaaccaaatgctattgttctgaacggcgatttatcaagcaaaacgcccgcccaaggtaggttggacgggcgtttgcgtgagggctattgtagttcatccggggtgagagagggagctacaactggacaaagagtctgaatttgtcgcgcggcattgtagttcatccggggtgagagagggagctacaaccactacctctgtcaagcgtgaggcg

SEQ ID NO: 2916 - DNA, 14243 bp, synthetic construct
  variation 2822..2823: note = note, n is a, c, g, or t
  variation 11236..11237: note = note, n is a, c, g, or t
  variation 5932..5933: note = note, n is a, c, g, or t
  variation 4390..4391: note = note, n is a, c, g, or t
  source 1..14243: mol_type = other DNA
  misc_feature 1..14243: note = Synthetic
  variation 1907..1908: note = note, n is a, c, g, or t
catggtaatcacggcaacggcgccggcatcgaggatgcgctcctcgagcgacttggcggagaagccgccgaacaccaccgagtggatggcaccgatgcgggcgcaggcctgcatggcaatcacgccttcgaccgacatggcgacatagatgaggacgcggtcgcccttcttgatgcctttggcgcgcagggcgttggcgaacttgctggtcctgaccagcagttccttgtacgtgaccttggtcaccgttccatcgtcggcttcgaagatgatggcaaccttgtcgcccaggcccgcctcgacgttcttgtccagacagttgtaggagacattcagcgtgccatcggcaaaccacttgtaaaatggcgcctccgactcgtcgagcgtggtcgtgaacggctgcttccagaccacgtgttccttggccagccgcgcccagaagccggcatagtcctgctcggcctcctggcacagcgcctgataagcggccatgccggagatggtggctttggcgacagtttccgcggacgggggaaagacgcgggtttcgtgggataccgattcaattgcggacatttcatcctctccttttttgatgctgctagcggcttgttgtccggccgaggccggtactggcatggcaatcgccagtcattagagtcgaagagccttacgaggctcttactgggcgggcgtggaagcagacgaatattatcgcaatgcagcaatccgggcgcaaacctgcgcgatgctagaattttccgttgcccgaggacatgcccatgaccaccatcaagcaggaagacctgatcgcctccgtcgccgacgccttccagtacatcagctactaccatccactcgactacatcaaggccctgggcgccgcctatgagcgcgaggagagccccgcggccaaggatgccatcgcccagatcctcaccaactcgcgcatgtgcgccgagggcaaacgacccatttgccaggacaccggcatcgcgctggtcttcctcaaggtgggcatgaacgtccaatgggatgccacgctgagcctgcaggagatggtgaacgaaggcgtccgccgcgcctacctgaacccggacaacaagctgcgcgcctcggtgctggccgatccggccggtgcgcgcaggaacaccaaggacaacacaccggcggtggtgcattatgagatcgtccccggcgaccatgtcgaagtcatttgcgccgccaaaggtggcggcagcgaggccaaaaccaagttcgccatgctcaacccgtccgacgacctggtcgaatgggtgctgaagaccgtcccgcagatgggcgccggctggtgcccgccgggcatcctcggtatcggcatcggcggcacgcccgagaaggccatgctactggccaaggagtccatcatggcgccggtggatatccaggaactgaaggaaaaggcggctcgcggcgacaagctcgtgcgcgccgaggaactgcgcctggaactctacgagaaggtcaatgcgctgggcatcggcgcccagggcctgggcggcctgaccacggtgctcgatgtcaaggtgctcgactatccgacccacgccgccaacctgccggtggcgatgatccccaactgcgccgccacccgccatatccatttcgaactcgacggcacaggcccggccaggctggagccgcccgacctcgaccagtggccgaaagtgacctggcaagccgacaccgagacttcgacgcgcgtcaatctggatacgttgacgccggctgaagtcgccgcctggcagccgggacaaacgttgctcttgaacggcaagatgctcaccggccgcgacgctgcccacaagcgcatcgccgacatgctcggccgcggcgaaaagctgccggtcgacttcaccaaccgcgtnnggacaagttcacccgcatgatgctcgagcagaccggcctcatcgccatggtcggcaaggccgagcgcggccccgccgccatcgaggcgatccgtgacaacaaatcggcttacctgatggccgtcggcggcgccgcctacctggtggccaaggcgatcaaggcgtcgcgcgtcgtcgccttcgcagacctgggcatggaagcgatctacgagttcgaggtgaaggacatgccggtcacggtcgcggtcgacagtaccggcagttcggtgcacaagaccggcccgcacgagtggctgatcaagatcggcaagatttcgccgtcactcgtcgccggcgcgcaccactgagcgtttcctgcgcgcagcgcgggcccgcagctggccgcagccgccatcgatgtcctggccggcggactgacgcagcttggtgagtatgccgcgctggtaaaggtagtaggacatcgcctcggcccgcgcggcagcgggccgcgagaacggcaagccttcgatggcgttgtagggaatcagattcatcaccgcgtacttgccggccagcaggcggacgatgccgtcgagttcggcatcggtgtcgttcacgccttcgagcaccgtccattgatactgaatcggatagtgcgtcgcccgcgcatagcgctcgcccagttcgaccagttccgccggctcgatggccggcgcccgcggcagcaatttcgcccgcagcgcggcgtcgctcgaatgcagcgacagggccagggcaggccgcaccggccctagcggcaggcgctcgaatacccgccgatcgccgaccgtcgagaagaccaggttcttctgaccgatgccgccaatcgtggccagcaagtcgatggccgacatcacggcagcgagattgtgcgccggctcgcccatgcccatgaanngcagcccaccgcgcaaccgacttgggtcgagacgcaaacgccatcgcgcggcagtagaacgctctcgattgtctgcccgtcagcaaggtcaagcagcagacgcaccgagccatcctcgccggcatgctccgaatgaaccgtcgccaggccggccaggtgcgttgccaaggccggcaagtcggcacacaccgctgccggcggccggtgcatttgcggcagggcatccgcagcgatcgcctgcccccgcagccaggcgcgcaataccgtctcttcgtgccgtggtccggcgccaagggaacgcagtctgcgctggatatcgttgatattcatcaggccgcgaatgctacacctacgaccgctggcattcatgtggcagaatcacggccgcggaggcaactcaagcgggttctagcccgcaaacctggagaatgaaatgacacctgttcgagtaattcttggctgcctgttgctgggcttgtcctcactcgccgccgccgcccccatcgtcgacgccgcctatgtcaaggccgccgctgcacgcggcgccatcgtctgggacgtgcgggcgacgccgcaatacaagaaaggccacattcccggcgccgtcagcattggcgatgccggcgctgccctacgcgagatgaccaaggaagacttcatcgaaaccgacaagatcgagaaaatccttggcgccgccggcatcgatccggcgcaggaagtgatcgtgtacggtgaccgcggctcgccctacgcctatttcggccgttttaccctgcgctatttcggcggcaagaacgtggccgtctttcacgacggcgtcgatggctggaccgccgccggcaacgccctggaaacgactgatgcgacacggcaaccggtgacgctcaagctgacgccggtggcggcgctgtcgccgaccaccgacgaagtcgtcgccctggtcggcaagggcgtgcagatcgtcgatgcgcgctcaccggccgaatactccggccaggacgtgcgggcgatccgcggcggccacatccccggcgccgtaaacgttcccttcgaacaaaactggaaagaccccgagacggcagccaagctggccaagaaggcggtgccggataacagcggcatgacgctgaaggccaccgaggacttgaaggcgctctacgccaagctcgacccgagcaaggaaaccgtcgtctattgccaaagcggtgtccgcgcttcggaagacgcggccatactcgaacaactcggcttcaagaacgtcaaggtctacgactcgtcctggctcggctacgccgcccgcctcaatgcacccgtggctgacgagaccttcttcaacgtcggcgctaccacggccaagctgggcgccctgaccaagcgcgtagaggaactagagcgcctggtcgaacagttggccaaaaacgccaccaaatagctcggaatgaatggcgcccgatcgatgcacgcacagatctgtcaccaccaccggcgcctgcgagcctcctcgattgcccatgccctagccgcggcatgggcacttctcgcggcgaacaccgcctgggcggtcgcnntccagttgctcttctggatcctcttcgatctacccttccccttcaatatcatcgtcatcggcatcgtcgccgcgctgatctggcgcggcacgcgcaacgtgcaagcccgttcggcactcaacggcattccggcgctgacggcgccgccaaggaacttcacgctgccggcggagttcatgcgccgcaatccgggctttgacccggcaacgctcctggccaaggccaacacggctttcctggcgatacagcaggcctggacagcgcagaacatggcgccggtgcggcgctggatctccgatggcgtctggcagcgcttcaacacccagttcgccatgatgcggctgctcggccagaccaacgtcgtcggcaatgtcctgatccgcaagtgctacatcgatgactgggagcaggatggcgccttcgacatcgtccatctcggcatacagttcactgccagcgacgatttcgtttccagccgcttgccgcaactcgaccgccacggccaagtggaaatgctcgaatactggagtttcatgcgcaaggccggcgccggcgaccatgacatctaccacagcaaccagtgcccctcctgtggcactgccttgcccgacgacatgggcgaggtggcgcgctgtccgagttgtggtgccgtcagcacgctgggcgaatacgactgggtgctggccgaaatcacccaggccgacgactatgccaaccagaacgctcacctggccaaggacggccggctgacggagcgcatccgcagcgcctttgccgccgacggcgacttctccgtgcagttgcttgaagacaaggcggccaacgcctacatgcagattctcgccgcccaggtcatgcatcgacctgagcaaatgcgccgcttcgtcagcgacaatgagttcgaaaacctcaatcgcgacttcggcacccaggcgccgttcgtcttcaaccggctctacctcaacagcgtcacgctgatcgattactaccgggaagacaactgcgacaacatggtcgtggccatcaaacgcactgcccagcgcgtggccagcgacggcgatcaactgcggctgatcgatcagggtctctatgtgtgcagcgagatgatggtgatgtcgcgcgacgccggcaccggcagcgccaagggctcgctctacgcccacgcctgccccgcttgcggcgcgccggtcggcgacaccctcgacacgaaatgcgcctactgtggcagcacgctcaacagtacgcgccacgaatggatcgtcagccgcctgatgtcgacagaagagtaccgcacccatgccgaagagcgagcgccgacactgaccacgcaagttgatgccgaccaactcgatccgctcttcgccgcccgcgacctggtattcaacaacgtgctggtgatgatcgcctgcgacggcaggctcagcgcggaagaaattacgctcgccgaagatgtcgcccggcgcatgggctaccagcccgccaagctcgccggcatgctggacctcgcccgtaacggcaaactggccttgcgcctgccggannatggccaagtgaaggccttgccgcgctaggacaccggctcgccgtcggcggtcaggctgaggctgccatcggcggagaactgcaaggcaatcgtggcgtagtggcgattgtcggcaaacaggtagcggtacttcgccagcacggcatcagcttcggcctgcgtgccagcggccgcatattcctgctggaacggaatgctcttcctcatctcgaccagatccgaggtaagcgcgttcaccgtactgagctcccgcgccatcgtcgggttgttcgccaacgcttgcttgaattgcgctgcgtatgggtaatcccccggcagctgaatttttccctcgctatcgtaagttatgctcgaaggcgggaacgggatatggttctgcgccagaaattgcgggaatgccgacgagatatggccccggagagcatcgatgttctgttggttcggcaacaacagcggcggcagcgaaaacgcggtcccgctcgtttgcttggcgggcgtgaagtagtcgtcgatgttcaaggtcagcgaaccttgatcggtttcaaagacggccgtagtgccgcttggcgatggcacggccgagttggcgtgggcggcaagacgatcccgggcagcctgggaaatcgttgccctgtcggtaatagttgccgccccgagggttgatttcgccgaagcggcaatggtggactgttgccgttgcgacgccgcgacattcaagagaggccaggccgaataggcgctcgcggattgaacttgcacgacagactcctcagacgttgacgatcacatgctcatcgctagcaatggtcgtaccaccagggcgcagaccaacccccacatataccgctcgttcctggaccaagttgccatgtcgctcggccttgtggcaatctgtacctcccgagttggcccgctggagaagatcatgtcattcgccgtcgaagcattggaagccgaagcactaaatctatccatcaccgatcgcgcccgtctcgtggagaaattgatcgtaagcctgaatagtgagcccgatgtcgaagcagcctgggccgcagaggttgagcgacgccacgctgaaatggagagtggtacggtgtcactcattcccggccctgaagcacttgcacgcttgaaggccgagtttcaatgaactactcgctgcatcctgaagccgaattcgacccccaagagtgaaagccttttgcgcccggatacaaatcgaactaccattactcacctgatttcaacttcagcaacgcgccgcctaggagtcaccatggccgaaatcgaaaacatcatccttgaacacgtcaagaaaatccaagcagaacaaacagccactagagaacgagacgcggaaatcatgacacggctctccagcatcgaatccggaatcgctcgaatcggccgcgacgaatcggtcaactacacagaaatcattagcgaccgccacgccgtagacaagctcaaggaacgaatagagcgcatcgagcgacgattagaactctccaactaaaaggccggcgaaagccggctttttcttgacctcgaacaacttcaaccgcgcgaataccgcggttcatccccgcaggtcgcggggaacactatttccgattgattccggacaccttatgcagcggttcatccccgcaggcgcggggaacacttcccgaagggatcgctcatcaagcgggtgcacggctcatccccgcaggcacttgcacgacagactcgcacgactcctcagacattgacgatcacattctcgtcgcagacaatggtcgtgccaccatggcgcaagcgggccaagtatggagaagacgaaggactgctgttgccgacgtctgtgaatgatccccgcgcaggcggtctacttgtagttgggcgccgtcagcctctacgcgtatcatttcgcttatgagtccgacaatctttcgtgaaggtggcttccggttctacttcttctcgcgggaggagccgagaatgcatgtgcacgttcaaggtcagaacggcgaggcgaagctctggcttgaaccgactattgaactatcccaacacactgggctttctcggcgggaaatcaacgaagcccttcgtctcgtccaggagcatgaaaatgacattcgcagcgcttggcacaagcacttctcccgttgaagtaacaaacatttctcagtatggcttctgggtcttgctgggtgatgaagagctattcctaccgttttccgagttcccgtggttccgcgacgtagcagttgcgaagattcttcgtattgaactgccgtcacccaatcacctctactggcccgagctagacgttgatctggcagttgagtccatacggcaccctgagcagtttccgcttgtcagtcaagtcggcgcgtaacccatcattccaccggccctgcgcgaaacgtcacgcaggcgcggcgctgaacgaacaatctgcacttgaacacgacacaggtatcgacaagccgacgaatcattcactggtctggataagcggagctccgcttggatcagcggagcattccgactgacgtaatgcttgttccgaaagacgtgtctgcgcggtgagcagttccatgagcgatgcatcgatgggaacagcgacaaacaccgggcggccgtacctggtaaccagggacagcctgcccgcctcggcttctcgtatcagatcgccggtgttgcgtcgcaagtctcgaatggtgaatacgttcatggctgcgtcctgtcgaaacacgaacgccgcccggtggcgcacgcggccctgccgatacccaagcatcgggtcgtggactcattgcaacaccagcgctgcaaacaggcgatactcatcacatatcccccttgggtgatccgttatgccgatgatatgctgaacgggcggccgcttgcaacgccacaaatgagaagcccggcgagttgccccgccgggctggatacagaatctttcgattctttattgtagcaacggctctcaccccggatagccacaacggggacgattatgcgggaggaaggaatgacaagcaatacccacggtccactgacctttggtttcgatattggcatcgcctcggtaggctggtgcgtgcttggcgaagaccgcatcgtcgatctcggcgtgcgctgcttcgataaagccgaaaccgccaaggaaggcgagtcgctgaaccttgtgcgacgtatggcccgactcatgcgccgccgcctgcgtaggcgcgcgtggcggttgaccaagctggcgcgactgctgaaacgcgaaggactgatcgacgacacggctcttctgagacaaccaacacccacgtcgccctggcgcctgcgagccgatgggctcaaccgaaaactgagcgctgacgaatgggcgcgtgtcatctaccacctgtgcaagcaccgtggctttcactggatcagccgggccgaagagaagaaggccgaatccgacgccaagggcgaaggtggccgagtcaagaaaggtctgtccgacaccaagcggcgcatggaggagaaaggctaccgcagtgcggccgaaatggtgctcgccgaattccccgattcccagcgcaacaagcaaggcgactatgggaaggcgctttcgcgtgtgttgctcgccgatgagatggccctgctgtttcagaagcaacgcgaattcggcaacactcacgcgggggccgttcttgaggcccaaatacttgaccggaagagtggcttgctctgggcgcaaaaaccggcgctttctggcgaagccatgcttgaccgaattggccgatgcacctttgaaagagcttccgtcggcagacccggcggccccgatgggaaaggcgagtaccgcgcccccaaggccaacttcaccgccgagcgccatgtctggctgacccgcctcaacaatctgcgcatcgtcgtcgatggcgaagctcgtcccctcaacgccgaagagcggcgggtcgcgctgccgctgccctacgaacaggcgagcgatctcacctacaagcaactgcatgctgccttggtcaagaagggcctgctgcccgagagtttcgaattcactggcttgcgcgccagcaaagacaaagacccgaaggctgaaaggctcgtcaggctgccggcatggcaggaactgcgcaagaagttgaaagaacacggattggaaaccgaatgggagagcatcgccggcgctgcgaccggcggcgacccgacgttactcgacgagattgcccgcgtattgagcgtttacaaggacggcgacgaggtgatcggcgagttgcgacggctgactttgcccggcggtcagccgatgatcgacgccctgagcgaagtcagcttcgacaagttccacgcgctctcgctcaaggcgctgcgcaaaatcgtgccacacatggaaggaggcatgcgctacgacgaagcctgtgcggcggctggctatcaccacagccagttgcagaaggtcggcgcgggcgaggacaagtacctgccgccgctctactcgggccgcgacaaagaaggccgcatgattttccgcgacgaccttgacgtaccgcgcaacccggtcgtactacgcgcgctcaaccaggcgcgcaaggtgatgaacgccctgattcgacgccacggctcgccgtccgccgtccacatcgaaatggcgcgtgacctttcccgcccgatggacgagcggaacaaggtcaagaaagcacaggaggaataccgcgaccgcaacgagaaggacaaagccgccttcatggaagaattcaagatggcggctagaagtcgcgagttcgagaagttccagctttaccgggagcagcagggcaagtgcgcctattcgctggcgccactcgacctgcatcgtgtgctcaacgacatcggctatgcggaagtcgatcacgccctgccctactcgcgcagctttgacgacagcaagaacaacaaagtgctggcgctgaccgaggaaaaccgcaacaagggtaaccgcacgccttacgaatatctggacggggccaacaccagccagcgctggcgggagttcaccgccttcgtcgaatcgaacaaggcctaccggctcgccaagcgaagtcgcctgctgcgcaaagacttcgcgggcaaggccgctgaggagttccgcgaacgcaacctcaacgacacccgctatgtctgtcgcttcttcaagaactacgtggagcaatcactgaaactcgccgatggcagcgaagccaagcgttgcgtcgtattgagcggccagatgaccgcatttctgcgtgcgcgctggggcctcaccaaggtgcgcggcgacagcgaccgnntttcgtcgacccggaaacgggcgagatacccgatcccgccatgtaccagcagcttcacgcgcacttccccgacccgtggccgcgcttccgcgacgaactgttggcccgactgaacatcgacgatccgaacgaattgcatgccaagatggaatcgctcggtacctattcgcctgagaatctggatgcgctacggcctgttttcgtctcccgcgcgccgcagcggcgcaacggcggcgctgcgcataaggacaccatctacggccagcccgaacgtctcaaggagcaaggcggcgtgacgcagaaggtgccgttggcgagcctcacgctcaagaatgtcagcaatctgatcgatccccaccgcaacgagaagctatatgcggcaatccgcgcccgtctcgaagcccacgccggcaagggagacaaggcgttcccggccaacaacccgctgcgcaaaccggaccgcgatggcaatccaaccggccccatcgtgcgcaccgtcacgatggtgatcgacaagctctcgggcatccccgtgcgcggcggcatcgccaagaacgacaccatgctccgggtcgacgtcttccgacacaagaaggacggtaagttccacctagtgccggtatatgtgtatcacgcggtggcgaaggaactacccgaccgcgcgatcgtgcaagccaaggaagaagatgaatggacgataattgacgacaacttcgagttccgctttgctctttgcccgaacgacctagttcaggtgaagttgcgggactgcattcgtttcgggtattacgcaggatgcgaccgctcaaccggttgcatccatctttggggacatgatcgtaacgccaatttcggcaaagacggtctgatacgaagcataggtgtgaagatggcgcagtcgatggacaagttccacgtcgatgcactcggcaacgtctatcccgccccaccggagacccgtcatggtctggcgtagcgtgatgatctcccgccctgcgaagctgcggcgggaacatttctccctcgccatcgaacaggaggaaaccgccttcgtgcccttcgaggacattgcggttatcgtcctcaatcaccgcgaaatcaccctcacccatccggtgctctccgcctgtgccgaatacggcattggcctttacgccacgggcaacaaccaccagccggccggcgtatttctgcctttccttccacactcgcgcactacgcgcatgatgcgactgcaactggcgatcgccaaaccggcggccaagcaagcctgggcgagcatcgttcgccgaaagatcgagaatcaggccgagtgcctgaaacttgccggaggcaagggtgcggatcgactagagtcctacgcgcgccgcgtgcgttccggcgatccggaaaacatggaggcgcaggctgcggccttctatttcgctcagttgttcggcgccaagttctatcgcgccgaggagtgctggagcaatgccgcactcgactacggttacgcggtgctgcgcggcgctatcgcccgcgggctggttgcccatgggctgcacccgaccgtcggcctgtttcacgacagcgagcagaatgctttcaatctggcggacgatgtgatcgaacccttccgaccgctagtcgatctgcatgtcattcggcatcccgccgccaccgaaggtgacttgatccctgccgacaagacggggctggtcgccttgctcaatgtggatgtcgccatgccccagggccggatgtcggtgctttcagcaatcgaatatgcggtggaaagtctggtgcgcgtctacgaaggcgctacccgcgagccggacttgccacgccttgtcggcctacaactgcacgccctggagcattgagtgggcatcgagacgagacgatacatgagactgctcgtcttattcgatctacccatggttaccaaggccgagaaacgggcctacgtgcaattccgtcgctttctgctcaatgatggctacgacatgatccagtggtcggtctacggccgcatcgttaacggccgggacgccgaaacaaaacacttggcacggctctccgagaacttacccccggaaggctccgtgcgaacaatgacggtgacggaaaagcagtacgctggaatgcgtctactcgtcggcatgcccctctttcaggaaagaaaggtcgccgcttcacagatgctactgttctgagatcggcgaggtaccgggttagccgtgcgccatttcttcgcggatcacacgacgaagcatcacttcgatctcttcgcctgtcatagcgaactgcagggcctgattgatgagcgtctggtagccgcggccccccgctttcgccttgaagaactcgactaccgccgtatcgagcatgatcgagacgcgctgcttacccgtccgagtacccaccgcccacgcgaactcctcacgcgtggcgggcttgccgcccacccgcaggctggcacgacgcacatcggcatcggtcatttcgggaatctcttcgtactccttcttggagacagcgtggccgtcaatctttctcaagttgcttcgaatagcgttcaatttcgcggtcattggccttcctcatcgaaaaaatctgccgaacactgccgcgttgcacgtaacccacggccatcaacctgccagccagcaagccaaaacagatcactcggcactccccatagtcgcggcgagtgtcttcatattcgactgtcggaccggcgaagacgacctctgcgtcggcgaaatcaatgccgcgctgacgcagagtggctcgccgcttcccttcgtcccaggtgcatttcacaatggaatagtatacatatttgcatacatattcaagccaaagaggatcgcaagtaggcgcttccgaatttccgaaaatagcgcagggtcactacatcgactggcccattgcgaatcgaaacgcgcaaagaaaacccacaccagacctaggtctggtgtgggtttgcgctcagtcagattgtagctatccggggtgaga

SEQ ID NO: 2917 - DNA, 14094 bp, synthetic construct
  misc_feature 1..14094: note = Synthetic
  source 1..14094: mol_type = other DNA
gcccgggttgcccggcgcaacgaatacggtagtcacccgaggcgactgcgccagtttccacgctaacgcatgctctcgtccaccgccgccaatcactaaaactttcataaacgcgcctcgattacatatattttcattaatattcgcgacattttgccacacccaccggataattccgctcatgattgacattgtgctgtttgaacccgaaatcccccccaataccggcaatattattcgcctgtgtgccaacaccggcgcgcggttgcatttaattgaacccttgggtttttcaatgaatgagaaggcgctcagacgggcggggctggattatcacgagtttgccgacattaaaacgcatccgaactggcctgcggccaaagcggcattggcgggcagacgcgtatttgcgatgaccaccaaaggcagtgcgccgtttcacgaggcgcggtttgcggcggatgatgtgctgatgtttggccctgaaacccgtggcctgccggctgaggttttagatgagttttcagccgatacccgcttgcggctcccgatgcgggcggattctcgcagcttaaatttatcgaacacggtcgcgattgcggtgtatgaagcttggcggcaattgaattttatcggtgccagcgggcgggatttgccctcgaaatgaatcagccttccaacgccgcgctccaagttcaggccattgccattgcccgcagcccctttaaaagccggtttggcacaccgcgacaatcgggcctagtggctgatgccttgggcgttattcaacccatcaaaccgtggcatcgccaagaggcttgggtggggattgagcaatactcgcatttatggctgatttggcaggtgcatgacaacccgcatcaacccgcctctagcgtgcgcccgccgcgcttgggcggcaatgtcaaactgggggtgtttgcgacgcgctcaccggctcgccccaatccgatcggcttatcgctcgttaaattgcagtgggtcgagcatctcaacggccatgtactcatccatgtcagcgggctagatttactcgatggcacgcccattctcgacattaaaccgcacattgcctttaccgattgcccaaaaaactcggatagtggcatggcgcgcgaagaaccgatacgcctacccgtggactggacacaggtgccaccggctgagcgcgaaagcatcagcgccatcgaaaaaaacgtgattgagcaaacactcgcacttgacccacgaccggcgtttcatgacgatcctgagcgggtgtatcactgcccactatttggctggaatgttcggtttaaggtgcaagaaggcgccatcatcttgatgaggctagacgcgttatcacccaacgcccaacccaatcaagcccccagcccaaaccatacagggcgataaacgtaggcacaccaagccaaaaataagccgcccaccaactgctcaagcccctcagccatgaactgccgcctaactcaagcaacccggccatctgcagggcgagcggtaactgtaaaaatacaaatcgtcctttcgcatctgagccggcactgaacgtcagcaccaaactgagcgcgataatcaaagcgtacatcacgcacagaatcacccccgttttgctcagccaaactcgccgctgccctcgggcaaccttggtgggttgcctcactaaagttcctgatgccgtggttcacgcgccaaaagctgagccacggcatcgcgcgcggcaacgcccccacacagcacttggcaaacggcatgcacaatcggcatatccaccgcgtagcgctctgccaagcgctggccttctgtcgccgcgccaatgccctcaaccgcttggcctatggccgccacggcctcttgcatgcggtacccttgagcaagctttaagccaaagcggcggttgcgcgattggtcatcggtgcaggtcaacaccaaatcgcccacgcccgccaagcccataaaggtttcaggccgagcgcccatggccgcgcccaagcgcatcagttcggctaagccgcgtgtaatgagtgcggcgcgtgcattggcaccaaaaccaaagccatcggccaccccagcggcaattgccagcacatttttaaggccaccggcaatttccaccccggtcacatcgtcggtgggataggtgcgcagcgtggggttgcgcaacgtggcggcaatgccttcggcgactgataaatctgtgcaggccacggtgatagccgagggttttcccgtggcaacttcatgcgcgaacgtggggcctgacaccaccacaaacgggtgcgcttcaaggcaactcgcggctaactcactaattttccgccccgtgccgtgctcaaagcctttggccgcattcacaatcacggcaccagtcggaaaatcggccgcatgcgcccttagaaactcggccaaggctttggtcggcaaaacgagccaaatttgcgctgcatgctgcaaagcggcggttaagtcgctggtaaccgataagcgatcggggaatgggcaatcggccaaatagcgggcgttgatgcgatcgtgctcgctgcgttcagccaagcctgaatcgcgcgcccacaagtgcacggcatgaccatttttcgcgagtacgatggcaagcgccgtgccccaagagcctgcgccgatcacggcgatagcggtctggccgatcatagggtttatcttttcactaaaagttggccaaacacagtttctgcctcctattgcgggcggccgtgggtttgctctaattgctctgcgacatgctgcgcatataagtgatcaaaattaatcggttggagaattaactgcggaaagccgcctttcatcaccaaatcgctcacggtttcacgaatatacggctgaagcagattcgggcaataggcacccaaaatttgctgcgcgctggcatcatcaaaccctgcaattgtgaaaatacccgcatattgcacttcggcaaggtagattgtttccgcgttgtgcgtcgcggtggcggtaatggtcagcgccgtttcaaacacgccctcgcccagtttgcgggcattattggcaacctgcacattcacttcgggcgaccattcggtggccacaaaaatatcgggcgcttggggcgattcaaaagaaacatcttttaaataaattttctgaatcacgaactgttgttccgttgtgttttcagtgggcagggttgcgccattgttgggttgatcggtcatgaaaaccactccattgtatgaatgaataaaaacaaaaaaacgttatagcaaggccgcatgccggatcaatgacaaatataaggcagcgcccaacttatttaacgcacgccgtgctggcttaaccagctttcaagcgccgagagctgcatggcgcccgaggttcgcgccacttcgcgcccggctttaaacaaaattaacgtcgggatgctgcggatagaaaattgggcggcggtttcgggtgcttggtctgtttccagcttgccgacgcgcagggtcgatttttttcgctcggccaattgctcaaataccggcgccatcatctggcaagggccgcaccaggtcgcccaaaaatcaacgagcaccggcaaatcgttacgcgccacttgacgcgagaaattggcatcattaagcacaatcgggtggccagaaaaaagtgcggtgccacatttgccgcattggcctgatcccgcgcgcgcactcggaatacgattcacggcgctgcattgcgggcaaacaacatggattgacggggcttcgctcatgggtaactcctaaattcagtgggcatgattttaagcgtatgggggcacattaatcattttccagcggagtttgggtaggcgtttctgcattttggcgttctttttccagcaaaccgagcaggccaccggcaccgacgagcgcagaaagatcgtcgtacccgccgacatgggtttgaccaatgaaaatttgcggcacggtttcccgccctgatcttaattccatttcatcgcgcgccgccgcattaaaatcgaccgacaattcaataaactgaacaccttgctgcttaagcagccgctttgcaaaatggcaatacgggcaaaaagcgcttaagtacaccacggcatgcaggggcgcggggggttcacccaatgaaggcggcaacttcaattcgccttacttacggacaaccggatagctttccgctttccaagccataatgccccccgccaggtgacccacattcgagaagcctgctttaaccagcatgttagcggcggtggatgagcgattacccgagcggcaatacagcaaaacctgatccgctttatgcgattcaagctcgccaagcttggttgccagcgtgcctaaggccatgtgctttgcgcctttgatgtgctcaccgcgaaactcatctgtttcgcgcacatccagcagcaccacgttgtcacggccgatcaatcgggcgaactcggcggccgacacatcccgaaatttttgcaagccgcgcgtcatctcattggcaagcaacataacggacaacacaatcgcggcaagcgatagcatccagtgtgccataagaaaattgataaattcctgcatgaaaaaccctatcttaaatgagagaacgccggcaaattattgagcgcggcgcacgcccaatttcaccagtatcgaatccatagggcaaaaacgggtaatgccactttggaataaatttaagcccacaaacgcggttaaccacagccagcttggcttggccaaatctacggtgcctgttaaatgtgccagtgttaaggaaattaacaccattaagcccgccataatgcgaacaatccgatcagtcgtcattttctcacctcagataatctaaaaataaggggcgcaaatcacccgagcaaaaaacaacccttagttaaacgggcagaatacttcttgcatcatgctgattaaacgcaacgtgcgggcatccgacacccgataaaacacccgattggcctctttgcgcgacgccaaaatacctttgtctcgcaaaatcgccaagtgttgcgagatgttgctttgggtggtgccgaccgaatcaacaatttcctgcacatgcagttcgcgatcacccaaaacacataaaattttaagccgcaacggatgcgacatcgctttaagcgagcgcgaggcacgatcaatatcttccgttcgcgccatgagccgttcggtgccgcagtctgtcatttcaagaatcatgcgatgttcccagtcaaaaaataagccaatttcgctatgctaccagaccaaccctatttgaaggttagaatcaccgcgccaaaatatcgccagaatattcgccctgatgatacattcgcacccactcggtcgccattggcaacgggcatctatattagcgacacttaaagttcgtgtcgtcaaaaattgaattttcagcttaacttgagcgcgaaccaccggtaatgactgctttttttcgatttttgggtttttatcccgccccgctcatccgcgcgatgcgtcacttaagctgggtgtgcctgctcttttggtcggcagggatgaacagcgcgcacgcggcagataacccgcaacaactcaaaagcgcgattgaacagcaaaaaaccgagctcgacaaaacccgcatcgcccaagaacaaattcgtacatcgcttaaaaaaacacagcaacagctggccgaatccgcgagggcgcaagaggcgcttgaagaccaagtggccgcccttgaagcggatcaagcccagctaaaagccgatgcaggaaagcttgagcaagcgatagccgagcttaaaccccaaatttcagatagcttgaaactggcctacaccttgggcgatcaggccagcttgagctctttgttcgcctatggcgatgcgctcagcaccgagcgaaatttgcgttacatcaaaatattgctcgcccaatctatggataaaatggcgcaacttcagcaagccgaacgcgagcaagccagcaatcagcaacgcttgcttgaggcacaagccaagctgagcaaggcgcaaatcgagcttgaaaaaaataccgcgcaacgccgcgcccagcaagccgaacaaaatcaattactggcaacgctcagcagccgggcagatgctcaatcccagcagctggccaccctacttgagcagaaaaaaacgctggatgctcaaattgccagcctaaacgcccaagccgcccgtgaacgtgctgaacgtacaatgcaggccaaagccgatgcagcacgcgcgcgcagtgagcaagcacagcaaacgcgggccaaccaaacacccgcgcctgaacctgcccgcgcgccatcgccgcccgatgaagaatcgcctgcgccttcgcccaccaccgcctcgcgttcgggcgcgattcctgttttgggtaaaattattcgcagttatggcgcgcccattgcggggggcgatatgcaatcgcaaggcattttatttgccgcgcccatcaatagccccgtgcgggcggtggcggcgggcaaagtggtgtttgccgatgccatgaaaggctggggtaatttaattatcgtgcggcatgcgggtgggtatatgtcgctctatgcgcacaatagccgcctgctggtacaaaccggcgcgcgcgttaatcaaggcaccgaattagcactcagcggccagattgatggccatgcggctgggctctattttgaggttcgccacggcaacgatacggttaatcctgcgcgctgggcggcttatcgcgcggtttcacgctgaatttatgcaataaaagccgcttaaattcatccggccttaaatccttgctattctctacagaacatctgcgtatttattgggtctgataagccctgtttgtagtttgtccgcgaatcgtgtgttttcaggtccttggctcattgcttgcactgaacctatcatctatttttagttatctgtttttggagtaaatattctcatggctcaatggttgcgaaaaacatcggcccttggtgtggctgccgtgtttggcttttcggtcgcggtcgcggttaacgccttggcagataaagatcaggccaaagatgccgccgatcaaacctcaattccgttaagtgaattgcgcaccttcaccgatgtgctgacccgcgtgaaggccgattatgtggaccccgtcaccgataaaaccctgatggataacgcgattcgcggcatgattgatcggctcgacccgcactctaactaccttgataaagcagaatttaaagatctgcaagaaaccaccaccggtaaattcggcggcttgggcttgcaagtgggaatgaaagataaagttattaccgtcatttcgccgatcgacgatacccccgcccaaaaagcgggcattaaagccggcgataaaatcgttaaaattaatggtgaatttacccaagggctggatttagaaaaatccgttaaattaatgcgcggcgagcccggttccaaaatcaccctaacgcttgtgcgtgatggcgtggacaaaccctttgatgtcacccttgaacgcgcgattatcaatgtcaaatccgtgaaagcccgcatgctggatcccaatttcggctatgtgcgcattgcgcaattccaatcggataccacagagcagctacacgatgcactcaatcagctcgttaaagataacgacaacaagccgcttaaaggcttggtgctggatttacgcaacaaccccggcggcgtactgcaagccgccgtcggcgtggtggatacgttcgtcaacaaaggcttaattgtgtacaccgatggccgtgatgcggattctaaaatgagcttcaaagcgcatgaaggcgacatgctcaacggcgcgcccattgtcgtgctggtgaacggcggctcggcttctgcctcagagattgtcgccggcgccctgcaagatgatggccgcgcgcttatcgcaggcgagcgcaccttcggtaaaggctcggttcaatccatcatgccgctcaccaatggcggcgctttgcgcctgaccaccgcacgctatttcaccccggcggggcgctcgatccaaggcgaaggcattaaacccgatgttgaagtgcatcaattaaaagtgagcgacattgataaagtattttcaattaaagaggccgatttagctggccacatcagcaatccgaccatcaaaccgagcgatgataaaaaaccagatgccgccgccaaagaaccgcccatcaaacaaatgattgataccgacggcaaacctttggttgaaaccgactaccagctctatgaaggcttaaatctgttgaaaggcatgtcgattgttgcccagcggctagagaaaaagaaataaccgcccaacgcgagggaaaaaccccctcacttcatagttaatttggctatttattttaagcccgctacaagttaccttgagcgggtcttttttgccgcgcatttctgcaaggaatccccaccatgtcacccaaagccctcattttattagcccccggttttgaagatctcgaagccgttaccctcatcgatttattacgccgcgctaaattccaagtatcggtattcagcctgcgcgacgatgaagccaccggttcacggggcacccgcatccacaccgaaggcaacctagccttgctggataaacaaaccccattcgatttaattgtgctacccggcggccagcccggcagcgataaccttgccgccgatgcccgcgtgctggcactgctaaaaacccaagctgccgccggccgctttgtcgccgcgatgtgtgctgcgcccaaagtgctcgccaaagccggtttaacccaaggcaagcgcatcacccactaccccggcgcacttaccccacaagagcaacaaggcgccatagtcaccggcaaccccgttgaagtagatggcaagctcatcaccggccgcagcccaggcaccgcaatggattttgcgttaacgctgatcgagcacattgccggcgcggcgcagcgccaagaagttgaagccggactggtgcgataaccccccaaacccatgccaaaaaacgcggcaaagcgggatgatgccatctatcacgcaggcacccggcaagcgttgtaagcgcgccgcaatgcgggttgtgagcctcgaaagcagcggtcgcacgaggctgattttaaaaaaatcggtaaaaacgagaagacccgcacaaggcgggtcggattcgatacatttaagatcgtttattgtaacaacggctctcaccccggattgcaacaactcggcaatcctaactcaaaaggacaagacatggaacacgcgcagcttaatttttcttacgcactcggcctcgatattggcatggcctcggttggtgcagccattttggccgatgaccacattcatgccctgcatgtgcgcaccttcgacaaggccgaaaccgccaaggaaggcgagtcgctcaacctgattcgccgtgaagcccgcctgacccgccgccgtattcgccgccgcgccttccgcctgctgcgcctacgccgcctgttcaagcggatcgggctgattgccagccatgacaccgcagactttattgatgccgcctcaccttggaattggcgcgccgaagggctggagcgcaaactcgaacccaccgaatgggcggcggtgctctaccacctcgtcaagcaccggggctttcaatccaatcgcaaaagcgaagtcgccgaggatgaaaaagccgggcaaatgttatccggcgtttcggccaaccaggtgcgcatgaaagcaggcggctggcgcaccatgggggaaatggcggcgcgtgatgacgagtttgcccatgccaaacgcaacaagggcggagcctatacgcacacctttgcccgagccgaccttgaagacgaattgcgcgagctttttgccgcgcaacgccagcatgccaacgcccacagcgcgcccgagtttgaagccgccgtgcatgagcttctcatggcgcgcaaacccacgctttctggtgaaaacctgctcaaaatggtcggcaaatgcacctttgagccgagcgaataccgcgcccccaaagccagccacaccgccgaacgctttgtctggctcacccgcctcaacaacacccgcattaccgggctgggcatcactcgttcactatccgatgatgagcggctcgccttaattaacctgcccttcacccaagccaagctcacctacaaacaagcgcgcaaagcggcaaacttggcggagcaagagcgatttatcgggttggcctatcgtgccgacaaagaccccgaaagcgcggtgctgttcgaggccaaagccttttacaaactgcgcaaagcctatgaagatgcggggctgaaaaccgaatgggcgcgtgatgcggtcaaccccgaacgcttggacaccctcgccttcgcgcaaaccgcctacaaagacgaccgcgaagcgcgggagtttctcgcaaaacaaagcgttgaacccgccattatcgaggccgtattgcatgtgagctttagcgactttgtgcgcttatccctcaaagccctgcgcaaaattatcccgcacatgaacgcgggaatgcgttacgacgaagccgtgctggccgcaggctatgcgcaccacagcgatttgaaccaagcagtcaccaaaacccgccgcattccgcgcatcaataaagaggattttcccaaccccgtcgtctaccgcgccctcaatcaggcgcgcaagctcgtgaatgccattattgatgaatatgggccaccggcacgggtgcatatcgaactggcgcgggatttaagcaagccgtgggatgagcgcaagcaaatcgaacgcgaccaaaaaaccttccgcgacaacaaagaaaaaaatgccgacaaattccgcgaactgttcggccaagcccccaaaaaagaccagctcgacaaactgcggctgtatgacgagcaggatggcaaatgcgcctacagcctcaccccgctcgatttaaggcggctggatgaaaatggctatgtcgaaatcgaccatgccctgccgtattcgcgcagctttgacaacggcatgaataacaaggccttggtactgacccacatcaaccgcgacaaaggcaaccaaacaccctacgagtacttgggcggcgcgcacgatgacccgcgctggcacgcctttgaaattgcggtgcgcagcaacaaaaaaatccgccaagccaagcgcgaccgcctgctgcgcaaagactttagcgaaaccgaggcaacgggctttcgcgagcgcaacttaaccgacacccggtacatcgcccgcgccttcaaaaccctggtcgaaacgcatttgcaactgagcgatgattcagcggccaagcgttgtgtggtggtatccgggcaactcaccgcctttttgcgcgcccgctggggcttgctcaaagtgcgcgccgatggcgacttgcaccacgcgctggatgccgccgtggtcgccgcagccagtcacagcatggtcaagcggctttcggatcacagccgccacaacgaactggcagaagtgcgcagccagttcgttgatccggtaaccggcgaagttgctgacattaatgccctgcgccaactagaagcacactttcccagcccgtggccgcattttcgccatgaattaatggcttggctcaaccccaaccccgccttgcagctcgaacatctgcccgattaccccaagcaatacctgcggtttgcccaccccgtgcgtgtctcccgcgccccactgcgccgtggactggggcaggcgcaccaagaaaccatacgctcggccaagcggctagacgaaggtttaagctcagtcaaaacgtcgctggaaaatctcaagctcaaagacatcgagcgcattgtcggctgggacgacccgcgcaatgaaaagctgattgccgccattagccagcgcctgcaaacgcacggcgacgatggcaaaaaagccttcaaggagccgttgtacaaacccagcaagccgggcaaagtcgcccccatcgtgcgcagcgtcaacctgacggacacccaaaaaagcggcctacccgtgcgcggcggcattgccaacaatggcagcatgttgcgggtggatatttttaccgatggcaaaaagttttacgccatgccactgtatgtcgcggatgcagtcaagccggaactgccaaatcgggcggttgtcgcctttaagccggaagatgaatggacggttatggaagccgacaaaggctaccgttttctgtttagcctgcatccgaatgattgggtgcgtatacaacagaaaggcaaacccttgctggaagggtatttttccggactagaccgtgcaacaggaaacatttctttttgggcgcatgaccgtaatcaatccgttggaaaagaggggctgattcgcggcatcggcatcaaaaccgccctgtccgtcgaaaaactccacgtcgatatgcttgggcgtttgtaccctgccaagccggaaagcacggtgcgcatcccgctggaagatatttccgtgttggttatcgaccaaccgcaagtgctgctcaccgccagcctgctctccgcctgcgcgagcgcgcaaattgccgtgataacagtggggggcgatcatcacccaaacggcgtattgttgccgcacctgccgcacagccgcgccctaaaaattattcgcgcccagctggccttaaccctgccgcgcaaaaagcgcctttggcaaatcattgtgcagcgcaagttacacaatcaagccgacctgctcgatcaactgagccatgcccgtgccgcccttacgctaaacaacttggcgcagcgagtgcgctcgggcgatgcggataatgccgaggcgcatggcgcccaagtgtatttcaaagccgtgtttggccaagggtttagccgcgcgcaaatccgctggcacaacgccgccctcaactacggttatagcgtggtgcgctcaaccttagcgcgtaatttagtcgcgtatggctttatcaccgcccttggcctgcatcacagcagcgaacaaaatgcgtttaatttagccgacgatttaatcgagccgtttcgccccctgattgatgcgcatgtgctgggcttaatcgccgcgccgggtgaagcacagggtgccgagccgccgccagaattaagccgcaacgataaagcccatatggtgcaaattttgcacgaagatattcggctgcaccggggcgatgcccccagcgttattgaacacttcagcgtactggccgcgtgcgaacaactggtcattagtttaagccagcggttatttgatgaaaacttaacccttgatttacccgcgcgcgccgtaaaaaaacccaccgaggacggggatcatgagcaatgaaacccgccgttttatgcgcttaatggtgttttttgatttaccaaccctcacccgcgaagacaaacgcgcctataccctgtttcggcgctttttaattcaagatggttatgacatgctgcaatggtcggtgtatgggcgcatcaccaatggcacggccgatttagaaacgcatctcaagcggctaacagaaaacctccccgaaaagggctcggtgcgctgcctacaaattagcgaaaaacaatatgcgcaaatgcgcctactcgtagcaaaaaattatcaaaaaaaacccgccaacggcaagccggaagcgggtttaggggtagggaattgtagcaatccggggtgagagtgggagctacaacgtcacgaggtgaaagggtacatgcaagaagattgtagcaatccggggtgagagtgggagctacaaccaatacggttaatgtagtgccgctgatagcattgtagcaatccggggtgagagtgggagctacaacagggcgttacatattgcaagcattgcaagcattgtagcaatccggggtgagagtgggagctacaacacttggtgaacaggttgacgcggctgcggcattgtagcaatccggggtgagagtgggagctacaaccgacttgctgttgagcatcgacaaggccgtattgtagcaatccggggtgagagtgggagctacaacgagaaagacaaggtatatcgcctgcttcgtattgtagcaatccggggtgagagtgggagctac

SEQ ID NO: 2918 - DNA, 13758 bp, synthetic construct
  source 1..13758: mol_type = other DNA
  misc_feature 1..13758: note = Synthetic
atcattcaaaaatacgcgcacatagttgaccgccacaaaaaaatcatcgggacgcgtttacgaagtccaaataaccaattattagaggtgcccttcagagcagcgcgctcgaagaaacagtgataccccgcgcgcagcggactgttattaaggggatgacaactggcctccattcttctcattcgtgacgcacgggcgactgcccgcgactgctcacgcgaggtgtttggcatctgctatttcaatccaattgttttcggcaaagagaaagcccaacaggtttccccactgggctttcggatacagaatctttcgattctttattgtagcaacggctctcaccccggatgaactactacaacggtttcattatcacggagaataccatgtcaggcaagcagaaaaatttgggcgcactcactttcggattagacattggcattgcctcggttggctgggcggtgctgggcgaaaaccgcattattaatttgggtgtgcgttgcttcgacaaggctgaaaccgcaaaagaaggcgaatcactcaaccttgcgcgacgctcagcgcgcctgttgcgccgccgtttgcggcgtagagcgtggcggttcaccaagctggcacgattgcttaaacgcgaagggctaattgcggatgcgaacctgttcaaactcaaaatcgagaagaacacccctgttccaaaatcatcttggcaattgcgcgttgatgcgattgaccgtcaactgagcgccgaagaatgggcgcgcgtgatctatcacctgtgcaagcatcgcggcttccactggatcagccgtgctgaagaaaaagcggcggagggtgacaagggcgaaggcggcaaggtcaagcaagggctcgctggtacgaaaaaattaatggcagaaaaaagctaccgcaccgcagccgaaatggtgctgaaggaatttcctgatgcgcagcgcaacaagcaaggtgactacagcaaagcattgtcccgcatcttgctcggtgacgaactcaagaaactgtttgaacaccagcgcgaactcagtaacccgcttgccaccgcccaacttgaagccgccattctcggcaacggcgaccgcaagagcggcttgttctgggcgcaaaatcctacactaacgggtgataagttgctagaaatgctcggatactgcacctttgaaaagaacgaacaccgcgcacccaaagccagctttaccgctgaacgccatgtctggctaactaagctcaacaacctacgcatcgtggtggacggcacaactcgcggggtaaatgaagtggagcgtcgcctcgcgctgcccatgccgtatcagcaagctggcgacttaacttacaaacaactacgcgccgcgttaaccaaagcaggatttcttcctgaatcattccgctttactggcctatcgtatgccagcgggccaaaagccgatgaaaaagccaaagacccggaatccggggtgttatccaaacttccggcttggcatgaactgcgcaaaatacttaaagatgcgggcttagaaagcgaatggcaaaaaatctctaccgacgcactggagggcaaaccagaactgctcgaccaaatcgcctgggtgttgagcgtttacaaagaggatagcgaagtaatccccgagctacgcaaattatccttgcccaatgccgaaaagatgatcgatgcactgctcgatattcgtttcgacaaattcagcaacctctcgatcaaggcactgcgccagatcgtgccgttcatggagcaaggccaacgttacgacgaagccgtcgccaacatccctgaatacgggcatcacagccagttacacatagtcggtgcgggcgaacataaatacctgccgccgttctattcagggcgcgacaaagacgggcgcatggtattcaacgacgacatggacattccgcgcaaccccgtggtgctgcgggcactcaatcaagcgcgcaaggtggtaaacgcgctcatcaaggaatacggttcgccgcatgaggtgcatatcgaaatggcacgcgatttgtcgcgcccgctcgatgaacggcgcgatatagagaaactgcaaaaagaattccgcgataacaacgaaaaaggtaaagcccaattcgcccaagacttcaacatcgtcggagccgttcaaggtaaagagttcgagaaatatcaactctatcgcgaacagcaaggcaagtgcgcttacacaatcgagccgattgatctgcaccgtttgtttgaaacaggctatgtggaaatcgaccatgccctgccctactcgcgcagcttcgacgacagcaaaaacaaccgcgttttggtctttgcaagcgagaaccgtaacaaggccaatcgcacgcctttcgaatatcttgatggaaaatttgacagtccgcagtggcggtcattcgttggttttgttgaaggcaataaagcctatcgcctcgccaaacgtagccgcttattgcgcaaggattttggcgaaaaagaatcaaaagaattccgcgaacgcaacctcaatgacacccgttacatctgcaaatttttcaagaattatgtcgaacaacatctgcaactgcatgaagacagcgaagccaaacgctgcgtggtactcagtggccagatgacctcgttcctgcgcgcccgctggggcttgatcaaagtgcgctctgactccgaccgccaccatgcactggatgccaccgttgtcgcggcgtgcggtcacggcatggtgaaacgcttgtcggattattcgcgccgcaaagagatgcggcaaatgcgtgaagggtttgtcgatgtcaccacgggcgagatacccaaccccacgatgttcgatcaactagaacaacatttccccaagccttgggaaaatttccgcaacgagctcgaagcgcgattgaagattgacgacctcgcattactgcgcgaagaaatacaacgcctcggcacttattcagaggaggcattgcagtcagtgcatccgttgttcgtctcacgcgcaccgcaacgacgcaacagcggggcagcgcacaaagacaccatctacgcgcaacctgagcgatttgtcgcgcaaggcggagtcacgcagaaagtggctctctccagcttgacattgaaagacttcgataagctgatcgacccacaccgcaacgaaaaactctacgctgccatccgcacgcgccttgagcaacacggtggcaaaggtgacaaggcattcccagccagcaacccactgcacaaacctgatcgcgaaggtaatccgaccggcccgattgtgcgcggtgtaacaatggtgatcgacaagctttccggcattcctattcgcggcggtatcgccaagaacgacagcatggtaagggttgatgtgttcaccaaagctaacaagttccatctcgtgcctgtgtatgtgcatcactctgtagcgaaggaattgccgaatcgtgcgattgtggcattcaaggatgaagatgaatggacactgattgatgacagttttcaattctgcttctcaatgtacccgaatgatctgcttcgagtgaaactaaaaaacgtatcccacctcgggtactacgcaagctgcaatcgctcgacaggagcaattaacctttggtcgcatgaccgcaaccaacatgttggaaaagatggaatggtcgaaagcattggcgttaaaacggcgctaagcgtcgagaaatttaacgtcgatgtactcggcaaccgttaccccgccccgccggagaaacgtcgtgacctggcgtagcgtcgtcatctcgcgccccgccaagttacggcgcgagcaattccgccttgccatcgagcaggagcaaaccgcgctcgtaccgttcgaggacatcgcggtgattgtgctgaatcaccgcgaaatcacgctcacccatccggtgctgtctgcctgcggcgaatatggcatcagtctgtttgcaacgggcgatacgcatcatccaagcggtgtattcctacccttcctgtcacactcgcgcgccacgcgctggatgcgattgcaactcgatttgccgcgcccagtcgccaagcaaacatgggcaaccatcgtgcgccagaaaattgccaaccaagccgcctgcttaaaactcgtggggcgtgaaggtactgatcggatggactcttacgtacggcgtgtgcgctctggcgatgtcggcaatcttgaggggcaagccgccgcattttatttcgtgcaactgttcggcaaaggctttcaccgtgaacaggcgcgctttgccaatgccgcgctggattacggctacgcggtgttgcgcggcacgattgcaaggggcttggtcgcacatggcctgctgccttccctcggcatctttcacgcgagcgaacagaacgcattcaacctcgccgatgatgtgatcgaaccttttcgcccagtggtggatttatttgtggcgaagcacatgtcgctggctggcgacgagttaaatccacaagacaaagtatccttagtcggactactcaatgtggatgtggggatgccgcgcggcaagatgtcagtactatccgccattgagcaaaccatcgagagcttggcacgcatctacgacggcggcagcgaatcgttgctggaactgcccaccctcatcggactggaacagcaccgactggagtgctgaaatgagcgaggagacacgacggtttatgcgactacttgtgctcttcgaccttcccgttgtcaccaaggccgagcgccgcgcctacaccctgtttcgccgcttcctacttaacgacggctacgatatgattcagttctcggtgtatggccgcatcgtgaatggcaatgacgcgctggaaaaacacatgaaacggctggtgaacagcctgccaccagagggttcagtgcgctgcctgaccgtcaccgaaaagcaatatgccagtatgaaactcttggttggcctgccactttttcaggaaaaagcactcaaggtcaaccaaatgctgctgttttaaacccaaatttttcaaacagaacgcccaccagattgaggtctggcgggcgtttgcgtgaggcgtagtgtagttcatccggggtgagagagggagctacaacattctgcgagttgattatctggtgcatgttagtgtagttcatccggggtgagagagggagctacaaccttgataggagtcgcccagacgcgtcaaacagtgtagttcatccggggtgagagagggagctacaacgggatggtgagcctagacggagctggaacgagtgtagttcatccggggtgagagagggagctacaaccgcatcagcttgtgaagggtctttgagtttagtgtagttcatccggggtgagagagggagctacaaccacttttttgtatgcgtcaccgtgaaggcgagtgtagttcatccggggtgagagagggagctacaacttgttgtgaatgttattcttcctgcacttcagtgtagttcatccggggtgagagagggagctacaacctgctcgttagcgttctttcgtcctgtgccagtgtagttcatccggggtgagagagggagctacaactaagaagctcacgccccgcaagggggcatcacttcttagtcgcgctccgcgcggtttagcagaataaggtctgtccacggacagaatatcgctgcataaaatacgtttcactattgcagacagtcaccactgactggaattggcacattgcagaagcatgtgaaagttccggcgaccatccgcaaaagcagaggaagaggaagagactttcctgactattagtatgatgctgccggatgcccttgatattgaattattcgagagccgcccctcggattttggcgcacttactgaacgattgttttgcggaacaatgctgcgacttgtttctgcggcttgttcggcgcgggagcggcgggcttttcctcgatgggctttacgctgatcgacggttcgtagggtttcgacagccaatcatccgccggtgcaggcttgtgatgattgccatgactccggggcggggtgggtttgagtggcttatggtaactggcgcccgatgcggaagaagtcgttaccgccggttcacgcgggaactgccggttcaatagtttttcaatttcgaccagcttgcgctcttccgtgccgtctatcaatgatacggcttcgcccgaggcgcctgcgcgtcccgttcgtccgatgcgatgcacataatcttcggcatgcgtcggcagctcgaaattgatgaccagcggaagctggtcgatgtcgagaccgcgcgccgccacatcggtcgccaccagcgccagaatcgtacccgccttgaacgcttccaaagcttttaggcgctcctgctgcgtcttgtcgccgtggatagcatcggcagcaatgccgctgcgttccagttgtttggtgacatgtgctgcgctcaatttggtgcgggtgaagatcaatacctgcttgacgccgcgcgcgcgaatcagctctaccaaagcatgaaatttgtcgtgttgctcgaccatgcacacggactgcttgatgttctcccctgccgcgttgcgccgcgcagtttcaaccgtgaccggatcgacgaggaaatcttgcgcgagctttttgatgtcttcggagaatgtggcggaaaacagcaacgtctgccgctgcttgggcaacagcgcgagaatgcgcttgaggtcgggcatgaagcccatatccagcatgcggtcggcctcgtccagaatgagtatttgcacttggttgagttgcaggttgcgactctccacgtgatccagcaatcttccgggagtcgcgaccaatatctccacgccgttcatcagcgcaggtttttgcgccttgatgtcggtgccgccgtaaaccaccgtagtgcgcaacggcacatgcttggagtaggtgaccacgctctcgtgaacctgtatcgccagctcccgcgtcggcgctaggaccaatgcgcgaatggggtggcgggcgggcgaggcactggtgctggcgtgcggcagcaggcgttgcaacatcggcaaagtaaatgcggctgttttgccggtaccggtctgcgccatcgccatcaaatcgcggcccgctatgacatgcgggatagcttgtgcctgtatcggtgtcggctcggtgtaacccgtttcctcgatggcgcgcagaatctgcggatcgagtgcgagcgaggaaaaaaggagttttgttgctgaggattcgtccataagtctgggcattatactggattaagcccataaggcaggaatagcgaaagtgatgtcttcggcatcgtgtaatattataaatatcgagaaattttagtggggctgttacggaaaaatgacgatttgcatgcaacaacaaataaaatttggactccgcactttggcatttttagctgcttttggtgcgcatttttctatttttgcgggcgaggcgtctaccataagtgtgtccacagagggcccgaacagctccacccaacagcctatcaatttcccctcaatggaatctgctatagccgaaatcaagcaattgaatgagcgcattagccatatagagtccggctatgaaaaagaatttgcgcaagccagaaaactggtggctcaggaatatacggcgaagttcgaagcgctggcagatgaaattagcgcattgcgtgacgactctgaatcgttggcggatttcgacctgcggcgcgaaaaaaagagggcggaaatcaattttcaacgcaaagcggatttgttgcgcctttcgcctgccgttctcgcagctgcagaaaccgcccctctgcacgcgcgcattgacaccctggaacagcacgaatatgtatttggccccgagagcgtagaggtagagctaggtgaatacgataccaagcaacagcagtattcagtttttgcgcaaagcaaaaacccatttttccgcctgagattaaagggaagcattccgctcacgcccgcagaagcagagaccttcctgaaacattggaaagcgggacttgtgcatgctgaagtcaaaacgaaaattatcagcgagacaccagatttggcctttgtaaatcaagctgacaatagctactttacattttctgacggtgcatttatgactgccgctgccagacaggagctgatggaaagaaaatatcggcctgtaatgattacccttcccgcaggcaatttcgacatgggctcaaaagaaaatatgcctgtccaccgcgtcacttttaaacatagttttgccatcagcaaaacagaggtcacgcaggaacagtggcgtgcggtgatgggcaatacctcggttctttcggatagctgcggcaagaactgcccagtggagaaagtcagctggaatgatgcccaaatttttatccaaaaactcaacgctaaaaccggcagaacatatcgcctgccaagcgaagccgaatgggaatacgcttgccgcgccggaaaaaagcaggaattctgtggcagcgacaatgcagacagcgtggcatggtatggggagaacagcggcagtacggttcatcctgttgccaccaaacaggccaatgcctttgggctgcatgacatgagcggcaatgccttagaatgggtagaagacagctatcaccacgactacagaggtgcccctaccaatggagatgcgtggcaaggtgatggctcaatgcgggtagtacgcggcggctctcgcagtgacggggtgctgagtgtccgtgcgaccacacgggatagcttcgagcccgagtatcgtttcgtcggtttcggttttcgactcgccatgacacttccatagcagtgttttgaagtttaaatttatcccatgcctgagctacccgaagtcgaaaccactttgcgcggtttgtccccgcatctgacgggacaaaccgttgcagatgtcatcgtccgcaatgcgcaactgcgctggccgatcccacaaaatttgggtgagttgctgcgcggccagactgtacgcaacttgcaacgccgcgcgaaatatctgctcatcggattcgatcacggcacgctcatcctgcatctcggcatgtccggaagtttacgcatgctcaccacaaccatcgcagccgaaaagcacgagcacttcgatctgatattgacgaacggaaacctcatgcgcctgcgcgacccgcgccgttttggagcggtattgtggcatagcggcaaggtaagcgaacacccgctgctcgccaagctcggccccgaaccattgcatgacgaattcgacactgaacatttatttcgtgccacacgcaatcgcagtgcggcgatcaagttgctcatcatggatagccaagtggtggttggtgtgggcaacatctacgccaacgaggcactatttcgcgcgggcatcaaaccgcaactcgctgcaggaaagctcagccgcgcccgttgtgaaaaactggtcgccgagattcgcgcaacgctaaacgaggctatcaccctcggcggcagcagtctgcgcgactatgtcgatagcgatggaaaacagggctattttcaacagcactattgggtatatggcagagcgaacgagggatgcaggaagtgcggcagcagcgtcaagcagatcaaacaaggacaacgctccagcttttattgcccggcctgccagcgctgaaaacgcttacgccaagaaaataaattctgctatattggcgcaaacgccaatatttaatcagcgcttcttaactcaggagatcatcatgcaaaaactcgtcttcgctccggtttcatgtgtattgcttgctgtcatttctgccatgcccgcttttgcggaagatgcgtcgtccattttcgcttccccttgcgccgagtggaaacccacagtggcaattgacatggaagcgctggacaaactcaagaaatctgccgcgagcgaaaaaccagccagcgggcagtcgtacaccaagaatcaattcgtcgttttgctcgggaaaaatccggtcgccgccaaggatgcactggccaattacaaagataaattacccaagacacgggagggcaaggtcgatttgagggatgtgacgcttaacggcttcaatttaaccggctttaatctggacaacgtggatttcaaagatgcggaaatgaccagcgtgaatctctccggctccacgctgcgcggagcggcactgcacaaaaccactctcaacaacgccaatctcaacaacgccaatctttccttcgcgaatgtttcgggagcaaagctcgccaatgccagcctgtgcaacgccacactgacatccgtcgaatttgaagatgcggtcttgaaaggggcttatttgaaagatgccaagctcgatatggccaaaaaccttcccaaaataatctacttaaatgccgaaaacttgctgcatttcggactacccgttcctgaaaactaatcccggcatcccaaaaaaagcgggagtcactcccgctttttttgggtcacgccaaaaactcatcctagaagcaacgggggctccgctctggtcaatgccagcaaggcctcgaactcatccgccggaatcgccttcgaaaataagaaaccttgcgcataatcgcatcctgcgcgcgccagaatatcgcgctgatcctccgtctccacgccttcggcgatgactttcaatccgagcttgtgcgccatgacgataatggcttcgcacagcgcaagatcgtcgctgtcgttttccagattgctgacgaaggattggtcgatcttgagatagtcgatgtcgaatttcttgagataagccagagaggaatagcccgtgccgaagtcgtcgatcgaaatttgtacgcccgcgtcgcggaaggcgagcaaacggtctttgatatcaacctcggcattcaacagcaaaccctcggtgatttcgatggaaatactctgtccgtgcagcgacagcgcggccagatgcgccaaccaatcaggttcgctgccggcattgttctgacggaattgaaccggcgatttgttgacactgatttgaaacaaaggcgcatgcgtggcacgccagtgttttacctgacgcgcggtctcgtggaatacccaattgccgatttcattgatgagtccagactcttccgccagcggaatgaactgcgccgggctgaccatgccgtgttcgggatgctgccaacggataagtgcttccgccttatggatctcgcccgtcgccatttccacgatgggctggtaatacactcgaaactgattgtcggccaatgcgttgcgcagatcgctggtcaagcgcatacgcgtctgcgcggcctcctgcaatgcgggggtgaaatagctgcttcggttgcgcccttccttcttggcgacatacatggcttgatcggcgttcttgagcagcgtctcgatctctctcgcatcgccgggataaagcgtgatgccgatactggccgagacaaaaacgctctctttgcccagcgcgaatgattgcgtcaatttatcgatgattttctgcgcgatacggtcgacgctgccgatgtcttccagcacgggcaaaatgacggtgaactcatccccgcccagtcttgccaccgtatcggaatcgcgcacacattgcgcgatgcggcgtgcggcttccactaacaaaatgtctccctgatcgtgacccagcgtgtcgttcacttctttaaagtgatccagatcgatgaacatcagcgccagcggcaaattcgcgcgggctgacttctttatctcctgcgtcaggcgatcatggaacatgcggcgattgggcagattggtcagttcgtcaaaatttgcctgcctccaaatcaactcttccgtcgctttcttctgcgtaatgtcggagaacaatgcgacgtggcgatgtaccgagccgtccgcattgaagatggtattgatcgactgccattccgcatatatctcgccgttcttgcgccggttccacatctcgccttcccagtggccgctgtctttgatggcgtgcctcatggcctgatagaacgccggattctggcgccccgaattcaagaagctcggcgactttccccgcacctcttccaaaacgtaacccgtcgtacgggtgaatgcggggttgatatccaaaatccgattttcgccgtcggtgaccatcattccttcattgctgttctcgtacaccagcgcggcgagacgctgcttttcttccgccagcttttgctctgtaacatccattccagagcggagcgcaccgacaatttccccctcggcccccaacataaaactgttgcgccatgtgatcacacgcgagcttccatcacggcacaagatagtgttttcaaactcttcaacagactccatatgtccggccactatatggcgaaacacggacagcacagtgctcatgccctcaggctgaggtaggcaagtagcaaaccaatttcgcccgatcaactcatgttctgcgtaaccgagcagacttgcggcagtattgtttatcatggtgataatgccatcaacatccagcgcgactatcagcgccgacgaggcatcaaggaagtgctgattcagatcgcgttcctgacgcagcgcactttcagctgcttttctatccgtgatatcgacggttgcacaaatcaaatacagcggatttccagacgcatcatagatcggcttcttgagcgtaagacccagacgattttgtttgagagccgcattccagaacgtctcttcaaaatcgatcatatcgccgccagcgaatacctccctatccttggcgagaaaccattccatctgctcgggcggaaaaaactggctggcatcggttccgcgcaggtctgcgaaactcatgccccattgggcctcgcacgctttgttcatcaactggaatttgctcgcggcatctttgacaaaaatggccacgggcagcacgtcgatcaattcctgcatcaccttaacgtcttcaaatatttgcgactgcatgcccttgagccctatgtttgtcgacacggcagtagccctcagcgaacgccatgcgccagcaaatattttgccagcggtatatccgaataggggatgtgattgagcagccaatcctttatcgactgcaaggccagcaaatcaccgccctgcgtcagacgcgacttgaaattcaccgcctcgtccaccagatgcgcgtgctcctgatcgtgttgcgcttcaccggggtaagcatattgctccatcagacgatgctccgtcgcaaaatgaaatgccgtgaacgcgagcaactcgtcgtacagacctaggatggtgtcatcgccctctttgtttttgatcgcgccattgagacgattgaccatgcgcaccagttcgcgatgctgctcgtcgagctcgacgataccaacatgatgcgcgctgtcgaacacgatccaagcttcggcatcgctcactgcaaccggtgctccaccgaaataggtataggtattctttcccttgtgtttgctttcatacatcgcggcatcggcggcggccagcaggctgtccatctcgtcgccattgtcggggtaaacgctgattcccatgctcgcgcccaccgtgcattcctggccgtccggcaacacaagcgcctgcgcaaacgccttcaatacctgatccgcaattctctcgatctctgccgggctgtccaattcgcccacaatgatcgcgaactcgtcccctcccaaacgggcaaccgtatccaccgcacgcagacaggcaagcaagcgctgcgcgaccatcttcagcacggcatcgcctgactcatgcccatacatatcgttgatcggttta

SEQ ID NO: 2919 - DNA, 13737 bp, synthetic construct
  misc_feature 1..13737: note = Synthetic
  source 1..13737: mol_type = other DNA
cttgccggtggcgctgatcagactgttgcgcaacttgagaaagttgccggagacgttgtcggggtaatgtttcatggcgcagtcaaactacaaagcaaatgggagtgcaattttaccggaatggtagtgatttgctgaaaaatcaatcaaatgggtttatatttgagttaaaaatgaaaagcccagcatattgctatgctgggctggatacagaatcttacgattctttattgtagcaacggctctcaccccggataggctacaacgaggaaataataggggattttacgatgaacaacaataacaattttggtcaattgaccttcgggtttgatattggtattgcatctgttggctgggctgtactgaatgaacgccgggttgtggatttgggagtgcggtgctttgacaaagccgagacggccaaagagggtgagtcgctgaatctcgcaagacgcaccgcgcgtttgatgcgccgtcgtttacgtcgtagggcatggcgattgaccaaagtggcgcgtctccttaaaagacatggcctaattaacgatgtcacgatattcaagcctgaacatccgtttactgtttcattatgggagctgcgtaaacaagcattagatcgcacacttaatgcagaggaatgggcacgtgttatttaccatttatgtaaacaccgtggttttcattgggtcagtaaggcagaagagaaaaaagccgaggcagataccgcaggtgagagtggcaaggttaagcagggacttgcagcaacagctcggttaatgaaagaaaaaggttatcgaaccgctgccgagatggtgctggcagagtttccccaagcgcagcgcaataaacagggtgaatacagtaaggctttgagtcgagctttattgagcgaggaattctccatgttgtttgcagcgcagcgggcgatgaataatccctacgcaagttctgagttagaaatcaaactgctcgaccgcaaaacaggattattttgggcgcaaaaacctgcgctagcgggtgaagctttattgaaaatgcttggaaaatgtacgtttgagaaatccgaataccgagcacccaaagccagttttacagccgagcgtcatgtttggctgacccgacttaacaatttgcgggtggtgatggatggcattacccgcccactcaatgaggccgagcgccaatttactttgtcacttccatacaatcaggcaagtgatcttacctacaaacaactcaaagcagcgatggttaagcaaggcctctggccagaaactgcacgctttaccggattgagttatccgagcttgaatcaactcaaagagggcaaagccaaagacccagaaactgccacactgataaaaatacccgcctttcaagagttgcgaaaaactttaaaagacgcaggtttggaaacggaatggcaaggcatggtgaacgctgccatgtcgggggatgccagtttgcttgatcaaatcgcatgggtgctcagcatctataaagatgatgaagaagtagaacgggagttgaaagcactgaatttacctagcaaaaccaacatggttgaggtcttgcaaggtatacgctttgacaaattcagcaatttgtcgcttaaggctttacgcaaaattgtcccgcatatggagcgcggcttacgctatgacgaggcttgcattgaggctgggtatcaccatagtcaactaatcaagccggacgatgaaaaactgcactatctgccgccgttttatagcgcgcgtgataaaacaggcaagctgattttcaatgaaaatattgacgtgccgcgtaacccagtggtacttcgagcgcttaatcaagcgcgaaaagtcatgaacgcgttgattaaaaaatacggctctccgcatcaggtcaatattgaaatggcacgtgatttatctaggccactcgatgagcgccgtaagattaaagatgctcaggaagattttcgtgaccgcaataaaattgctcgcgataaattcaatgaaaccttcaatgcatctggtgacttgaaaggtcgtgacttcgagaagtggcagttgtacgaggaacaagagtgtaaatgcgcctattcgcgtgagactttggacatacaccggttatttgaaatgggctatgtagaaattgaccatgcattgccgtattcccgcagctttgatgacagcaaaaataatcgtgtgttggtattggcgcgcgaaaaccgcaataaaggcaaccagactccttacgaatatctggatggcaaaaacaatagtgagcgctggcatcagtttgaagtgtctgtcaacagcaataaagcttaccgccaagccaagcgcagtaggctgctgcgcaaagagttcggtaaagaagattctgctgagtttcgcgacagaaatctcaacgacacgcgctacatttgccgttttttcaaaaactatgtcgagcaattcttgcaattagctgacaccagtgaagcaaagcgatgcgtggtattgagcggacaaatgaccgcctttttacgtgcacgatggggtttaaccaaagtccgcgccgatagtgaccgccatcatgcgttggatgcggccgtggtggctgcgtgcagtcatggcatggtgaagcgattgtccgattattcacggcgcaaagagctagaaaaagttagcgaaggctttgtcgatgtgacgacgggtgagattgctaatcctgccatgtatcagcaattgaaagaacacttcccagacccatggccacatttcaggcaagagttggaggcaaggcgattggtggatgattggctattgatgaaagccgaactggcgaatctaggcacttattcagaagatgagttggaaagcgtcaagcctttgtttgtctctcgtgcgccgcaacggcgaaacagtggggcagcacataaggaaaccatttacgggcagaccgagcgtttgaggaaaatggggagcgtgacacaaaaagtcgttgtgacgaatttatcactcaaagacttaggtgaagttattgatggtgagcgcgttaattgcaagctgattgatccgcatcgcaatgaaaaactctacgccgcaatagcaatttggctgcaaggtaaagatgaacgagaaaagcgcgcgaaagagatcgaagctagtgctggccgcggtaaagaaaaacgagcgctcaccatggatgaaagggctgagattgaacgcttgagggcgttgccgcgtaaacccatgaacgatggctcagctggccccatagtgcgcactgtcacgatggtgattgacaagctatctggtatttccattcgtcatggtgttgccaaaaatgacaccatgctacgggtggatgtgtttaccaaagccaataaatttcacttggtgcctgtgtatgtgcatcatgcggtggctaaaacattacctgatagagcggttgtggcatttaaagatgaggatgagtggacgctgattgacgagagttttgatttttgtttttccttgtatccaaatgactttgtgaaagttactttgaaatctgaaatccaaactggctactactctggatgtgatagagcgactggggcaattaatgtatgggcgcaagatagaaatgcttctgttggtaaaagtggtttgattcgcggcattggcgttaaaactgctttagcagtagaaaaatttaacgttgatgtccttggcaatatttatcccgtattgaaagaagagcgacgtggtctggcgtagcgtcgttatctctcaaccagctaagctcaagcgcgagcatttttcgcttgtcatcgagcagcagcaatctgcccgtgtaccgtttgaagatattgcggtgattgtgttgaataatcgtgaaatcacgattacgcatccagtgctatctgcttgtggtgaatatggtatcgggctttattccaccggcgataaccaccagccaaatggcgtgtttgtgccatttttaagccatagtcgcgctacgcgcatgatgcgtttacaactggatattgataagccgcaagccaagcgggcatgggctgagattgtcaaagtaaaaatcagcaatcaggcgaaatgcttaaagttagttaagcgtggtgatattgagcggcttgagtcttatgctagtcgtgtacggtctggggaccctgaaaatatggaggcacaggccagtagctattactttccacagatattcggtactggttttcatcgtgctaaagattgttgggttaatgctgcgctggattacggctacgcgattattcgtggcgccatcacgcgtgctctggtagcgcatggttttcagcccaacatcgggttgtttcatcgtagcgagcaaaacgctttcaatctggctgatgatttgattgagccttaccgtgccttggtagatttacacgtattccaacacattaacccacatgcattgccagaagttgatttagcacctgctgataaagtggcgttagtagggttgctcaatgtcgatgtacaaatgccgcgcggcaatatgagtgtgctttctagcattgagcaagccactgaatctctagtccgtctgtttgatggcgctaatgaaagtgttttagagttgcccgtcttaataggcttgcgtcagcatggctttgaaatgtaagccatgagcgcggagacacgacgatatatgcgcatgctcgtgttttttgatctgcctgtagtcactaaagccgagcgcagggcttataccgtgtttcgtcgttatttgctgaatgatggcttcgatatgattcagttttctgtatatggtcgtatcttgaatggacgtgatgcagaagaaaagcatatgcagcgtttagtatccaatctcccctctgatggttcagtccgtgtgttaaccgtgacagaaaaacaatatgcgagcatgaagttgttggttggcctaccacttttccaggaaaaagccattaaggccaaccagatgattctcttttagtggttttttgaaaataaaaagccccgcccagttttgctggttggggcttaggtgagagcctattgtagtttatccggggtgagagagggagctacaacgattggcttgttgggggctgcatggctactattgtagtttatccggggtgagagagggagctacaactgtctcccatgcttttcctgctacagcagtattgtagtttatccggggtgagagagggagctacaacgctccgctgctgctggggatagcagcagctattgtagtttatccggggtgagagagggagctacaactcactggatgcagacacactttgcattttcattgtagtttatccggggtgagagagggagctacaacagtgctggggcgattggtaaatacttaaccattgtagtttatccggggtgagagagggagctacaaccctcctgataatcacctttgccctgggcttattgtagtttatccggggtgagagagggagctacaacctctgtcggcgctccatcaggttcctgttcattgtagtttatccggggtgagagagggagctacaactcgcgcaattcagcagcttgccggtcaattattgtagtttatccggggtgagagagggagctacaacttctgttttgcaggtaaatcaagggggttcattgtagtttatccggggtgagagagggagctacaactcaatatgctctggattgtttttatcgaatattgtagtttatccggggtgagagagggagctacaactgcttaccgttcatcaatctttggcgatgtattgtagtttatccggggtgagagagggagctacaaccaccgcggcttcgctcggccggcgtaccgtattgtagtttatccggggtgagagagggagctacaaccggaagctttcgctgaaattggcacgcctaattgtagtttatccggggtgagagagggagctacaacttccgataatcagaggctagtctgtgttttattgtagtttatccggggtgagagagggagctacaacgccatggccttccaccaccgccaactctatattgtagtttatccggggtgagagagggagctacaactcttcagtcatgattcactccttgatggttattgtagtttatccggggtgagagagggagctacaacacttccttggtgttcggctccgggtcgaacattgtagtttatccggggtgagagagggagctacaaccctgaacgataaatggtgaagggttctccaattgtagtttatccggggtgagagagggagctacaacggattgggcggcggcacagctaacgcccacattgtagtttatccggggtgagagagggagctacaacctcacctttgcgcttgacctcaccgtccgcattgtagtttatccggggtgagagagggagctacaacgttcatcgcatgaatcatcgtacaccgtggattgtagtttatccggggtgagagagggagctacaacagctgcacgtacaggccagtcgatgaattcattgtagtttatccggggtgagagagggagctacaactacaccacttacgcggaacaaacggccgttattgtagtttatccggggtgagagagggagctacaaccgaaagggcttgaaccaaccgccgtaactgattgtagtttatccggggtgagagagggagctacaaccgcttcggatggaatgttaaacctgtgaggattgtagtttatccggggtgagagagggagctacaacagccctcccgctggtactgatcggctgcagattgtagtttatccggggtgagagagggagctacaactcttcagatttcatgattcactccttgatgattgtagtttatccggggtgagagagggagctacaacctttcagttccgccatcaattccggcgtcaattgtagtttatccggggtgagagagggagctacaacttttctacttaccggatgcatgacgccccaattgtagtttatccggggtgagagagggagctacaaccggccacacctgggctgcgctgctctcggcattgtagtttatccggggtgagagagggagctacaacatatacacagcgttggatagcccatcgcctattgtagtttatccggggtgagagagggagctacaaccaacggcaccaagctaattgagcgagtatcattgtagtttatccggggtgagagagggagctacaacccgcatggcgggattacttagagggtttgcattgtagtttatccggggtgagagagggagctacaaccgcggttatggtgtagaactctgccgcgtgattgtagtttatccggggtgagagagggagctacaacctcgtatcggtcttatagcttgcccagaattgcgcagcagtatgctgtgtaattctgggccgatttttatgaggctcaaagattcagcgagcggccaccatcgacggcgatcacttgcccggtcatgaacggtgcgtcctggatcaggaagcggacggccttggcgacatcatcaccttcaccgatgcgtttcaacagggtctgcgagatgactctttttcgatacacttcatcgaactgggggttgtcttccggccacatgactggcccgggagccacggcgttgacgcggacatcgggtgccatctcgtgcgccagcgatttggtcagggtaacaagtccggccttggccacactgtagacgacgtagccttttttcgggcgttccacatgcatatccgtgatgttgacgatgcagcctctggtcttggccagttcggcagcggcggcctgtgacaggaacagcggcgctttcaggttggagccgatcaggtcttgccactggtcgtcgccgatgtcgcccagttcggtggcgtaatagctggaggcattgttgatcagcacgtcgagacggccgaaatgctgcacggtctcttgcaccagcttgggcagtacggccaggttgagcaggtcgccgtgaatgatggcgactgagttcggccgttgcaggttgagttcggcttgtagtgcgcgtgcttcggaggcagattgccggtagtggatcatcaatttggcgccaccggcgtgcagcatgcggcaaatggctgcgcccacgcgtttggcaccgccggtgatgaggatgactttattctcaaggctgttttctgtgctatcgctcacgctgaattccaatgaatgcctttaaatatcaaaaaatggcgctattaaaaaaacttgtcaaaaaaactggctagcttgccaagccattataatccgggtctatgaacgctaccttacctgccccggacgctgaagccatcgcgcacagcgaaatgctggcacaaaaaatcagaacggagattgccgggaaccagggctggatcgatttcgcccgctacatgcaacttgcattgtatgcgccggggctaggttattacagcggcggggcaaaaaagttcgggcatggcggggattttgtcacggcgccggagatctcgccgctgttcgcgcaatgtctggcaaggcaggcgacacaggtgctggaggctacgtcgggcgaccttctcgaactgggtgcaggtactggcagtcttgccgccgagctgttgcttgaactggagcggttgcaacgggtaccggggcgttacctgattctggaagtaagtgcttatttacgtgaggtgcagcaacagacgctggcggccaagttgtcgccagaacttttgagcagggtgcagtggttggatgccttgcctgagaatttcagcggcatgattctggccaatgaggtgctggatgccctgccggtgcatgtcgtcaagacttcggttggcgggccgttggaactgggtgtcgttgcgagtgagcagggctttgcctggacggagcggccgttggtcaacaaacaactgcaggccttgcttgccggactggatttgccgcctgattatgtgacggagctctgcccggcagccaacgggctggtgagcagtcttgcgcaggtgctggaaagcggggtcatgctgttcattgattacggcttcccgcggcgcgagtattaccatcctcaacgcaatcagggcaccctgatgtgccattaccggcatcatgcccatgatgacccttttctctatcccggtttgcaggacatcacggcgcatgttgatttcagcgctgtggcgcaggtggcacaggtgaatggcctggagttgaagggttattgcggccaagcgcagtttctcatcaactgcggcattacagagctgctaagtcgcgtttcaccgcacgacatggcgctttatgcgccacttgcatcacaggcacagaaactattgtcgccagccgagatgggtgagttgttcaaggtgatggcactgggcaagcgatgtgagcgttcgcttattggtttcatgcagggcgaccggtcgcatacgctctaacaggagcgttcgaagaaaccgccctgaacgactcaggtataatcgccgccttattattgagcgcagattatcatgtccgaaaaagacgagaccgcaaacgaggatttgaaacaccggccgatacgcagttttgtcctgcgtcaggggcgtttgacgcctgcccagcaacgtgcgatcgaaaccaatatgccgcgttttggcgttgcctacaaaccggagttgctggtactggatgccctgttcggccgtacagaaagctgcaagattctggagatcggattcggcatgggcgacagcacggcagccatcgccgcgaccaacccgcatatcgactatctgggtatcgaggtgcacggccctggtgtcggcaatctgctcaggctgatcgaggcatcacagctgaccaacctacggctggttcagcacgacgcagtggaagtgctgaacaacatgattgccgatggtgcgctggatggtgtgcatatctttttccccgacccttggcataaaaaacgccataacaagcgacgcttgattcagccggcgttcatcagcatgctgtgcagcaagctgaaagcgggcgcttacattcatgtggcgacagattggcaagagtatgcggaatgggtgctggaggtgctgagtgctgaaccgttgctggaaaacaccgcgaaggattatgccccgcgaccggattaccggccgctgaccaagttcgagaagcgcggcctgaatctaggccacggtgtctgggatcttatcttcatccgcaaataaccactggccgatgatcttttcggcctcttccacgccctgtttcttcaagctggaaaagagttgtaccgtgcaatttccccaagtctcgttcagttcctttttcactgcctgcagggtctgattggcagcgttgcgggagagcttgtcggacttggtcaacaaaacatgcacaggcttgccgctggggcagaaccagtccagcattttccggtccagcggtgtgagcggatggcggcagtccatgaccagcaccaggccgtgtaatgaggtgcggtaactgagataggcggacagcgtcatctgccagtgttcgcgcatggcttgcggcacttttgcataaccgtaacccggcaggtcgaccagaaagcgctcatcgcccagtgtgaaaaagttgatcagttcgtaacccggcaggtcgaccagaaagcgctcatcgcccagtgtgaaaaagttgatcagttgcgtgcgtccaggctgcttactgacataggcaagccggttgtggttggccagggtgttgagtgcgctggatttgccggcattggagcgccccgcgaacgcgacctcgatacccgcagggggaggcaggtcacgcaggttgtgcgcggaaatgtaaaagctggcattttgaaacaggggcatgagagataaacttataaagcgctgaagagtggaaaatgctatcacgatatgacgcttttcgataaaatagcgcgattattgttgtgtaaccattttgtatcaactgttgagtactgaggagtcgggtatgagtttccgtatatttgcggcatttgcgttaggtttgttcagtgccgtttctgccaacgctgctggtgatgcaggcaagggcgccacaattgctaatcaggtttgcctggcttgtcacggtgccgatggcaacagcatgattcccatgtacccgaaactggctggccagcatccagaatatattgccaagcaactgaaaaatttcaaatccggcgaacgcaagaatgcagtgatggccggtatggtcacaacgctgacaccgcaagatatggataacctcggtgcatactatgcaagccaggcacctaaaggcggtacagcccaatccaatggcaagggctccgcaggcgaaaaaatcttcaaatcagggatcgccggtatgggtgttccagcctgtgcatcctgtcacggtcctgccggtgctggcgtgccagtgcagtttccgcgttttgcaggccagcatgctgaatacactattgcgcagctgaagaccttccgctcgggtgaacgtgcaaatgatgcagccaagatgatgcgcatgatcgctggcaagatgagtgatgaagatatcgctgcagttgctgattacattcagggcttgcgttaagcaaacggatatcgatcaggttctggttaagggtggcgtttgccgcccttaactttatccggcgccaggaatttaaaccctgattatttaattctgccggtcaggcaactcatgggctggaagaatgtcctaaactccgattatcaaactcgactgaaacgatcaagccttgaagtcccatcaaaccacttccaaacgcatatatgaactgttgagctccatgcgcttcgctgtcagcttgctgaccgtgttgggtatagcttccattattggtaccgtgctcaagcagaacgagccctataccaattacatcgtgcaattcggccagttctggttcgagctctttgaagtgctgggtctttacgatgtttatcacagcgtctggtttctgctgatcctgctgttccttgttacttccaccagcctctgtgtttatcgtaactcccccaccatgctgcgcgagatgcgtgtctggcgcgaacatgccacggaaaaatcgctgcgcgctttcagtcatcagcacgaataccaggcgagcggcacggcggaagaagtcaagacgaagctcgcacgtttcctgacggcacgcggcttccgcttcaaaacggtacagcaaaaagacggtggcgaactgattgcagcaaaagcaggcagctaccaacgtctgggctatatatttacacacgtggccatcgtggtgatctgtgtgggcggcctgatagatggcaatgtgccattcaagattcaggagctgctgggctataagaaggtcgagacgctggatatcgctgcttcggaagtgccggctgaaagccgcttgtcaatcgcgaatctgtctttccgtgccaatatgaccctgccagaaggcactagtgccgatgttgctttcatgcgcatgcgcgatggctatctggtgcaggagctgccattccgggtagcgctgaaggattttcgtatcgaacactatgccaccggccagcccaaatcgttcgagagcgacctggtcatatccgaccctgacctggcggaaccgctggaagcgaccatcagtgttaacaagcctttaatctataaaggtatcgctatctaccaatccgattttcaggatggcggttccaacctggatttcaatctgtgggggctgttcagccaacagcagacaccgttgccggtcaagggtacgatccacaaggaagtgacgctgggcgaaggcgatgctgcgctgacgatagaatttgatgacttccgtaaattcaatatcctcaatctttcccctgatggcaaaggcaagccgcataacgtcggccccaatgtcacattcaaggtgcgcgatacgcagggtcaggcccgtgagtatgtgagttacatgcagccgctgaagctggatgatagacactatttcgtttccggcatgcggcctgatctgcaggcagagttcaagtatttgcgtatcccggtggatgaggattttgaaatcgagggcttcatgcgtttgcgcgcggtaatgatggacgaggcctcgcatgccgagatcgcccgtcgcctgtctgccagtgctttgacgggtgatgccgccagtaaggacatgaaagagaagtttgaatccagcgtgcggcaattgctggacgccttcggcaaaggcggttatacgcggattgccagcctgattgaagagtcggttccggaaaaagagcgcggcaatgcggcccaaacctatatcaaaatcatcaatggggctgcattcgaagcgcataatctggcgcgtgaacgtgccggcaagaccccatcagagcctgatgaacaaaccatgctgtttttgcaggacagccttaacagtctgagtgacctgtttttttatggcaccccgttctacctgcagttgaaggaatacgagcaccgcgaagcgagtggtctgcaactgacacgttctccgggcaaaaacctggtttataccggttctgttttgctggttctcggtattttttccatgatctatattcgtgaacgacgaatctggttgctggtcaaacccgataaccgggtattgtttgccatatcctctaatcgcaagaatcgtgatctggatattgagttcgcacgctatcaagagcaactgcagcgcctgctggcgta

SEQ ID NO: 2920 - DNA, 13005 bp, synthetic construct
  misc_feature 1..13005: note = Synthetic
  source 1..13005: mol_type = other DNA
agtcaccagaaacaaaatcgggctcccctttccgccccggcgggggcggaaaggggcgggggggataggggggggaaagcgaggtgctgcgccctcccgcaaaactgcgaacaccggcttgtgcctgggtgacacgggggggaatgcgaggtgccgcgcccgccacgacggccctcatcccgcccaccgccccggggggcgatgaaggcggaccggtgcgccacgcccgaaaccgccctcgccccatcagccgcaacgaggaggcccaacccgcgccctgcgaccgccaccccctccgacgcccccgcgaccacctccaaaccacagcttctcgacaaaacgacccataccccatcgccatccggtcagaagttgctatcatttttgataatcccagcatcttcccccacccgtgccaagtaaatgaaacgtaaatcccccgctgccccgccgcgggcggtgaacgggcggcgggggtcgtgcgtcatagctgcatcgcctcgtgctcaccgatgcttcgatgacctccgaaccttctcctctgctcagccgccgccgctggctgcagcgcggcgctggcctggcgctgggtctgcccgccgtaccgcaggccgtctgggcgcaaaccttctcgaacgcttccgccaccgaaccggccagcgccgacgccgcggcgtggcgcgcctgctcgcgcctgggctacgggcccacgccggcgctgctggccgaccttgccgcccgcggcgggccgcgcgcctgggccgccgcgcaagtggacgccgcgcgcgcacagagccagacgccgccggcgctcgcgcccgagtgggcgggttttctcgcgccgctaccggagttgtttgcgctggagcgcgaggagcgcgaagcgcgccgcctcgccaaggaatcgcccggcatggtcagcgccccggtggcggccgccacccgcgcgctggactttgccgcgctggccgagccgctgcacttcagccgccgcgtcaccctgcaggccgcggcgtggcgcctcggcgccatcagccgccccgacgtggagaacccgctgctcgcgcgcatgaccgagttctggttcaaccacttcaacgtgttcaacggcaagggcgcggtgcgccccttcgtcgggcattacgtggtgcaggccatccgcgccaacgcgctggggcgtttcgaggacttgctgctggccaccgcgcgtcacccggccatgctgcgctacctcgaccaggcccagagcgtggccgaaggcagcccgggcgcgcagggccagcgccgcggcctgaacgaaaactacgcccgcgaggtgatggagctgcacaccctgggcgtcaacggcggctacacccagactgacgtgcgcgagctcgcccgcgtgctcaccggctggacagtggggccgcaggaggccagcggctttcgcttcgcaccgcgcctgcacgacggcggcaccaagaccgtgctcggccgccgcttccctgcccagccgacccaggcgggcgaagacgaaggcctcgccgcgctgcgcatgctggcccaccacccggccacggcccagcgcatcgcgctgcggctggcgcacttcttcgtcgccgacgcgccgccgccggacctggtgcaggctctcgcccaacgcttcaccgacacgggcggcgacatcgccgccgtcctgcgccgcctgtttgagagcgacgccttctgggccagcgaacaccgcctgttcaagacgccgctcgactacgcgggctcctgcctcgccgccatgggcgcgggaaccgagccgcagagcgtcacgctcacccttggctttctcaatgcagccggccagcccctgcacggctggcccacgccggacggctatgccttcgatgccgccacctggatggcgcccgaggcgctcacccgccgcgccgactatgccttcgccctggcacgcggccgcggcgcacccagcgtgctcgaccccttcctgagccgcgccacgcgcgccgccatcgccgccgagcgccccgaactgcaggccgcgctgcgcctggccgcccccgaattcatgatgaagtgaataccccccatgaagccctcgacccagccaacgctccatcccgcaagccatcccgcccccgaccccgcccgccgcggcctactggccagcctgctcggcgtcggcgcctggctggcactgtcggcacaggccgcacccgccggcgctgcggccgccgctgcggatggccgcctcgtcgtcgtgttcctgcgcggcgcgtatgacgggctctccgccctcgtcccttggtccgaccccgactacgcgcggctgcggcccaacatcgccattcccgcgcctggcgcgggcgacgaggccgcccttcgcctggacgaacgctttgccctgcaccccgccctcgcgcccttgctgccgctgtggcaggccggcgtgctcgcggccattccctgcgcgggctcgcccgaccccacgcgctcgcacttcgacgcgcagcaccactgggaagtgggcattcccggccgcagcagcgcgcacgacggctggctcaacaccctcgccgccgaacacccgggcagccgtgcactcggcgtgggtgaagccaacccgctcatccttgcgggcacggccccggtgcagctcgtgccgcgcggccaggccgccacccgcgccggcgtggtcggtgccgatgcctcgcgcgcggcggtgctgcggctgtatgcgggcaacgacgcgctctcgcaagccttccgcgccggcgccgacagccgcctcgaaaccagccaggcactggcgcaagcccaggtcgcggccgaatcgggcgccgcagcgccgatgaccccgggcatgatggctccgggggtgagcgcaatggacggcacgcgccgcgaaatgatggccgccaacaacggcgccgggcctgcgcgcggcctgcggctcgacgcgcagcacctgggcacgctcatgcgccgcgacccggcgatgcgctggggcttcctctccgccggcggctgggacacgcatgtgaaccagggcgcctcgcacggcgcgctggccaacaacctcgccgcgctggccgaggccctggtgcagctgcggcaggacttcaaccgccccaacgacgtggtggcggtggtgagcgagttcggccgcaccgccgccgaaaacggcagccgcggcaccgaccacggccacggcaacaccgtgtggctcatgggtgatgcggtggccggcgggcgctggcacggccgctgggacgggctggccgccagcgcgctgcacgaaggccgtgacctgccggtgcaccacgacttccgcgccgtgttcgcacgcgtgctcgcccgcaccgcgggcctggacgaagcccaggcccagcgcctgttccccggctaccgccccgaccctgcgctggcgggcctgatgcgcggctgacgacgcatggctgacgagcccgccacgcgcgcccgctcagccgctccgacaccgccaaggcggcgggggcgagcgcttcacagcgtcaggatggtgctgcccaccgtctgccgtgcttcgagtgcgcggtgcgcctcggccacgtccttgagtgcgaagcgctgcgcgatgtgaatcttcaccgcgccgctttgcaccacctcgaacagttcgtcggccatggcctgggtgcgctcgcgcgtggcgatgtgggtgaacagcgtctgccgcgtcacatagagcgagcccttcgcccccagaatgcccggtgcaaacggcggcaccggccccgacgcgttgccgaaactcgccatcaggccaaacggccgcaggcagtcgagcgagccctcccaggtgtccttgcccaccgagtcgtacaccaccttcacaccttggccctgggtgatctccttgacgcgctgcacgaagttctcgcgccggtagttgatggcgtgtgccgcaccgttggccaacgccagcgcgcacttctcgtcgctgcccgcggtgccgatgagctgcaggcccagcgccttggcccactggcaggcgatcagccccacaccgccggcggcggcatggaacagcacgaagtcgccgcgctgcaggccctcgaccggcagcgtgcgcttgagcaggtactgcgccgtcaggcccttgagcatcatggccgcgccggtgtcgaagtcgatggcgtcgggcagacgcaccacgcaggtggcgggcatcaggcgcacctcgctgtagctgcccggcggctggctggcgtaggccgcgcggtcgccgggctgcagatgggtgacgccctcacccaccgcctcgacgatgccggccgcctccatgcccaggcgcagcggcatgggcagcgcatacaggccgctgcgctggtagatgtcgatgaaattgaggccgatggctttgtggcggatgcgaatctcgcccggcccgggtgccccgacttcgacatcgaccagcttgagctgttcggcccccccgggttggtcgatctggacggcaagcgacatgcgatttctcctgcaaggttctaaggcaacgctgatcaagtccctcgcgcgccgcgcatcccggcggcgggcggtctgcttcgttgcaaatgctcgccatagcaaccgctatggctgcgctttgcgcctcgcatcccatcccgcggcccggcgcgcatcatcgcggggacttgttcagcgttgccctaatgggtcaaaacggccatcgtgccacgttcgcgccagcgctgcagcacgcaagcggctacagtcccggcccatgtcacacaaactcgacgcgcgcaccgcgttcttcctgacgatgccgccgctgctgtgggccggcaacgcggtggtgggccggctggtcaatgggctggtgcccccggtcacgctcaacctgctgcgctggctgatcgccgcgctcatcctgctgccgctggcgccgtgggtgctgcgccgcggcagcggcctgctgtcgaactggcgccgtttcgcgctgctgggcctgctgggcgtgggctgctacaacgcgctgcagtacatggcgctcaagacctccacgccgctgaacgtgacgctggtggcctcgagcatgccgctgtggatgctggcgctgggcacgctgttcttcggcgcgcgcgtcacgctcgcgcaggtgctgggcgcgctgctgtcgatggcgggcgtgctggtggtgctctcgcgcggcacctgggcgcatctgctggagctgcgcctggtggccggcgacctctacatgctcgccgccaccctggcctgggcctggtacagctggctgctgtcgcgccgtgccgagcccgagcggctgcgcgcggactgggcggcctttctgctggcgcaggtgctctacggcctcgtctggtccagcgccttcaccgccgccgaatggagcctgaccgacgcccacatccagtggggcacaccacttatcctcgcgctgctgtacgtggccgtggggccggcggtgctggcctaccgcagctggggcctgggcatcgagcgcgcggggccggcgctggcgggcttcttctccaacctcacgccgctgttcgcagccgtgctctcggccgccttcctcggggagctgccccacctgtaccatgcggtggccttcggcctgatcgtcgcgggcatcgtggtgtcgtcgcggcgctgagcaggctcggtggccgcaccggcccgtcctgtggtctcgcccctgccgcgccggcccggtgccgcggccgcgccctgaaaggtctgccgatgtcagacatggtcgtgctctatcagttcgccatcgtggcgagcgtgctcatcgcgcagacggtgctgggggaaaaggccagcttcggcgtggcggccgggtgggcgctgtggacgctggtgctggcgttcggccacacgctctacgccgcgcagctgctcaccatcggcgtggccgtgtggctggcgctgcacctcaagggccgcaaggccgtgatcgaagcgctggtcgcctgcggcgtggtggcgggcatcggcctgtacttcgcacagcgcagccccaccgagcccctgcgcacggccaaccccgtacccgccgcgcgcgcggccgcggccgtcacgcctgcggcgccggcggcgagcctgtcgcccgcccctgcgacatcggccgcatcggcccccgctcccatcaccccagccagcgccgcttcggccgccgccgagccggagcctgccacggcctcggccccgtcatcccccgcagcctcccagcccgggcgcaccgtcgccctgcccgcccccaccgaagaccccgaaccctaccgccccaggaaagtcgcccccgagccctcgccctgcatgtacaagggcgtgatgagcgatgcggactacctcgcctgcggcatcacgccgccgcggcggtgagaaaggcaagtaccgcccacgtgctgaggacgaggcgaacctccagccgttgtgcttccggctgctgatgggcctgtgcgacagccgtcaagcgctgtaaatttgcaaaaaagaacccagccggttacccgactgggttctgggttcggatgaggtcctgcgacctctccttattgcagcaacggctctcaccccggataactacaacgggtgaaagtgtatcagggaggcttcatggcgcaactcattttcggactggacatcgggattgcatcggtcggctgggcggtgcttggcgaaacgcgcatcatcgacctgggcgtgcgctgcttcgacaaagcagagaccgccaaagaaggcgatccgctcaacctcacacgacgccaggcgcgcctgctgcgccgccggctgttcaggcgggcctggcgcctgaagaagctggcgcgcctgctccagcacgagggcctcattcccaacgcccagcggttcgtcgaagcactggcgaacggccatgcatcggcgcctggtgatccagaacaccccaacacctgggaactgcgccggcaggggctggaccggctgctgacccccgcggaatgggcgcgcgtgatctaccacctgtgcaagcaccggggctttcactggaccagcaaggccgaagaagccagggccgacagcgacgccgagggcgggcgcgtcaagcaggggctcaagaacacccaggcgctgatggtggcgaagggctaccgcagcgccgccgaaatgatcctggccgagttcccgggcagccaacgcaacaagcgcggacagtacgacaaggccttgtcgcgagtgctgctggggcaggaactggcgctgctgttcgagtcgcagcggcgtctgggcaaccctcacgccagcgagcggcttcaggcgctgatcctgggaaacggcgaccggcgcagcggcctgttctggcaacaaaagcccgccctctcgggcgccgacctgctcaagatgctgggcacctgcacgttcgagaagtccgaataccgcgcgcccaaggccagtttctcagccgagcggcacgtctggctgacccggctgaacaacctccgcatcatcgacgacgggcgcacccgtccgctgaacggggcggagcgacaagccgcgctggcgctgccgtaccagaccgaaaacttcaagtacaagacgctcaagaacgcgctggtcaaagccggtctgtggaccgccgatgtgcgctttgccggcatggcctaccccagccaggcacagatggaagacggcaaggccaaagaccccgaggagcaggcgctggtcaaactcagcgcctggcacgagctgcggctggccttcaagcgtgagggccacgaagcgctgtggcagcgcatcgccaccccggcgctcgaagggaagccggagctcctggaccagatagcctgggtggtcagcgtctacaaggacggcgaagaaatcagcgatcaactgcgtcggctgccgctacccgagccggaactgtccgtgccggtgctggagaagatcgggttcgagaagttctcggccctctcgctcaaggccctgcgacgcatcgtgcccttgatggagcagggcctgcgctacgacgaggcggtggcccggattcccgaatacggccaccacagccagatcgtcaaacccgatgcggccagacacctctacctgccgccgttctaccaggaccagcgcaagtacgagaacaagagcgaccgcatcggttcgatggtgttccgcgaagacgccaacatcccgcgcaacccggtggttctgcgcgcgctcaaccaggcccgcaaggtggtcaacgcgctgatccggcgctacggcagccctactgcggtgcacatcgagatggcgcgcgacctttcacggcccatggacgagcgcaacaagatacagagagcgcaggaggagttccgcgaccgaaacgccaaggcccgcgaagacttcgagcgggacttcggctacaagcccaagtcggccgttttcgagaagtggatgctgtaccgcgaacagcatggccagtgcgcctacagccaacaggccctggacattcagcgcgtgctggacgaccccaactacgcgcagattgaccatgccctgccctactcccgcagctacgacgacagcaagaacaacaaggtgctggtgctcacgcgcgagaaccagaacaagggcaaccgcacggcgtatgaatacctcaccagcttcccgggcggtgaagacggcgagcgctggcgcaacttcgtcgcctgggtgcagcagaacaagagctaccgcctggccaagcgcaaccggctgctgcgcaagaacttcgggcaggaggaatcgcgcggtttcatcgaccgcaacctcaacgacacccgctacatctgcaagttcttcaagaactatgtggaagaacacctgcagctggcgccgcgcgaggacggcgacaccaaccgccgctgcgtggtggtcaacggccagctcaccgcgttcttgcgggccaaatggggcctgaccaagcgccgcgaggaaagcgaccgccaccacgcactcgacgcggccgtggtggccgcctgcacccacggcatggtcaaggcgctggcggaccatgccaaggccaaggaactggcctttctgcacgagggcttccccgaccccgaaaccggcgagatcctcaaccctgcggcctacgctcagggccagcggcatttccccgaaccttggccgcacttccgccacgaactgcaaagccggctgttcaccgacgacctggatgccctgcgggccgacctgcagcgcctgggcacctacaccgaagacgacctcaagggtctgcggacggtgttcgtctcgcgcgcgccgcagcggcgcaacggcggcgccgttcacaaggatacgatctacgcgcaaccccagcggctcaaggcgacgggtggcgtcatcgagaaggtgccgctgagcagcctgaccctcaaggacctggaccggctggtggacccgcaccgcaacgtcaagctctacgacgccatccggcagcggctggaggcccacggcggcaagggcgacaaggccttcggcccgggaaaccccttgcgcaagcccgacaagaacggcctgcccaacgggccgctggttcacaccgtcaagctgctgcgcgaaaagcaaagcggcatccccatccgcggcggcctggccaagaacgacagcatgctgcgcgtggacgtgttcaccaagactggcaagttccacctgctgccggtgtacgtccaccaccgggtgacgggcttgcccgaccgggcgatcgtagccttcaaggatgaagacgagtggacgcccatcgacgagagtttttcgttcttgttctccgtatacccaaatgacttggtccgcatcacgctcaagagacagacctatcttgggtatttcgcgagctgccaccgcggaacaggagccttcaacttgtgggctcaggatcggagcatccatgtgggcaaaggtggtgccgtggaaggtatcggtgtgaaaacggcgcttgcagtggaaaaactcaatgttgacatcctcggccacatctaccccgccccaccggaggtgcgtcgtggtctggcgtagcgtggtcatcaaccggccggccaggctgcggcgcgagcatttcgcgctggtggtggagcaggagcagagtgcgcgcgtgcccttcgaggacatcgccgtcatcgtgctcaaccaccgcgagatcaccctgacccacccggtgctgtcagcctgcgcagactacggcatcgggctttacagtacaggcgataaccaccagcccaacggtgttttcgtgccctttcttccgcacagccgcgccacgcgcatgcagcgcctgcaactggacctggacaggccgacggccaagcgcgcctgggcgcgcatcgtgcagaccaagatcggcaaccaggcgcgctgcatggaactgctggccgtggccggggccgaccggctggcgtcgtatgcgcggcgcgtgcgctcgggtgacggcggcaacatggaggcgcaagccagcgccttctactttccgcaggtgttcggccgcagctttcaccgcagccagaacagctggaccaatgccgcgctggactacggctacgccgtcacgcgcggggcctgcgcgcgggcgctcgtggcccacggcatgctgcccagcgtcggcctgttccacagcagcgagcagaacgccttcaacctggccgacgacctgatcgagccctaccgtcccgtcgtggacctgcatgtggcccagcagcggcgatccatcgaaaccgcggacgaccaagccccgttgcaaccggccgacaaggccgccctggtgggcctgctcaatgtcgacgtggccatgccgcgcgggcagatgagcgtgctcgcctccatcgagcaggcggccgaatcgctggcgcggctgttcgacggcggcagcgaacaggtgctggaactgccgcggctgatcggcctgcgccagcacgtgcacgagatgtagccgccggcgcgcgctccaccccatgagccaggacacgaggcgcttcatgcgaatgctggtgttcttcgacctgcccgtggtcaccaaggccgaccggcgcgcctacacggtgttccgccgctttctgctcaacgacggctacgacatgatccagttctcggtctacggccgcatcctcaacggcgcggatgccgagcaaaagcacatgaagcgcctgctggcgaacctgccgcccgaaggatcggtgcgcgtgctgacggtgacggagaaacagtacgccagcatgaagctgctggtgggactgccgctgtttcaggaaaaaaaggtcaatgccgcccagatcgcgctgttctgagcgaaattccgaaaaaagaaacccgcgcaccgctaggcggggcgcgggtttcgacggggtcgagtgtagctatccggggtgagagcgggagctacaacaaaaacttgtcgttgttgtcggttggcgatagtgtagctatccggggtgagagcgggagctacaactggatttgacggaaggcatccccctctccgagtgtagctatccggggtgagagcgggagctacaaccttctccaaagggatacgcaacgggggcctagtgtagctatccggggtgagagcgggagctacaacgaccagaacatcatccagatcagcgcggggagtgtagctatccggggtgagagcgggagctacaacggccgcaaaagccaaagcagccggctcttaagtgtagctatccggggtgagagcgggagctacaacgagaccgtacatatggccacgccaccatggagtgtagctatccggggtgagagcgggagctacaacgtttcttgatgagctgcgcaaggcggaggaagtgtagctatccggggtgagagcgggagctacaacgcgcgagctgcaacggttgcatgacgtgcaagtgtagctatccggggtgagagcgggagctacaactgcattggcgatgtaccgctgacgcgcggcagtgtagctatccggggtgagagcgggagctacaacacggaatgagctgcgtccccgatttcccaaagtgtagctatccggggtgagagcgggagctacaaccacaacctcttaaccccgcttgtcgtggtgagtgtagctatccggggtgagagcgggagctacaactcttgacggccaccgtccatcacgccagggagtgtagctatccggggtgagagcgggagctacaacaggcctaggccgttgatgtacacgcgggtcagtgtagctatccggggtgagagcgggagctacaaccctgcgccagaccgaacggcgtttctttggagtgtagctatccggggtgagagcgggagctacaacctggctgaacgacatcgcgtcaatctcgccagtgtagctatccggggtgagagcgggagctacaaccgccatccgctgaaacgggcgagcgggaaaagtgtagctatccggggtgagagcgggagctacaacgcaatcggcacgattgccaccggaaagcctagtgtagctatccggggtgagagcgggagctacaacatccttgccttggtctgtgtgccgtggcttagtgtagctatccggggtgagagcgggagctacaacgaaaaaacgcaccaccgtgcgccacgcgcaagtgtagctatccggggtgagagcgggagctacaactatgagcgtgttgccctgcgcgtccgtggtagtgtagctatccggggtgagagcgggagctacaactgaatcatcgagacacactgaccgcagaacagtgtagctatccggggtgagagcgggagctacaaccacctgatccactgcctggcgccatggcacagtgtagctatccggggtgagagcgggagctacaactcaatagcaaacggctgttgggcgatgtacagtgtagctatccggggtgagagcgggagctacaacattctgcacacgcgtgcgccagtatgaaccgccccgggttttgaggaggctccaactcttgagaagatggagccatgaacaagacatcgaaattctcaccc

SEQ ID NO: 2921 - DNA, 12611 bp, synthetic construct
  misc_feature 1..12611: note = Synthetic
  source 1..12611: mol_type = other DNA
tgacaactaattcacgagttcacgtaacgacttatgatgctgcaacgtctatttcccgccccgctggttgccggtggctatctggccggttttcttatctgtgtcctgctgctggcttcagcgtactactttgaataccagatgttcctcgatccctgcccgctctgtattgttcagcgtattgccacactaggcatcggcattggctgtctgctcgcatttattgcccgaaacacccgctggccgcatcgcattgctctgatattcacactggcatcgtccatatttggtgtctgggtcgctaaccgtcatgtctggctacagggcctgcctgccgacgaagtgcctgaatgtggcccgagcgttgaatacatggcggaagttctgccattcaccgaactggttaccttcatgctgcaagccagtggcagctgtgcagacatttcatgggaattcatggcgttgagtatgccggagtggacccgtgtcatattcgttgcatttactcttgttagccttctgggcctggctcgcgcctggagcgcaggcaagcagggctgatgcacataaccgcggtattgcaagaaaaaaaactgaaaaaagttgcttgaaatgccgctttccacgcgcctatattggtgacactaaggcataagcagcaccgttttcacagaggaattttgacatgctggaacaatgtaaaaacgcacaggaacgctggggcggtgttcaccaactgatcgacaaatggttgaatgagcgccagagcctgatcgtcctgttctgcaacctcagcgccagcaagccgctgtctgaagaggaaccactggcagagaacctgcagcgtttctgtgaagttatgatggattactgctcagcagggcacttcgaaatttacgagcagctgatgaatgaagcccgtgaattcgacgatggcaccatcgacctggcaaatgaacacatgccacgcctggaagcccttaccggcgaatgcgttgacttcaacgatacctacgacaaacactgcactctggaccagctggcgaagctccctgctgacctgtcggccatcggcgaagtgctcgaagagcgttttcagattgaagacaacctcatcgaaaaaatgcacaacgtgcatcgtgaggcggttgccagctaagacaggaattctgttctacactgacaacaggacgcgcacttcgcgcgtccactgaccgctcacggaacaggttgtcatgatcccgcgttttattctttttctgctttccctgactcttctctctgcctgtgacaacgcagctgagcctgagaaattctctgaggtcgcgacacagggcgtctacagcattcgtatcaatcactctggcaccgccgcctttatcggcagtctgcaccacggtggcagctactggacactcgatcctgctgagcgtcatttcgactggaaccacaccagcgacggttacagcaacctgaccagtggtgccttttcgcccgatgatgcttacgttgccagcgccgacaaccgcacgatagtgctctgggaagtggctaccgggaaagccatctggttctggaacgcacccggcgacatcgaagatattgctctgacagagaacggcaacctcgcccttctcggaatgcaggactacaccgcaaccctgttcgatatccgaaatggcggcatccgccagcgcctggcccacgacggcattgtttacgacgtcagcctgagcgccgatggtctgcttggcgcctctgccagtgacgacctgacggccattgtctggaatctcaatgacggctcagccatctccacactgaaacacaacaatcaggtcaaaaccgccgagctatcgcccagtggccgcctgattttcacctcagccctacgcgaggccggtcgcatctgggatgcggccagtgggcagcaattgattgagcttcccggtggacgcggacatttcagtacggcacagttcgacgcatcagaacagcaactcctgacgggtaatacatccgggcagatacagctctgggacgttcagacaggggccgaacttaaacgttggcgtgcgaccccgggagatcactgggttggaaacaacgttgccctggaagacgttgccttcacggacaccggcgttgtggcagccgccgctaatgggcgcgtttatcacatgcagcggtgatgactaccgctgctcttcggttgagtatcgcgactccagtatagattttacctgcttcgcctgatcaatcagctccagcgcctgcccgggcataacgattggcgagtcaggcacctgagtcttgggagtgatcagttcgttgtcggatgtgtcttcctttttcgttgcgaccggcgccagaatatttgccgcggtatcgatattaacttctttggaagtaacaccttccggcgcttcgttgccgaaatgccactggccattcgcgtcctgccatttataaaacgtctgtcgtgtctgctctgtagaagcgggtggtgtgtaggccgaaaccccggacgacgaatcgctgttcacttttttcataatgtatggcgtgccaatcgccacagcgaggacgctgagaagaaacaggatcacggtgaatttcatagcaactccttttgtcgactctattccggcagaacccggatttttgcagtatgctaaagattatccaatagagaattctattttatcacccatcgctgaaaggaaacgatgtcatctatgactgcaggggttatcagtcaacagcccagggtttttacctacgccaaagcgatgcgggttctggtcgctaacgccaagggaggctgtggtaaaaccactctggccactaacctggcctgtcagtttgcccgtgaaggtaagacgacaacgcttattgatcacgaccctcaggcgtccgcaaccgactggctgaagctgcgtagtgccaggtttccaattatcaatggtattgaggccgtcagagagcgtcaccgcacgggttcgacgctcagttggcgcatgcgcatccccctggcgacagaacgcgtggttattgacacaccagccggcctgcatggcaatgcactgtctgacctgattgctcagtcggatattgtcattatcccggtcattccatcggccattgatatgcgtgcagcgacggagtttattgaagagctgcgtaagacgcaggcctaccgtcaaaaagcctgtgccatagccgtggttgccaaccgggtgaaacgtaataccttgagcttcagctcactgaaatctttcctcgacgatctgcatattccttttgtgaccgcactgcgcgatacgcagttttatgtcaaagccggagagcatggttttggtgttgtcgattttgaccgacaacaccccaaagaacaggaagagtggcaaccacttatgggttggttgaataaaacgatgcaggaaatccagcaaaaccgagaatgatgtcaggcttcttcctcgtagccgtacagatgacgcacttcagccctgacagccgctttggcccccatcctcaacacctgtccatgcgcccctaccaacgcatcgaaatcaagctgtaccagacgctcaaaatcatgctgtaacgaaccacctttgggcgtcacgcgtttaagccatggcccacctatattcatcccacgatgaaacccaagcagcttgaatacgacccgcgtaaagcctgaaaagtgtcgccagtcgcggtgatattggagactgtcagtggtgatcagcagtctgtgtttttcactaacaacgcggcctctgggtagactgcattgcggtaaacaaaaaactggctgtctcgggtagggccgggcgatgcttcgtccaccaacacgtctatttcgggtgagctatacgtgctctggcccgactgagcccagaaaaggcattgatagcgatcgacataatactgatcatccagcccgtgaaagtcaccaagccggacaacgcgggcgacctgccccaacgcatcaagttcgcgcagcgcttcgtcctgaagcctcacaggattgaccaacgtgagctctttgccttctcgtagaatgatcatgttgcggttaaggcgcattccagggccaacacgtatactgccgtgtacccagaacacatcagagaacagttgctcgattgggtcgtgcggataggcgggtgcgtacatgtttcctcctgaaactgtgtgtacagatgtccggttcagccccgcacaagatcagcgagggctttgcattccttttcattattgcagattagcataaggtctgaggatacgcagcggcccttatccgccggattgtctttatttctggcccataagatcccaaggccgtagcgctcagcttcgagttccgctttcttaagtaactcgtagagatctccatgctccaggcgatcagactgccgccgacgctggcgcaatggctcgatcatttcctgcttccagctcacgtaatcgctgtcggaaagagatgcctcgtccacttcaagcccctgctccgataaccagagcaccgtcagcaactgcagaatatcggcaccgtgttcatcctgcatcttcagcagaagggcctcgactccgctgcgtgagtaaacgctcagtgcatagatccataacggattctgcgttggttcaacactatcgaccatgctaacaacttctccaagttaaacgcgcatcaggacactggaggtagttatacgataggtgtatctttttgggaaatgtggcgacaggaagtcaggcggggaaataaaaacccggcagatttctctgccgggttgggttcggttcagcatcagagatgccgaccttattgtagtaacggctctcaccccggaaaaccacaacaagatcaatatacaggagttccagatccatgcacaccctcccctatacacttgggctcgacattggtattgcgtccgttggagcggcactactctccgacgagagcattctggggatgcatgtccgtaccttcagtgcagcagaaacagataaagaaggcgacccactcaacaaaatccgtagagaagcccgatcagctcgtcgaagaatacgccgccgagcacaccgcctactgcgtctacgcaggttacttaaacgcacaggcttgatttcagatacctccttagaggtactcaaaacttcaaagacgccttggcaactgcggtcagaaggcctggacaggctgctctctccaagtgaattggcagcagccctctaccatattgttaaacaccgagggttccaatctaatcgcaaagccgagcttaaaactgatgccaaagcagggcagatgctgtcaggagtatccgcaaatcagcaactcatgcgagacaagtcataccgaaccattgctgaaatggtctgcaaagatgatgcgttcaaagaccataagcgtaataaaggcggtagttatcgcaatacctttgcccgctctgaccttgccgatgaacttaaaacgcttttgaaaaagcaacgtgaatatgacaacccgctcgcgacccccgagcttgaagaagcggtacacacattgctgatggcccgacgccctgttttcaaggacgatgacatcgaaaagctggtcggcttctgtacgtttgaacacggtgaaaagcgggctcccaaagctgccttcagcagcgagcgctttatttggctcggcaagcttaataatctgcgactgatataccccggcgagcaaagatctctgacaccagaagaacgcagccagattatcaacttaccgtttacccaagcctcagtgaaattcagccagatccggaaaaagctcgatttaccagaatacgttcgatttaacctggtgcgctataaaccgggtgaagaaacctccaaaagcgaaaccgctaccttcttcgaagcaaaagcctttcacgagctgagaaaaacctaccgggaatcaggtatcagcgagctctgggagcgggatcagcatgatccgcaacgactggatcagatagctactgccattgctgtctaccgggatgatgaacgtatacgtaacgaactatccccacacactattgaaaacgaagtggtagaagcggttctgaactgcgactttactcagtttattaatctatcactcaaagctctcaataaaatattgccgtatatggagcagggccaacgatacgatgaggcctgtacttccgctggttatcaacatcattcgcctcagcagaatgaagagaagtccgggcgaatcccacccccggataagaatgttatccgtaatccagtggtgtaccgatcacttaaccaggcgcgcaagttaatcaacgccatcacaaagcgatatggtgccccagcagccatccacctcgaaatggcacgggatctcagcaaacccttcagcgaacgtaagtctatcgagcgcgagcaggaaaaataccggaagcagaaagtgcagctccgaaacgagtatatagagcactttggtactgagcccaatggcctcaacctgcttaaattcagactatacaaagagcaggatgcgcaatgcgcctacactcaaaaagcgctggatctcagccgcttgaacgaagctgggtacgttgaggttgaccacatcctcccctacagccgcagctatgacgatagcttgctgaataaaactcttgttctcactgaagccaaccgcgacaaaggcaacagaacaccatttgagtttatgggcggtgatgatcaatctcagcactggcagaagtttgttcgctgggtgcagatgaacccaaaaatccggcaggcaaaacgaaatcgttatctgcgtaaagacttctctgaaaaagccgcccgggagttccgagaccgccacctaaacgatacgcgctatattggtcgggaactgaaggccatgatcgaatcccatgttcaatggcatccggactcgaaaagcaaagatcactgcgttgtgttaagcggacaactaaccgcactccttcgcgggcgctggggctttaacaaagaccgggccgccggagaccttcatcacgctgtggatgccgccgtagtagccgcagcgacacgtggcatgattcaacgaatggcccggcattctaaattccacgagcttaaaaatgtgcgcaccagttatgctgatcctgacaccggagaggtagttaatcttgccgcagcacgagacctggaaaagcattttccactaccgtgggacaacttccgaaatgatacacttgcctatcttaatccgtctgcgatcagcgcagatgagtcggcacaggaaggccatcggggagtacgagtgtcacgagcgcctacccgccgcaagttaggtgccgcgcaccaggaaacgatccgctcgaaaggcaaagataacatcctgcttgagcaaggtttgtctgctgtaaaaacaccactttcgaagttaaccctcaaaaacatcgagaatatggtcggctacgaagatcctcgtaatgcagctcttgtgaaagtactcagagaacgtcttgaggccttcggtggcgatggtgcaaaggcctttgcacctaatcaacctcctgtgtacaaaccaagtaagcccggaaagcaagcgcctgtcgtacgaacagtaaacctgctggcaacccagaaaagtggcatatctgtacgccacggggtggctgccaacgatacgatgatcagaaccgacatatttaccaaagacggtaaatttcacgccgtgcctatctatgtcgccgatactgcgagtcagaaaattcctaacaaggctgtcgtcgcatataagccagaagaggaatggccagaaatggatgacagctatcaatttctgttcagtttatatccgaatgactggctaaaaatcacgctcaagaagcaaagcttcgaggggtactacgcaggtttggatcgggcaaccggagcagtgtctctctgggcacacgatcgcgatcaaatcaaagggaaaaacggaatgtatcgtggtattggaataaaaacagccgtgtctttagaaaaatgtcatgtcgatattctaggagagctgcaccgtgtgaaatcagagcacaggcagccactccgtaaaggccaggagctctgatcaatgggctggcgcagcgtggttatcagccaacctgcgtatctttccctttgtcgcggccagtttcatatcaaactggccgacgactcagaggcctcggttcctcttgaagacctcagtgcaattattcttgataacccccggatcaccatatcccagccgatgctctgcgaacttgcagaagtcggcatcgtagttgtcacggtggatgctcagcaccttcccaatggtattttcctgccttatcaaagctatcatcgcaccttaaagcgcttacgcgctcagttgaccctgccccgcccaacaatcaaacgttggcatcaacagattattcaacaaaaaatacgcaatcaggcacagactctcgcactcacaggacaggagaaacccgtacaggcactgatgcgtctggctgcaaatgtaaaaagtggcgacccagataatttcgaaggccaggctgcagcgatctattttcgctatttacttccccagccgctcaaacgacgtgtaccgaacttttttaatggtgcactcaattacggttatgccgttgttcgtgcctgcattgcccgctcgatcgttgcctcaggtttacatcctgcgttagggctttttcacgacaatgaacagaacgcctttaatctcgccgacgacctgatagagccgtatcggccactgctggatcactgggtattacagcactacctggacgaagaagaacgggaactaacgccacaggacaaaggcaagctggtcagttttttacatcaggacataggtaactgcctgaacaacgatcaaggcacagttttagccaatatagatcgaatggtgtcaggccttgctcaggcttgcgagacttgagataagtcgccgttatggctggctgcacatccgaaacaggattgatcagatgagtaaagagacgaggcgatttatgcgattgatagtcttctttgatttgccagtaactacgcgggccaaaaaacgtgcttacgtcgttttcagacgttttctgctgaaagatggctacgacatgctccagtggtcagtctatagccgtatcgtcaataaccgggacgatgcggacaagcacctcaaaagactggagcgaaatctacccaaagaaggctctatccgctgtcttgaggtctcagaaaagcaattcgccaatatgaaattgctcttaggagagctgagttttcaggaaaaacgagtgaccgcagaccagatgctactgttttaagagtaaaattgccactgaaatacaagaaaactccttgtatttcagtgggttatactggagcgattgtagttttccggggtgagagagggaactacaacggatcaaccagtgtcagtagcggccttggcattgtagttttccggggtgagagagggaactacaaccggtcaggaattgtactgggtgcatggggaattgtagttttccggggtgagagagggaactacaacattccgcggatcattgcggatatcgacgttattgtagttttccggggtgagagagggaactacaaccttcgatgtggggctcccgattatggcctcattgtagttttccggggtgagagagggaactacaacccacagtagtattagtagatgaccctaaatattgtagttttccggggtgagagagggaactacaaccttccatcgattgacgactcgagccctctgattgtagttttccggggtgagagagggaactacaactcgggctgtacttagaaaaaatgatggtgaattgtagttttccggggtgagagagggaactacaacagactcagaggacagctttaaagcccagttattgtagttttccggggtgagagagggaactacaacctttggtgctgagctgcatcggtgcctggcattgtagttttccggggtgagagagggaactacaaccgtggacccgtcgccggtggctcagcatccattgtagttttccggggtgagagagggaactacaacgataacgattctaataccaaaggtaatccgattgtagttttccggggtgagagagggaactacaacttacggcgtgccgcatgtagccggtgaaccattgtagttttccggggtgagagagggaactacaaccagcgcgactgccaccatgaaattcgagcaattgtagttttccggggtgagagagggaactacaaccgcgttcgagagaatgctgctgaacgaaggattgtagttttccggggtgagagagggaactacaactttttaagagtgccccatgacggataccaaattgtagttttccggggtgagagagggaactacaacggcattgcgcatgcagaggatgcctgcggcattgtagttttccggggtgagagagggaactacaactgtacacacgccatcagtagcccacacatcgattgtagttttccggggtgagagagggaactacaacggttaatggaaccaattaactggctgagtgattgtagttttccggggtgagagagggaactacaactgtgatggcagcctacaaagtttccgcaagattgtagttttccggggtgagagagggaactacaaccatcacttcaatcgtggttacaccgaacagattgtagttttccggggtgagagagggaactacaacctctctgaaacgcaagccagcgccccatgtattgtagttttccggggtgagagagggaactacaacgtcacaaaggaaggcgcaactacagaggcgattgtagttttccggggtgagagagggaactacaaccaatcagcttagacagcgccacgcttaatcattgtagttttccggggtgagagagggaactacaacgacagcaccgactacggcagaccacttcacattgtagttttccggggtgagagagggaactacaactccagagtctaggatctcaattatccgcacgcgaaattgacgcggcactcttggcctgaacatcacgaaaataatctgtgatactcttctcacaaggaaattaaggcagaaaatggatgcaatacgatcacggccacagaactacacagcacttgttcgagatgactccgctcgaggctgcgattcaacaatatgaagaactggcgaacaagcactataccgagcgcttaagcatgctcaaagcatcaggtaaagagaagaaacgcgccgaggccagtttggcaaaagcccagcaatttctgctgcagcagcgtcgccatattcgcaacctcgcaagcatccagcttaaacttgctgaatatcaggcatcaggcaatgagatagccgagatagatcccgaggccctgctggaggagaagcaccatccaaccagagttctggcacgcaacatgacagccgatgctaatcccaggccttcaagccgacactctgcccatcacattgttgctggcaagggaatccacccaagaactgccgatattcgcctggttattcatttcgcaggtattcgcataaacgaccccgataatggcgtatggctacctatcggaaaatcagacaaaggtcactgggccatgccctctgctccagcccactctgaaatacatacctttaattacgaaacatgggttaactatttattagggcctctcgatagtgaggtgactatcaggtctgcactgaatagaatcagaagtttgcttagagatggtcaacaaccaccgcaggtaacaatgaaaaaagatactagctgggcaggatactaatgggcatctattcccttcacgcaaacattgaacattacctgacattcaatttgcccgtccgcgatctattacatgccttaaaagataagtttcctcctaagcagatactgcacttttataaacacaaccttagcctttcggatggctggcctgctgtgcaggcgagctttgtaggtattgatagcgtcacttcccgccctgccttacccgatataacaacctggctcccagggacaatgatattgtcacctcatgcgaaacaactacttgaaggagtccttagcgaatgtcagtggctcccagtcgataccaaagatggggagtattggatcgcttacagtcgttcagtcatcactgcagacgagaatcttagtgaaaatattgtcaacagcggggaaataatggatgcaggcaatcttaaatttccagatcgcctgaatgaaagcactcaagcgactctatttaaatcagattctgacggctatcgtcagacattcggcaacgacctgttgaaaagtacggtagaagcaggagaccttaagggtattactttttccacagacttagtctcgcctgcttacatgtccgtgtaagttgcagaatagtcataccaattccctcgggctgagttacacctgattggttcgctcccgcttctgtggcaaactgcgccgccattaccagccccttttctgtgtgttttctatgatcgagtttaatcaggtttcgttgcagcgtggtactaact

SEQ ID NO: 2922 - DNA, 11857 bp, synthetic construct
  source 1..11857: mol_type = other DNA
  misc_feature 1..11857: note = Synthetic
tgccggggccgacgcggcggatcgtctcgtccagctcgcgcgccaggcgctggccatactgctcgggcgtttcgccttcgcgctggtcgcggtagggatagcagggcgacacgtgggtgacgtcgaccagcagcggggcgaactggcgccgccgccactcgttgccgcccaccgccagcgcgcccagggtgttgccgtggtagctctggcgcctggcgatgaagtggctgcgctcgggctggccgatctccaggtagtactggcgggccatcttcagcgccgcccccaccgcctccgagccgccgctgacgaagtaggcgtggctcatgcccgccggcgcggtgcggatcagctggtcggccagctgctcggccacctcggtggtgaagaagctggtgtgggcgtaggccagctggtcgatctgccggtgcatggcggccagcacgtccgggtgaccgtgccccaggcaggacacggcggcgccgcccgaggcgtcgatgtagcggcgcccggcggcgtcctccagccacacaccctggccgcgcacggcgactggtggcgtgtggtgcaggtgtcggtgcatgacgtgcgtggtgcccatggcccgcggtctccggtgggtggctggccgtcagcgcttactgcgccgtccagccgccgtcgttggcccaggcctggccgcgcacgttggccgccgccgccgagcagaagaacaccgccatggcgcccagctgctcgggcgtggtgaactgcagcgagggctccttctcgcccagcagctcgcgcgtggcctgctcggtgctgatcttctcggccgcggcgcgcgcgtcgatctgcttttgcaccagcggcgtcagcacccagccggggcagatggcgttggcggtgacgccggtggtggccagctccagcgcggtgaccttggtcaggccgacgatgccgtgcttggccgccacgtaggccgacttgtcgcgcgacgccaccagcccgtgcaccgaggcgatgttgatgatgcggccccagttcttctgcttcatgtgcgggatcgccagccgcgtggtgtggaacgccgacgacaggttgatggcgatgatggcgtcccagcgctcggtggggaagctctcgatcggcgagacgtgctggatgccggcgttgttgaccaggatgtcaacgccgccgaacttctcggccgcgaaggccatcatggcctcgatctcggccggcttgctcatgtcggcgccgtggtaggcggtctgcacgccgcaggcctcgatctgccggcgcggcgcatccacgtcgccaaagccattcatcacgatgtgggcgccctgcctggccagttcgatggcgatgcccaggccgatgccgctggtcgagccggtgacgagggcggtcttgcctttcagtgacatgtggtggtcctttcgtgcttggaaaatgaaaaccggacgcgaagaacgcgaaaagtgcgcgaaaaacgcgaaagaaaccaaaatttctctttcgcgtccttcgcgtgatcttcgcgcccttcgcgtccggatgtgttaagtcggctgctagccctttacctgcttgcgcgagcagctactgttattgaagcagcttgacgcccgtcttgccctgcgcttcgtcgaagctgacgtccggcgccagctcgaccaccttcaggccctggtcggtgacatcgaacacgcccaggtcggtgatgatgcggtcgaccacgcccacgccggtcagcggcagcgtgcactggggcaggatcttcatgtcggtgctgccgtccttctttttggcgacgtgttccatcagcacgatcacgcgcgccacgccggccaccaggtccatggcgccgcccatgcccttgaccatcttgcccgggatcatccagttggccaggtcgcccttgtcggtgacctgcatggcgcccaggatggacaggttgatcttgccgccgcggatcatggcaaagctgtcgtggctgccgaagatcgagctgcccttgatggtggtgacggtctgcttgccggcgttgatcaggtcggcgtccacctcgtccttggtcgggaacgggccgatgccgagcatgccgttctccgattgcagccacacctccttgtcggcgggcacgtggttggccaccagggtgggaatgccgatgccgaggttgacgtaaaagccgtcctgcagctcctgcgccgcgcgcgcggccatctggtcttgggtccaggccatgtctcgatctccttgattacttgtgctcgcgcagggtgagcttttcgatgcgcttttcgggcgtggggttgtgcacgatgcggtgcacgtagatgccgggcaggtgaatgtcgtccggcgccagctcgccgttggccacgatgcgctcgacctcgacgatgcagaccttgccggacatcgccgccgccgggttgaagttgcgcgccgtcaggttgaagcgcaggttgccactgcggtcggccacgtcagccttgaccagggccacgtcggccaccagcgagcgctccatgacgtaggtctggccgtcgaattcgcgcagctccttgccctcggccaccagggtgccgacgccggtcttggtgaagaaggccggaatgccagcgccgccggcgcgcagcttctcggccagcgtgccctggggggtgaactccagctccagctcgccggccaggaactggcgctcgaactccttgttctcgcccacgtaggagctgatcatcttcttgatctggcgcgtctccagcagcttgcccaggccgaagccgtcgacgccggcgttgttgctgatcgccgtcaggttcttcacgccgctgtcgcgcagcgcgtcgatcagcgcctcgggaatgccgcacaggccgaagccgccgacggccagcagctgaccgtccttgacgacgcccttgagcgcctcggcggccgatgggtagatcttgttcacgggtctctctccagttgcggaatctcggacaaacatcaggcagaacaacggcgtcaacgatactacgtaatcgactacgtagtatttcgtaatggcgatccctgccccgcccgccaccgaccccgcgccgccgccgccggattaccgcatggccttccagctggcgccggtcgggctgatcctctcgcgccagcgccacatcgtcgactgcaacgcgcgcgtgtgcgagatcttcggcgccgagccggcgcagctcatcggtcagagctttcgcattctctaccccagcgccgacgaatacgagcgcttcggcgcgcgcatcgcccccgtgctgctgcgcgacggcgtgtacgccgacaaccgggtgatgaagcgcgtggatggccgccacgcgggcgaagccttctggtgccacgtcaccggccgcgccatcgaccgccgcgcgccgcacgatgccggcatctggaccttcgaggacctgagcgcgcagcgccccatcggcgccgtgctgaccccgcgcgagcgcgaagtcgccgcccagctgacgcgcgggctgaccagcaaggaaatcggccgcgccctgggcctgagccaccgcacggtggaggtgcaccgcgccaagctgatgcgcaagtaccgcgccagcaccacggccgatctggtgcaaaagctcatgggcgggccatgaggcgccaccggccgccgtcgaaactacaaatttcatagctgccggcgcttgccagacgggcgccaggcgctatttcttttcagaaccagcaggagggccgtcgaccacctcggcggcgctgcgaaaggcctccaccgcgcacggcacgccgcagtaaatgctggcgtgcagcagcacctcctggatctcggccgtggtcgcgccgttgttcagcgcgccgcgcacatggcccttcagctcgtgctggcgacccagcgcggtcagcatggccaccgtcaccaggctgcgcgtcttcaggtccagtccgggccgctgccacacgtcgccccaggcgttgcgcgtgatgtagtgctgcatcggctcggtgaacggcgtggcgccggccagcgcgcggtcgacgaaatcgtcgcccatcacctggcggcgcgtcttcaggccatcctggaaggccgggtcttggggcagtcgcatgcgggtcactcctgaggacaaaggcagtcagcataatgaccctgacccacccacgcgaggagcccccatgagccgctaccccctgcccgacctgaacagcctgcccgaggacattcgcgccaaaattcttgaagtgcaggccaaggccggcttcatccccaacgtgttcctggcgctggcacgccggccggccgaatggcgcgccttcttcgcctaccacgacgcgctgatggagcccgaagccagcggccgcaccagcggcctgagcaagggcgaccgcgaaatgatcatcaccgccaccagcgccgccaacggctgcctgtactgcgtggtggcgcacggcgcgctgctgcgcatctacgagaaaaagcccctcgtcgccgaccaagtggccaccaaccaccacaaggccgacatcaacccgcgccagcgcgccatgctcgacttcgcgatgaaagtcagccagcgcccgcgcgagctgggcgagcaagactttgccccgctgcacgcccacggcctggacgacgaggacatctgggacatcaccgccatcaccgccttcttcggcctatcgaaccgcatggcctcgttcagcaacatgatgccgaacgcggagttctacctgatggggcgggtgccgagggagaagaaggcgggctgagccgaccagggcgacctgcttggcgatgcgctttagcacgcaacccaacaggtcaaggaaaaggcctgacaggttgccccgtcaggcctttgggtacggacggggtcttgcgacccctccttattgcagcaacggctctcaccccggataaccacaatcgggagcgagtatagcaagggaggtttcatggcgcagtacgtctttggattggatatcggcattgcctcggtcggctgggcggtgctgggtgagcagcgcatcttcgacctgggtgtgcgctgcttcgacaaggctgaaacggccaaggaaggcgatccgctcaacctcacgcgacgcgaggcacgcctgctgcgccggcgcctgtatcgcagggcatggcgcctgacgcaactggcgcgcgtgctcaagcgcgaagggctgatcgacgacgcgaggctgttttcaaggcagtcaagcttcagcgccccagatccgaacaatcggggcaagaagcaggtggtcagcgcgtgggagctacgccgcgacgggctggatcgactactgtcgcgactggaatgggcacgcgtgatctaccacctttgcaagcaccgcggttttcactggatcagcaaggccgaggaagccaaggccgacagcgacaaggaaggcgggcgcgtcaagcagggcctgaaagacaccgccgcccgcatgaaggacaagggctaccgcagcgctgccgaaatggtgctggccgaattcccggacgcccagcgcaacaagcgtgggcaatacgacaaggcgctctcgcgcgtgctgctgggcgaggaactgacgctgctgttcgagcgccagcgcgcgctgggcaacccgcatgccagcgagcgccttcagacactgattttgggcaacggcgaccgccgcagcggcctgttctggcggcaaaaacccgcgctggcaggcgccgacctgctcaagatgctgggcaagtgcaccttcgagaaaggcgaataccgcgcgcccaaggccagcttcagcgccgagcgccatgtgtggctcacgcgcctgaacaatttgcgcgtggtgatcgacggccgctcgcgccccttgaacgaggccgagcgtgccatcgccctgccgctgccctatcagaccgaggcgttcaagtacaaaaccctgaaggccgccttcgtcaaggccggactccgggacgagggcgtgcgctttggcggcctgtcctatcccagccgggcgcaggcagagggcgagaaagccaaggacccggaagaccagccgctggtcaagatgccggcttggcacgagttgcgcaaggcattcaaatccgcaggactcgaatcgctgtggcagcgcatcagcactcccgcgctggaaggcaaccccacactgctcgaccagatcgccacggtgctcagcgtgtacaaggacggggacgaaatcacccgcgaactgcgcgcgcttgcgctgcccgagcctgatgcctgcatcccggtgctggagcgcatcagcttcgacaagttttccagtctgtcgctcaaggccctgcggcgtatcgtgccgctgatggaaaccggcctgcgctacgacgaggccgtagcgcagattcctgaatacggccaccacagccagcgcatcaaacccgatgcaaacaagcacctgtacctgccgccgttctatgaagcccagcgcgaataccgtgacaagaacgaccacgtgggatcgatgaaattccgcgaagacgccgacgtcccgcgcaaccccgtggtgctgcgcgcgctcaaccaggcgcgcaaggtggtcaacgcgctgatccgcgaatacggcagccccatggccgtgcacatcgagatggcacgcgacctgtcgcgccccctcgatgagcgtcgtgaagtacaaaaactccaggacgagttccgtgatcgcaacgaccaggcccgcgctcaatttgcggagcagttcggctatcagcccaagggccgcgaatttgaaaaatggatgctctaccgcgagcagttgggccagtgcgcgtacagccagcaagcgctcgacatccagcgcgtgctggacgacccgaactatgctcaggtcgatcacgccctgccctactcgcgcagctacgacgacagcaagaacaacaaggtgctggtactgacacgcgagaaccaggacaagggcaaccgcacgccctacgaatacctgactgcgctcgacgatgggcaggagggtgaacgctggcgcgccttcgcagcctgggtgcagggcaacaagaactaccgcctcgccaagcgcaaccgcctgctgcgcaagaactacggcgcagacgaacaacgcggcttcatcgaccgcaatctcaacgacacgcgctacatctgccggttcttcaagaactacgtcgagcagcacctgcaactggccgcccgccccgatggcgacctgaaccgccgctgtgtggtggcgagcggccagttgactgggttcctgcgcgcgcggtggggccttgccaagctgcgctcggacagcgatcgccaccacgcgctcgatgccgccgtcgtggccgcctgcacacacagcatggtcaaggcactggccgaccacgcgcgccgcaaggaaatcgaattcctgaagcaaggcttccccgacccggagactggcgaaatcctcgacccctccgcgttcgatcacggcaagcactacttccctgaaccctggccgcacttccgccacgaactgcaggcgcgcctgttcaccgacgacctggcggctctgcgcacggacatgcagcgcctgggcacctattcagacgacgatctggcgcgcctgcgcacgctgttcgtctcgcgcgcgccgcagcggcgcaacggcggcgccgtgcacaaggacacgatctatgcccagcccgagagcctcaaggcccagggcggcgtgatcgagaaggtgctgttgcaggacctcaagcccgccgatctcgacaacctggtcgacccccaccgcaacgaacggctgtacgcgtccatccgccagcgactcgaagaccatggcggcaaggccgacaaggccttcggccccgacaacccgctgcacaagcccgacaggaacggccagcccaccggccccgtcgtgcgcagtgtcaagctggtgcgtggcaagcaaagcggcatccccatccgcggcggcctggccaagaacgacagcatgctgcgtgtggacgtgttcaccaaggcgggcaagttccacctggtgccggtgtatgtgcatcaccgggtgacggggctgccggatcgggcgatcgtggcgttcaaggatgagaccgagtggacgctgatcgacgaaagctttgcgtttctgttctctatttaccctaatgatctggtgcgagttgcactcaaaaaagactcagcgcttgggtattactcgggcgctgatcgatcaacgggagcaatcaacctgtgggcgcacgacagatcagcagcgatcggtaaagacggtttgatccgtggcatcggcgtcaaaaccgccgtttccctggagaagttcaacatcgacgtgctgggccgcgtctaccccgccccgccagaggtgcgccgtggtctggcgtagcgtggtcatcaaccagccggccaagctcaagcgcgagcacttcgcgctggtcgtcgagcaggcacaaagcgcgcgcgtgccgttcgaggacattgccgtcatcgtgctcaaccaccgcgagatcacgctgacacacccggtgctgtcggcctgcgccgactacggcatcggcctgtacagcaccggcgacaaccatcagcccaacggcatcttcatgccgtttctgccgcacagccgtgccacacgcatgcagcggctgcaactgcaactggacaaacccaccaccaaacgcgcctgggccgccattgtgcgtgccaagattgccaaccaggcgcgctgcatggaactgctgggccggggcgatgccgagcgccttcattcctacgcgcgccgcgtgcgctcgggcgacgccggcaacctggaggggcaggccagcagctactactttccgcaggtgttcggccgcggcttccaccgcagccaggcaggctgggtcaacgccgcgctggactatggctacgccgtcatgcgcggcgcctgcgcccgcgcgctggtgcagcacggcatgctgcccagcctggggctgttccacagcagcgagcagaacgccttcaacctcgcggacgacctgatcgaaccttatcgcccggtggtcgatctgcatgtggcgcagcaacccgtcaagcccgaggatgccgaattgcagccagccgacaaggtggcactgatcggcctgctcaacgtcgatgtggccatgccgcgcggccgcatgagcgtgctggcctcgatcgaacaagccgccgaggcactggcgcgcctgtatgacggcggcaacgaacagatgctggaacttcccggtctgatcggtctggcgcaacatcaattcgagatgtagcggcgcacgccatgggccaggacacgaggcggttcatgcgcatgctggtgttcttcgatctgcctgtggtcaccaaggccgatcggcgggcctacacggtgtttcggcgcttcctgctcaacgacggctacgacatgatccagttctcggtctatggccgcatattgaatggtggcgatgcggcagacaagcacatgaagcgcctgctggccaacctgccacccgaaggctcggtgcgcgtgctgacagtgaccgaaaagcagttcgccagcatgaaactgctggtcgggctgccgctgtttcaggaaaaaaaggtcaacgcagcccagatcgcgctgttctgagacctattttggaagaacgaaaacccgcgctccgccaagcggggcgcgggtttcgcagaggtctgagtgtagctatccggggtgagagagggagctacaacgcatgcgcatcaacatgaacgtcgcgcagtgagtgtagctatccggggtgagagagggagctacaacacaagagcgggccggccctgggcgccctgcgagtgtagctatccggggtgagagagggagctacaacatcggcagagcggccctgttcatcgagggcgagtgtagctatccggggtgagagagggagctacaaccttgggcagcatggctgcgtcgccgcccatgagtgtagctatccggggtgagagagggagctacaactgctcgacctggctgctcgcccactcgggcgagtgtagctatccggggtgagagagggagctacaacgcgttttctcaacgaccagcattgccagatgagtgtagctatccggggtgagagagggagctacaacacgcattgccagcatccgtgagaagttcgcgagtgtagctatccggggtgagagagggagctacaactgccagctttgcccagtgcacgcgcgcattgagtgtagctatccggggtgagagagggagctacaacttcggattcgaggctcatggcgtgtccctcgagtgtagctatccggggtgagagagggagctacaactggttctaacatttcatcgcagccgaccgcgagtgtagctatccggggtgagagagggagctacaacgctgggcacgtactgcgcgatgtcgttcaggagtgtagctatccggggtgagagagggagctacaacgtccaggccgatcactattgaggcctggcagagtgtagctatccggggtgagagagggagctacaactgcgggcaccatgtcgtcgacaccctttcggagtgtagctatccggggtgagagagggagctacaacgcggcggacgatggtgaatgcgtcggtgtcgagtgtagctatccggggtgagagagggagctacaactggtggactgttcgtacaccctcttgaccagagtgtagctatccggggtgagagagggagctacaaccctgatccaactgattcaggtacggctgcagagtgtagctatccggggtgagagagggagctacaaccggtggactgggcagcttgggtgctgttgagagtgtagctatccggggtgagagagggagctacaacttccagccgaagcatgagcacaaagaagcagagtgtagctatccggggtgagagagggagctacaaccacgatcagcatcagcaggcaggcctcgccgagtgtagctatccggggtgagagagggagctacaacggctgaagttgtcgcacttgagggtgccgggagtgtagctatccggggtgagagagggagctacaaccttttccttcggaacgccgacaccctttcggagtgtagctatccggggtgagagagggagctacaactgcgagcgaaaaggactacggggatgagcagagtgtagctatccggggtgagagagggagctacaacggcaattgattcgctgcacacccaatagccgagtgtagctatccggggtgagagagggagctacaacacggccagcagcttgacctgctcgcccgacgagtgtagctatccggggtgagagagggagctacaacgcagcgcggatgtcatcactgacttcatccgagtgtagctatccggggtgagagagggagctacaacgtaccagtcgcggttggcgccggcggcgttgagtgtagctatccggggtgagagagggagctacaacaggcagcgtgaacaccccccggccccgcgggagtgtagctatccggggtgagagagggagctacaactgcgcacggtgtccaccagcgcgcggaactgagtgtagctatccggggtgagagagggagcagtgactttggtcaggcgggataacccgcctgaccaaagtcagcgcttcgcgcaggtcgaccaaggccatagcatccgcctgccccttcggtcgcgctctgccatttgtagctgctggcgccgcacacatataccctgacagcacattggcgacctgatcgccgccacctcaccgtcgcgcagcgcccacgaaaaagcggccctggggccgcttgtgcttgggtcttctggcggagacggagggattcgaaccctcgatgaggctctacaccccatactccct

SEQ ID NO: 2923 - DNA, 11178 bp, synthetic construct
  misc_feature 1..11178: note = Synthetic
  source 1..11178: mol_type = other DNA
ggtggcaacccgcaccgactacaagctgatattcccgcgcaccgaataccattgcgcgcgctgcggcggacaccagggccatgtcttcaaggacggcccacagccgaccgggctgcgctactgcaacaacggactcgcgctgcagttcgtcgcacgcagcgacaagctgccggagttgcgcgcttgatcggcgcgctgcgtgggctggctgggctggcctggctggccacggccctgctggccgcgcctgccttgtcgcaggcgcccacggcaccggcgcaaacggcgacggccattttcgccggcggctgcttctggtgcgtcgaggcggatttcgacaagctgccgggcgtgatcaacacggaatcggggtacaccggcgggacggttgccaatccgacttacgaactggtcagcgccgaggtcacgggccatgcggaagcggtgcgggtcacctacgatccggcaaccctgagctatgaacgcctgctcgactacttctggcgccacatcgaccccaccgtgaagaacgagcagttctgcgacaccggcaccgcgtatcgcagcgccattttctacctggacgagacgcagcgcctggccgccgaagccagccgggaagcgctgctgaaaagcggaaagttcagccagatccacaccgagatcacggcggccggcgcattctggctggccgaggaatcccaccagaactactacaagaaaaacccgttcaggtactacttgtatcgcagcctgtgcggacgggacgatcggctgaaggaagtgtgggggaaaaacccttaggaggtttcaggacgccagcaccagcgccagcgcgatggcgccgggcagcgcctgcacccagaggatcgtccggctgacggtgagcgcgccgaagacgccggcaacgatcacgcagccgagaaaaaacaccttcactggcccgcccgccgcgcccaagagcaggccccacaccagcccggcgacgaggaagccgttgtacaggccctggttcgccgcgaggtttttcgaagccttggcaaactcaggcttcaggccgaagatgcgcctgccgagcggcttgtcccagtagaacatctccagcatgaggaaattcaggtgcagcagcgcgaccagcgcgacggcgatgttggcgacggttgtcatgttcgctccttgggtagtcagcgtttccgcccggtgaaatcgtccatgcttttcgtgatgccgaagaagcccatcagcgcgtcgaaccatgcagtcggcagcaggcgcagcgggaaggcgcagcgcacgaaccagggcaggatcaaccgcgtctcgtcgcgctcgatggcgcgcacgatgcgcgcggcgacggcctccggcttcatgatcggcagcagcagcgggaagcgcgtgcgcacgccctcgaacatgccggtggcgacgtaatacgggcagaccacggtggtccgcaccggcacgctgtcgtgggcgaactccaggcgcagcgactcgtcgaaggcgatggcggcagccttgctcgccgagtagtcggccaggcgcggcacggcagcgatgcccgaggccgaggcgatggtgacgatgtgcccggcgccccgctccttcatgccgggcaggaaggcgcgcaccgtgcggaaatgcgccagcgtgttcaccgcgaaggtgcgctcgacctcctcgtcggtcacctccagcatgcgcttgccatccacgatgccggcgttgttgatcagcacatcgaccgtgccgtgctccgccagcgtgcgcgccgccgcggcatcgatggaggcccgctcggcgaggttgcaggcatacgccgcagcctgcccgcccgccgccgcgacctcgccggccaccgccgcgaggtgcgactcgtccaggtcccacaagatcagccgaccgcccttcgccgcgatctcctgcgccatcaaccggccgatgccgctggcggcgccggtgatcagcaccttgcaattcctgaagtcggtcatctcttacccccaatgcggacattatggcccaggagccggccatcgccgtatcgcgggggctgactttcccggaattgcatgatggccccaccagtcgtaggattatgcgcaaggcatggtagggagaagttccggatagcgccgtactgcagcaactgactttggccagcccctgaaatgaaaaggcccgacggggtcgccgtcgggccgatccatggatacaggttaacttcacctttattgtagcaacggctctcaccccggaagactacaacggtttggattatggaaggaaaaggcatgactgacaagacccttgaaccactgactttcgggttcgacattggcatcgcctcggtcggctggtgcgtgctcggcgaaaaccgtatcgtcgatctcggcgtgcgctgcttcgacaaggcggaaacagccaaggaaggtgaatcgctgaaccttgcgcgacgtaccgcgcggctgatgcgccgccgcctgcgccgccgggcgtggcggctgaccaagctggcgaggctgctgaagcgcgaaggactgatcgcggacacgaagacgctccagacggccagccccaagtcgccctggtgcctgcgcgtcgcgggtctcgattgcaagctcgatgcggacgaatgggcgcgcgtcatctaccacctttgcaagcatcgcggcttccactggatcagcaaggccgataagaagaaagccgaaggcgacaagaaggaaggcggtcgtgtaacacaagggctgtccgataccgaacgctacatggaggaactgggcacccgcagcgtagccaagatggtattgaccaagttcccagacgcccaacgcaacaagcagggcaactacgataaagcgctctcgcgcgtcctgctggccgacgagttgtcgctgctcttcaaacagcagcgggaactcggcaacccccacgccacagcagaactggaagcggccattctcggcattggcgaccggaaaaccggtttgttctgggaacagaagccgccgctggccggcgccgatctgctcaagatgctcggcaaatgcactttcgagaaggacgagtaccgcgcccccaaggccagcttcacggcggagcgccatgtctggctgacgcggatcaacaatctgcgcatcgtcgccgacggcgtcacacggccattgaacccggaagaacgccgcattgcgctgcccctgccctatggctatgcgaacgcgaaactcgattacaagcaactgcgcaccgcgctagccaagaagactggactggacaacttcaacttcgccggcatcgccggggacaaggagaaggacgttctcgtcaaactgcccgcctgggaaatactgagcaagacgctcaaggccaagggcctcgaaacagaatggcaaggcatggccggcgccgcgaccggcggcaacccgacactgctggacgaaatcacccgcgttctctccgttttcaaggatggcgccgaggtcgaggccgaactgcgcaagctgaatctgcccggcggcgtgaaaatgatcgaggcgctatccgaaatcagcttcgacaagttccacaatctatctctgaaggccctacgcaagatcgtgccgcacatggaaaccggcctgcgctacgacgaagcctgccaagccgccggctaccaccacagccagctgcatcaagccggcgcgggtgaacacaaatatctgccgccgttctacgcccgccgcgacaaggacggccgcatggtgttcgccgaggacatggacgtaccgagaaaccccgtcgtcctgcgcgcgctcaaccaggcgcgcaaggtgttgaacgccttggtgcgcacctatggctcgccagcctccatccacatcgagatggcgcgcgacctctcccgcccgctgaccggccattggacagataacggtaagtacattgaaggccgcagggatatcgagaagttgcaggaggaataccgcaaacgtaatgaggacgacaaagctgtcttttcgcaggagcatggtgtggctcgcaacggcaagggctttggacgggacttcgagaaattccagctctaccgcgagcagaacagccaatgcccatactgtcagaatgcgctcgatctcaacaacgtgttgagcgataccagctatgctcaagtcgaccatgccttgccctactcgcgaagttacgatgacagcaagaacaacaaggtactggtgcatacgacttgcaaccagaacaagggcaaccgcacaccctacgaatacctgactacgcaaggcggcgaggacggagaacgctggattaggtacaaggtgtggattgaggctacttatccaggcaagaccaagcaagccaagcgccagcgactgctacgcaaggatttcacggggaaaaccgccgaggaattcaaggagcgcaacctcaacgacacgcgctacatctgcaagttcttcaagaactacgtcgaacgttacctgaaactaacgccgaaagcaggcgcaagcgagacggtggaaacaaaggctaagcgctgtgtcgtacttaacggtcagaccaccgcctttctgcgcgcccgctgggggctgcttaagattcgtggtgaaagcgaccgacaccacgcgctcgacgccgccgtggtcgccgcctgcagccatggcatggtcaagcggctggccgactattcgcgcaccaaggaactggccaaggcgcgcgacggcttccccgatcccgaaaccggcgagattctcgatccggccgcgttccagaaactcactgcccacttccccgacccatggccgcatttccgtcaggaactcgaagcgcggctcggcatcggcgatctgcgggaactgcgcgcccgactggaaacgttcggcacctacccgccggaagccctctccgccgtgcgtccgctgttcgtctcgcgcgcgccgcagcggagaggtggcggaccaatacatgaggaaaccattcgctcaacaaagcatgtatccgcaaacgtcagtcacgtgacagtccccctgcacaaactcaatctatccaagcttccggacatcatcggcgcgacctattcacgcaatgcaccgctaatcacagttctgcgtgaacgacttaccgcccacaacgacgacggcaagaaggcttttgccgagccggtattcaagccatccaagaaaggtaccaaaactcccgtcaagtctgtcaaactggcctctacacaaaacagcggaattcacgttcgcggtggtgtggctgaattgggcccgatgcaccacatcgaggttttcaaaatcggtcctcgttaccacctcgaacccgcttatcaagctcggcccgactgccgcatcaacccgcccaacatcccgaaggatgcggaatttctattctcgttgagcaagaacgattttcttcaggtcacgtttggagatcagcaatacagaggctacttcgtcatgtacgagagcgatggccgactgacgctgcgtgcccatgaccagcccaagcccgacaaggactatttccgccgaggcgtaactaccgccacgcgagttgagaaattccatgtcgatgtcctcggcaacatctaccccgcccctcccgaggtgcgccgtggtctggcgtagcgtcatgatctcccgtccggccaagctgagacgggaacactattcccttgccatcgagcaggaggaaaccgccttcgttcccttcgaggacattgccgtcatcgtcctcaaccaccgggaaattaccctcacccatccggtactgtcggcctgcgcagaatacggcatcggcctctacgcaaccggcagcaaccaccagccggccggagtattcctgccgttcctctcccattcacgcgcgacgcgcatgatgcgcaagcagctggggatcgccaagccggcggccaagcaggcctgggcctctgtcgtgcgccgcaagatcgagaaccaggcagcctgcctgcggctgtgcggaagcacaggcgtggacaggctcgaatcctatgcccgccgcgtgcgttccggcgaccctgaaaacctcgaaggacaggctgccgccttctacttctcgcagctattcggcaagaatttccatcgggccgagaagcgctgggccaacgccgcgttggactacggctatgccgtgctgcgcggcgccatcgcccgtggcctggtcgcccatggcctgcatccgacagtcggcctgttccatgacagcgagcaaaatgccttcaacctcgccgacgacctgatcgagccgttccgccctctcatcgacctgcatgtcgccaagcgatcggccgcaaccgaaggcgagctgattccggcggacaagtccgccctggttgccttgctcaatgtggatgtcgccatgccgcaaggcaggatgtccgccctctcggccatcgaatacgccgtggaaagcctggtgcgcgtcttcgaggaagacgccagggaactggatttgcccgtcctgatcggattgcaaccccaccgcctggagtgctgaggtgggtgtcgagacgagacgatacatgcgcctgctcgtcttcttcgatcttcccatggttaccaaggccgagaagcgcgcctatgtgcaattccgccgcttcctgctcaacgacggctacgacatgatccagtggtccgtctatagccggcttctcaacggggcggacgcacagcagaagcatctcaagcgcctggtcgaaaacctgccacccgatggatcgatccgctgcatgaccgtcacagagaagcagtatgccggcattcaactgctggtcggcatgccgctttttcaggaaaaaaaggtcacggcagaccagatgctgcttttctgaattccgaaattaaagaaaaaatccccgtccagcctaggccagacggggatttacgcgcatccagattgtagccttccggggtgagagagggagctacaacgtctgcacaggccggcgcgccggcgacgaggattgtagccttccggggtgagagagggagctacaacattttcaccatgctggtttctcttgagaaagattgtagccttccggggtgagagagggagctacaacaatgattcccgtcatggagcgtgtcggcctgattgtagccttccggggtgagagagggagctacaactcggcatcaaagccgaagggggcgattatggattgtagccttccggggtgagagagggagctacaaccccaaagggacgatctgctcgctgggtccggattgtagccttccggggtgagagagggagctacaacccgtcctccctggcggggaactgttccggctgattgtagccttccggggtgagagagggagctacaaccccgcgccgcttcgcgccgctggccctggcgattgtagccttccggggtgagagagggagctacaacactctattggcgctacaagattccggagaggattgtagccttccggggtgagagagggagctacaaccgctgacaagccggtgttcttcgtggatacgattgtagccttccggggtgagagagggagctacaactcctgttcgaaggttacgccatgagcgtgggattgtagccttccggggtgagagagggagctacaacgcttcttcgatgacatcctgcgtggcgggaacgcgaacgccgccgcagccgggaacgccgcaggcgcgaggttcgcaagcgacgattcatggaagtacaacccggtcagcaacccaaccggcacgacctacaactaagaggtgagccatgttcttcagacacttcactgcactggtttgtccgatagggttcctcaagctgcagtgggctgcggctcctgttgcggcggaggcggcagcgccggcagtagcggcatcgctggctgctgaggctttcccggtcgtcactgccgggatgcctgaactcgtaggggcgcttgcgcccggcgcgactacatggacgatggcgaatgccggactcccctccatcttctcagagcttttcagcccacagtcgctcttcagcccgcagtcgctcatgagccttggcggcaacctgatacaacagagcgccctcgggggcgctcaggacaacatcaacagcgccaccgaagccgagcagttatatcaagcggagaaggagaggaagcaggccgaggtgctgaagaagttcggcgaggagaacctcaacccgaatgcagaggcgcagaacctgcaggatgcggcgctggcgcgcgaggggagcatcggcaatgccctgactcgggcgagagaggctacgccactctcgggggccgcggggcgcgtctcgcaggacttccttgaccgacagtcttcgaacacggcgaacaatgctgcgagcatagccgacttcttgcgactgtgggcgagaatgaatgcttaccccgacaatgcccgcagaaccgccatcaatatgagccaagccttcggcaacgccaacaacatcatgggcgatgcacggacgcacgcggcgggcgcggcgcagggtattcagaacatccggcccgacgccggcatgatgctgttcggcagaatgctgagtggtgccggctcgccgccaaagtaaaggagaagcacatgcctagcagctacgtcgattggggtgaggccggtaccgggatcgggagcgcgatgcgcagcctgttcggggatcagacacagaacccgcactaccaaaaggctttcaattccagcttgggggcgcaggcgcaactcggcaacatgcgggtcaatctgcagaaggagcgccgcgctggcgaggaagagcagaaccgcctgaacatggccgaactgtttggcgcctctcatggtggtgtgactctccctgacttccgcgccttccgccaacagcaagccacgggtgtgccggcgacgacgatggagaacctcccgcctgatgtcgccggcccgccagcgactgtgccgaagttcaacccggatcaaaccaccaagctgatgcaggcgctgcagcactacgccgcaatcgcgggcggcaagccgaatgatatcggcagctacatgtcgaacatggcgaaggtacccggcgagcaggccacctctgacatcacccgcgcgctggctgacgctttcatgagggcgtcaggggatggaaatcccgctggcgcagaccccatgatccgctccgggcaggccgctcttgggcgcaacgtgctcaccgacaaggtacccgccaacgtgcagacggcgcagtggatggcgcagaacccgaacgacccggcgatgaagttcctgcagcagatcctcgcccgctccggcagcaatgtgaatgtcttcagcggcgctcaccaaggcgtggatgcggccggcaacccggtcttcttcagcaccaacaaggagggtgtgccgcgcatcatcgagggcatcattccgccgccgaaaccgaagaccatcgatcaggtcatcgctgaccgtgtcgggccggcgcttgagaagaagctgacggagcgcgacaccccgccgctaagtgcgctcaaggagggcaagaacaccaccttcaaaaacggccagacttggacgttgcaggacggcaagccggtgagggtcaagtgagttgggaagtcgttaaagaggaagacgtcagccccgggtgggaggtagtggatacgcctgcgccgaagaagaccggcatcttcaatgcgctgaccagcatgttcgattcgcccacgtggaacgcattccgccgtgacgagcgggccacgggcaacgacctcatcatgagcgggctgaacacggccgcgagtgccgtaaagggacttgccaccgaggggccgggcggcttcctgaccaagcccatgcgcgacttcttcgagaggagtgctgcggcgcggacgctgaacaaccgctcagtgatggaacccggccggcaggaagtcaccccaatggggatgacggagtccgacctcaacttggcgaagacgctgcagaaggtgaatgcccctcgtgctgcatcgccctccatgacggccccggccggcgaggtcatcacgacgcagccgctaccgatcatgccgcgccgcggtgatgacgtcatcaatgccgtggccgagttcgccaaggaaagaataaagcaccccattgaatcagcgcagagcacgatgcgggctgtcgagacgggggtgccgatggcgcaccgttccatggcccgcactggctcgcagattggacagcttgccgccgacgcggttggcgccgaggatttctcgaaggggcaggacgcctatcaaaaggaactggacagggctgacctgatcgcgagggggcggctcggcagctatctggaaagcattggcgcggaagccgcgtctcaggcgatcaggcaagccccgggcatggctctctacctagtgaaggggtcgcccacccttgccaaggcgctcggcctgacgaccttcgccgaaatgccttttgcgcaaggctcggctgaaatgaagcaggcgggcggcggcattgccgagcggattctctacggcgggctgcagggcgcacaggaagccgcgaccgagatcccgcagatggaaacgctggcgcgcgcggttccggccttcaagcgcggaatgagcgggcagaaccttgcgaagatcatgggcttctaccctgcatcggcagcgatggatacgggcggtgaagtcacctctacgctcatcggccacgagttgtcgaggatgatcgggcaggtgccgggcgacgacgatgtgaagcgcgacatcctcaacaccgtgctgcagtcgctgatgcagggcgggatgcagacgggtggaacgcacgcagtagcgcgtggcggcgcgctggcgaaagacaccatggacaaagtgctccccgtcggaatgggtgatgtagcaaaggcgttcgagcaggacttcagccgggagtttgcgccggtgacggaaagcgaggtgcggcaacgcttcgcgcaggacgcacccaaggccgactggacggtggtgagcgaagagccggccggcctgccgattcagccgatgcaggtaggcgagggtgggcggcgcggcgaagtgtcgcgcgacgtgaggacggaaggtgcggtgacatgggacaccctgccggataccgcgctcgaagccattgcgcccaaaggcttcaccgtagaggacatgcgcgaggtgggcagcaagattctggcgtcgg

SEQ ID NO: 2924 - DNA, 11150 bp, synthetic construct
  misc_feature 1..11150: note = Synthetic
  source 1..11150: mol_type = other DNA
gcctgcgcctcgaggcgtgcgcgtacctcgcggtcggccgtggcctggttgatggcgcgcaccagcgtgctcatgaccggggcgggtaccttcgctggcgcgacaaacccgtagtaggtggcgtattcgaagccgggcagcccactgtcggccaccgacccggtttcgagcggcgccttcatcccttcgcgcgacgtgaccgcgagcgcgatgagcttgccatcgcgaatctgctgcagcacgaaaggaatcggcacgaagatcacgctcacgcgtcctgcgaggaggtcggtgagcagctccgggcccttgtacggcacatgcaccagttcgataccggcgcgtgctgcaaaggccgccccgcccagatgggtggtcgtgccaacgcctgccgacccgtagttgacggaaccgggccgtgcccgggcgagctcgatgagctcgcgaatgctcttcaccccgaggctcggatgcacggcaatcacgctgggtgcctcggcgatcatggctaccgcgctgaaatcgagcagcgtgtcgtagggcaggctcgggtacaggctcggattgatcgagtgctgcgagttgacgatgaggatggtgtagccatcgggcgcggcacgcgccaccgattgcgcggcaatcgtgccaccggcacccggtcggttctggaccacgaccgactggcccagcgcggctgacagtcgctcggcgtagaggcgggccacgaagtcgatggtcgtgcccgtggacaagggcgcgatcagttgaatcgggcgcgcaggccagcgctcctggccgatcgtgcccggtgaccagagcgtggcgaccgttgcgagcgtcgcgaggagagcgcctgcgagcggggcgagcgccgtccggcagcgtgcccgagagcggttccgggagggcatgggtcgtgtgcgtgtcattgcttgcattggtatcggagggtggtcattcgggcaccacacccgcctcgcggatgtaggtgccccagtcggcgcgggcgcgacgcatgtgctcggccgtgccctgaggcgtgcgcgtgccgcccgtattgcgccagcgcagtcgggccaggtcctggttgaaacgcgggttctcgaccacgctggcggccacccggttgatgcgctcgaccagcgctgccgacatgcccggtggccctgcgagcaccatgaaggagggttgccggtagccaggatagaggctcgggagggtctgcacctggggctgatcgtcgagcggttcgctcaccgcaagcgcacgcaggcgcccggccttcacgttctgctccatcgacgcccaggcatcgaggtagagcgtgactcggcctgccagcacatcctgcaccgcctgcggtgccgacttgtatttcacttcgagaatgtcggtgccggtgcgcttgcccacccaggcactcacgaccgagaagaggggcacgatggtcgccaccgacaggcggcctggattcgcgcggccccaggcgctcatgccggccagtgatgtgaagggcagcgacgggtgtacgaagatgcccgtgggaccggtgtcatcgaccaggaccgcgatgggggtgaagtcgcgttcagggtcgacgggcaggttctttcgcaggtgcgggtcgatgccgaagatcgactgcgaggcgaagaaaagggtctgcccgtcgggcgctgcgtgcgccacctgatcggctgcgatgtagccatcggcccccggccggttgtcggtgaccacggcggtgccggtttctcgtgcgagggcgtcacagaagatgcgtgcggcaaggtcggttgcggtgccgggtgaactgcccagcaccaccttggtggtggcgctgggccatgcggtctgggcgagggccggggcgctgccgagtagcgtcgcgaggagcgtcgccggggcgatgaccagggtgtgcgtgaatgcagtccggaggcagcacgcgaggctgtccacaaaggcgtgaacccgggtcggtgcatgcccctgcctgccgctccgagtgcggtcgtgcggggtcatcgttgtctcctccagtgaggagtcggagtttaactgcccttgccctgtgcgtctgcccgctgccgggcttgtaccgtggtttccgggtgcattccgatccgacaccggttgctttcgccgatgcagggttcttcgccaggttacaagaggagccatgacggacgcgtctggtctcattgcgccgacccgtcgccgctcgttacgatgcgggcatgtcgacacttctactcaccggcgccagcggattcattggcgtgaatatcgtcgagcgtctgctcgggcagggccacgcggttgtggggctctcgcccgatggtctgcccgcgcttgcccatgctgcgatggctcgcctgcccggacgctatctcgacctgatcggggatgtgcgagatgctgccctggtagcgcgcctcttcgccgagcatcggttcgatgccgtggtggctgcggccgccattaccgcagggcccgagcgcgagcgggccgggcccgccagcatcatcgaggtgaacctggccggggttgcccgcatgctcgaatcggccgaggcggctggcgtgcggcgcctggtgtgtttttcgtcgaccgcggccgtgggcgagcgcgccttcggtgcggcttcggtgctcgaaaccgaccgccctgagccgctcacgctctacggcatcaccaaggcggccctggaagatctggccgtgcgctggaattcgttttcgcccgggtgcgagatggcggtggtacggttgagcgcggcattcggtccgtgggagcgcgcgagtggcgtgcgcaacacgctctcgcccgcgtggcagctggcctcggctgcggtcgaaggggtaccggttgcgcccttgccggcaggcggtgcccgtgactgggtccacgccccgtgggcagcgcgggtggtcgagtggctggccctcgagccgcatctgccttcacacctcttcaatgtaagcgcgggccggctgtggcatccgcggctgatgatcgagtgtctggcggctgccggcttgcccgtggccgagtcaccgggtggccgtgaggtggcctttcacgatgacctgaaccgtctgcgggtcccgctgtcggccgggcgcatcagccttgccatggcgccaccgcctgcccctgaggtggcggcggggcaatacgctgcgtgggtggtggcgcaccgggcgtggtttggcggttgaggtgctggcgggtcagcccttgccggcctcggcctcgctcaatccggctcgaggctctcactgaccccatcgcgcagcgcatgcagggctcggagcagttgcgccctgcgtcggcatggcacggacaggccgcgaaaagggtcgaccggaaagaggtcgtaggtactcaggtcatcgctgcggagggcgggcggcgcgcagcgctttgcgacccgggtgttcagcgtgagggtgatggggtaggcgctggccagttgtgcggccagcaaggcggcgatgatcatcggtgaccctttggagccggacccgtccatcggagtctgggcgggtgtttcagacgcggaaaggtcaggatgaggccgggctcgctcatggggtgagcctgacgccacatggactggtggagaaaagggccaataacgccgtgtcgtggctctgcgcgcggacatcaatcgccgcgcacagtgccttgcgatcaggcagtcggagaacgacttgatgcccaacccggatggatgagcgagcagtgcaagcgcgccagcaaaaccgacgtgcggatcattgatttcttcgacacggcccatcctgcgcttctgcggatgtgggacaagcgccagcgtggctatcgggcgatggggtatcgcatcgaggagtagcgcgaacttggcgaaatcagcgaaattgggtgccagcaccggcattcgtcttctatgagcgcaatagttgcgacaaatgctgccatggatgcgacaatcctgccatacgatcgctctgagaggttcccatgtccgaacgcatcaacgctcgtctgtcgcaacctttggctgaattcgtggatcgaatggtcggcgaggcgggtctttacgaaacgcccagcgaatacgtgcgcgacctgatccgccgcgacatggaacggcgtgacggccagtttgtgcaggacgccatcctcgtcggttatcgagacttggtggcgggccgcgtctttgcgtccagcggcgacttcaaggccgacatggcggtgctcgaccgcaaggaagccgatggctggcaatgatgtgccatcgcccgccacgttcctgttgacccggaatgcggcgctggatttgcgccgcatccacacgcggtcgcgccgtgaatggggcgaagacgttgccgaccagtacctcgccgatctgtacgtggtcatgggcgttgttgccgctaacccggagaggggccgcttgcggcagtaccgttcggctccgtttctgatggttccagtgcggcagcatttcgtgatctacgacctcgtgccacacggcatcgcagtgttgacggttcaacatcaggtgcgcgacatcgaatccttgatcgcggacctgacccctgccttccacgccgaagtcgagcggctgaaacgaaaggcctgattgcacccgctcacgcccgcagcttcttcgtgtcggatacatccatcccgccgaacttgctgcgccacaggtggtagcttgcttccgagaacccgtgccgtcggcacaactccttcaccgccacccccgcctcggtctccttcaggaaccccatgatctgctcttccgtaaaacacaaagcggcggccagggcggccacagggtcgttctgtagctttccggggtgagaaggagctaaaaagaccgtgttatcgggggcgataacattgcattcgggccgctggaattgacctcatcgcgcagcgcatgcaggctcggagcagttgtgccctgcgtcggcatggcacggacaggccgcgaaaggggtcgaccggaaagaggccgtaggtactcaggtcatcgctgcggagggcgggcggtgcgcagcgctttgcgacccgggtgttcagcatgaggctgatggggtaggcgctggccagttgtgcggccagcaaggcggcgatgatcatcgttgaccattcggatcggagccccttcattcagagcctggacggggtctggcgaaagcagacggatcaggacgaggccacactcgctcatggggtgagcctgatggtgcagtgatctggcctcgaaggtcgagaccccgtgggctgcactgactcatcgggtgagcctcacgccacatagactggcggagaaaagggccaataacgcggtgtcgtggcttcgcgcgcggacatcaatcgccgtgcacggttccggacgatcagtcagtcggagaacgacttgattcctgccccatctgcagaggcgagcattgcaaacacgcatccgtctgatgttgcctgcgagcaagaacgtcgatgggtggttgcatgcacgaccgcgtgtatcggtcgatgaaataaataggcccgacaggctagcctgtcgggccggtttcggtacgtcgcccgagggcgacgaccttattgcagcaacggctctcaccccggaaagctacaatacgtgaagtctaactgaacgggacgacaagatgcaaacaacaagcccgccatacaccctcggattagacattggcatggcatcagtcggtgccgcgcttcttcttccagaagagcagcgcatcctcgcactccatgtccgaacattcgacaaggccgagaccgcaaaggaaggcgagtcgctcaacaagattcgtcgcgactcacgcttgatcaggcgccgattgcgccgccgaacgcaccgcctgctcaggctgcgacgactcatgaaacgggtcggacttgtagcggcgactacaccacaagactttaccctgccgggagtttcgccctggaccttgcgcgctgaaggtcttgatcgtcgattgaacaatcaggagtgggctgctgcgctctatcacatcatcaagcatcgaggctttcagtcgaatcgcaagtccgaaaccaagagtgatgaaaaagcaggcgaaatgctcgccggggtcggtcgtaatcaggcgttgttgagggagtccggttgccgcacggtcggtgaacttgccgcccgtcatccagcattcgctgatgccaagcgcaacaaggggggcagctaccttcacacctttgcacgcgccgatctggccgctgagttgaaactgctgttcgagtgccaacgtacccttggtagccccttcgcaaggaccgacattgagcaggctgtcaatgagttgctgcttgctcgtcgaccgacgttgtcgggcgacaacctgctgaagatggtcggaaaatgcacgctcgaaaaatctgaatatcgggcgccgaaggccagttaccgcgctgagcgatttgtctggctcgggaagctcaatggattgaaaattgttggtggcggtgacgcgcgtgtgctgactgaggccgagcgtcgactcatcatcgaacagccgtttgtcaaggcgaagctgactttcaaacaggtgcgcgccgcgctcgatctggcaccgcaccagcgcttcaacctgctgtcttatcgtaccagcgcaagcggcagtgaccgcgacccggaagacgcaacgctcttcgaagcgaaggcatttcacacactacgcaaggcgtatgaggctgccggattgaagtcgacctggcagcgtgatgccatcgaccccgatcggctggacgccctcgcgtacgcgcttacctgcttcaaggacgacaacgaagcgcgtgactggctccacaagcaagccatcccggccgaaatcatcgaagccgtgctgggcgagtccttcgacacgttcatccgtctgtcgaccaaggctctgaaggccttgctgccgcatttggaggctgggcagcgctatgacgaggcggcgaaagccgccggctacaaccacagccaaaccgaaatcgtcgcgcgcacgccccgcctgccccgacccgatagcgacacgatccgcaatccggtcgtgtatcgggcgctgaaccaggcgcgaaagctcgtcaacgccatcgtcgatcaattcggtccgccggccaaggtacacatcgaactggcgcgcgacctctcgaaacccttcgacgaacgtcgaaagatcgaacgtgagcaaaaggagtttcaggtcgagaaggagaaagccgcagccgactttgcggatcgctttggtcgcccgccgcgtggcactgacttgcagaagtggcgcctgtttcgcgagcagcttgatcagtgcccgtattgccagagtgcgctcgacatccatcggctcttttctgtggggtactcgcagatcgaccatgccttgccttattcacgcagcttcgacgacagcatgaacaacaaggtcgttgtccatactgtgtgcaaccagaacaaggcgaaccggacaccctacgagcacttcgggggcgccggcgacagcgaatcctggcagcgctttgtggcttgggtacagggcaacaaggcgattcgccaagccaagcgaaaccgcttgctgcgtgtcaacttcggcctagaggaggcgggtgaattccgggaccgcaacctcaacgacacgcgctacatctgtcgtgagttcaaacggatgatcgaaagccatctcacatggcatcccgaatcatcaggcagtgagcgttgcgtcgtgttgtcgggtcaactcaccgccttgctgcgcgcgcgctgggggcttgtcaaggagcgcgcagccggcgatctgcaccatgcgcttgatgctgccgtcattgctgcggcaggccgtgggttggtcaagcgcatggccgtctacgcacggcgcaacgaactggccagcctccgtgacaatattcccgatcccgagaccggcgaaatcatcgatgtgggggcgctgcgcaggcttgaggcgcactttccaaagccttgggagcattttcacaacgaactccttgcacgcttgtcactcaatcctgccgcacttctcgatggtgtgccggggtacagccccgagctgatcgccagcctgcgccctgtacgcgtctcgcgcgccccgactcggcgcggtctcggcgctgcgcaccaggaaaccatccgttcggtccttggcaataaccagtcggccgttaagacaccgctgacggcgttgagcatgaaggatatcgagaacattgtcgggtttgggcgcgacaccgccttgattgatgccataacagcgaggctcgcggtgcatggcggcgatggcaagaaagcgtttgatgcgaggcaaccgccgctgcgcaagccttctcaagacccggcgagggccccaatcatccggagcgtgaagctgcttgccactcaaaagagcggcattcctgttcgtggcggtgtcgccaataacggtgcgatgttgcgcgcggatatcttcttcaaagggggaaggtttcatgcagtgccgatatatgtgtcagacgcggtcaaggcgcaactgccgaatcgggcagtggtgcactcgaagcctgaagaggagtggaccctaatcgacgacagctatcagtttctcttttcgctgcacgcaaatgactgggtaaccattcggctcaagggtgaagtgaaggagggttactttgcagggttgcatcgtggaactggtgccgtgtcgctttggcttcacgaccgtaaccaagctatgggtagtggcggtcagtggactggtgtcggcatcaaaaccgccatgagcgtcgaaaagtaccacgtcgatctgctcggaggacttcatcgtgtgcgaggggaatcgcgtcggtcaatctcgcagaagcgcaagcagcactgagccgtgggttggcgcagtctagtcatcgcgaacccggcgatgctgtcgctggaaaaccgcgcgatcgctatcgcgcaaggtggcaacacggcgcgggtgatgctcgaggatgtctccgtgctggtgctggatcacgcccagatcagtctcacggcccccctcttgtcggcttgcgccgaggcgcagatcgtcgtgattacggtcggcgcatcgcatattcccaacggcatgcttctgccttacttgccgcatagtcgcgcgctgaaggtcatgacggcgcaactgggtatgagtgcgccgacgcgcaagcgcttgtggcaacggatcgtacaagtcaagatccgaaaccaggcgaccgtcctggaggacctgaggcatgagattgaggcacgtcgcctgaggcggatcgcctcggagatacgctcaggcgatccggacaatggagaggcgcaagcggcacaggtatatttccgaggcctgttcaatccgcattttcaccgcggtcaggagcggttttacaacgcggcgctcaactatggttatgccgttgttcgcgcagccatcgcccggaccctggtcagttatggattcttgccagcattcggcctgtttcaccacagcgaacaaaatgccttcaaccttgccgatgatctgattgaaccctaccggccattggtcgactcgtacgttctggcaaattaccccacagagccggatcagcagctggcacccaccgacaaggggcgattggtggctgtattacatgcggacgtcacgctttcgacccactctgctgtagacgcccggtgcaccatgctcgccgccattcaagccatggtttccggtctttcgagcattgtagtgagcgaggggtcgcatgaacatctcgccctgccgcggctcgataccgacacgcgtcccaagacgcaccgcatcttccatgtcgactcatgagtgaagaaaatcgtcgttacatgcgactactcgttttcttcgatctgcccgtcacgacccgcgagaagcggcgcatctataccgtcttccgacgctttctcatccaggacggctatgacatgattcagtggtcggtctatgggcgcatggccaacggcattgatgacgtcgaaaagcacatgaagcgactggttgacaacctgcccaaggagggttcgatacgctgtctgcaggtcagcgagaagcagttcgccaacatgcgcctcctggttggaacccgcagttttcaggaaaaacgggtcaatgccgaccagatgctgcttttctgagcaaaaaaagcagccccaggagacctaccggtccggctggcaaggctcctgaggcggacgattgtagctttccggggtgagagagggagctacaacaattgaggctggcgctgcatccacccatacattgtagctttccggggtgagagagggagctacaacttgtgcccgttgtactcctggcggcgtgcgattgtagctttccggggtgagagagggagctacaacgatgatgagggcggcgcggatcatgcttttattgtagctttccggggtgagagagggagctacaactgggctgagagcaggtagcctttgatgcgaattgtagctttccggggtgagagagggagctacaacggcgcaacgtggcgttgtcttctttgagccattgtagctttccggggtgagagagggagctacaactgccggcgcacggcccacttgtactcgttcattgtagctttccggggtgagagagggagctacaacctcgcgacgcagatcgcgtctgcctcgacaattgtagctttccggggtgagagagggagctacaaccgccttgtcgaggacgtgatcgacactgctattgtagctttccggggtgagagagggagctacaaccaatcattcaatcaggagcatgacatggctattgtagctttccggggtgagagagggagctacaaccggctttggtgcggccccgcaactgcctgaattgtagctttccggggtgagagagggagctacaacacatcattacccggctgttcccaaccacggattgtagctttccggggtgagagagggagctacaacctttgcgcggttgctgtcgtaacctgcgccattgtagctttccggggtgcccccggtgtcagaatagttgtcgcctcgatagaacctacgaacagggggcgatgatgaggacaggcaatggcaaggtacggacaaggattcaaagacaggg

SEQ ID NO: 2925 - DNA, 9653 bp, synthetic construct
  misc_feature 1..9653: note = Synthetic
  source 1..9653: mol_type = other DNA
cccatcctccgccagcaaatcccgcatcaaaatcagccgttcgtagatcatcgcaatgaacgaatccgcgccgcgcccccaggtgtcgcggtaggcgatctgctccagcaggttcggctccttgtggaaggtctcgccgccgatctcgatgtccatcgaaaaatccgcgccgacgtcgaacggcgggtcgatgtaaatgagcttcaagccgcccgcgtcttcgatctggcggcgtagcgcgccgctcttgagcgaggagagaatcagcttgttgtcgccccagatgagcttgttggtccagcccttgagctggcggccgcgcgtgtcgaacaaatcgctctgaatctccggcgcttcctggcgcggttcgtccacatgctccagcgactgaaacggcagcacggtggtgcacacgtcgcgggtcttgccgttccacaccagttccacctcgcgcttgtcctcgaacaggatgaagcggtatttctccggcagcggacggccctgctggatgagctgggtcaggtcgcgcttttcggcgtctgaaagttcgtaggtttctttttgcgggcgggccataggggattgcctttgtgtgcgagatggtcaggctgtcatgaagggctcttgtccgttttccgcgcactgttctgcggcatgatgcgcttcatgaagtcaccgaacaggggcacagtaaatgcggtgtctccgtgggccgggctgtagaccatgccttttttgatcaggctattgcggatcggcgcaacactttggactttgactcccagccgttctgcaatatcacctgagcgatgatggccttcgcccaagtcggctagtgcgcgcagatattccttctcacgcggggtcatgcggtcgaaccggacacgaaagaagttggcgtcaagccgccggatggagtcttgcgttgcctgtctgacaacatcaacttctatcggcgattgggccgcaagattccatgcctgataaccccattcctgaaggaagtatggataaccctgagtctggcgaatgatttcgcccagcgcctcgtcagtaaaacggatctgctgttcaatgaccggctcctgcagagcagcagcggcgtcatccggctgcagcgggcctagctcggggaactggaacagacgctcggcgtaggatttggctcggccggaaagagcaacaagctgcggcaaaccggcccctatcagcaccacgggcaactgccgctgcgctatctgatgcatggccatgatcagtgcggagagttcctcttcgctcaggtactggagttcatcaatgatgagcgcgattgcggttccgcgatctgcggcggcttcgcccagtgccagaaataccgccgaaagatcggattcgaggtcgccgctatcggcgacgccgggttcggggtcgatgtcgatgcctatttcaatatcctgatatttaagcttcacgccattgaaaaagctcttgagtacacgcaagccgcgcttggctttttcactgatattggccatccggtccaatccgatcagcaactgacgcagcggcggcaacagcaacgcagccagtggttttccttcgtgcgcctcaatgaagaccggcttgtatcccgactgctccgcgagttcacgtatccggttcagcaatacggtcttgccgacaccgcgcagcccgactaagagcaggcttctttcggggcgccctgccttgatacggcccaaggtaatacgcgcctgctccaaaatctgggcacgcccggcgagttctggcgggggtgagcccgcgccaggtgaaaacggattatgtagtgggtccatatacaggaatcttatgtgaggttactattgtatatattaaaattgataacttagcataagatcaatacatctacccataatctcaagcttggtattgggtaaagcttgcaaccaaccccgcgaaattctgcggcgggttgcgctcgtaacctgcttgatccacatacacgaatcggtaagccggcccgttcccggcctggcttgcactcgtggcgtcctcacaccactggcgcaggcgggtcattttctgcggcaggtcgcgttcttcgcggcctttggtctcaacaatccagaccgtgccgtcggcggtcttcaccatgaagtcgggcacatagttcgagaggtcgccatcggccttgacgtagtcgatcttgaagccgatggcgaggtagtttttggcgaacgctgcaacgtccggcgcagcgtcgagaaaaccggcgaaggtcagttcgaagccaccggcgttcggctcgccgatgattttgctgaacagcgattttttcggcgtgaggcagggccggttctcggtgcggaaggggcgcgtatcgcgcaagcggatgcggtcttcgatgcgcactccgccgctgtcctggatggtgagcgcgttgatggcggttttgaacgcatcgaacagaatcttcccggcctcgggctcggaaagattgcgcagcaccaccgggtcttcgagattgaccggcgagcttgcgaacaaatgcccggccatgaaggccttcaccttgggataaaggatgtcgtagccgccgacaaggcgcagttccttcaataattgccgcgcgaaaaaaccgatgacggagcggtagtcggcggggccggcgccgtcgagctggatggtgtgatgcacttcggcgtcgagcatggtcttgaagacgatctcgcgggtttgctccggcgtaaagggcttgagcgggagtttggcagtgccgaattttgcggggtcgagcgcggtgatgtctttgtattcgcggttgaaacgccgcgtgagccggggcagctcgatgtccagcgcgtcgaggtccttgtcggcgtcctgcgtgtctatctcgacaatgagcgactccttgcggccggtgcccggccccatcggcacatgctcgaaggtgacgccttcgctctggatggactcgacgaattccatgaaggcgggcgtgcccatgaccgaaacggtttccggcatgtccgagccgaagtacatgcggcgcaagccccgccccagggtttgttcaggcaggatgttgctctgtgccgcataggcgcgcaggccgacgatggtggtgacgttgcgcacgtcccagccttccttgagcatcaagacggagacgatggccttgtgcggcgaggcccatgtgtcgatgctgttggcttccttgcgcagcttttcgagttcatccttgttcttgcccgaggcggcttccgaaatctcgccgttgtttttggtgtggatgacgagcacactgccttccagttcagggcagattttctccagatgagcgccgacttcatcgcagttgcgggtgtcgtccaccatgacgaacagcaccgcttttttgcccagcggctggtgctcagcgtaactcttgcgccattcttcgacgccgagttgcaggtagtccgcgtaacgctcggtgaagatcgcgctcttgtgctcttgcagccggtcgcgactgacagcatccggcaacaccgggtgtttgacgacatcctgatggatggcctcgaccagcggatagtcagcaaccgtctgcacgaagatcgcaccgttgttgtgacggggcgtggcggtcacgtccacctgcaaggcgagacggccgtctttttgcaacatgcggtgatgaatatcctggatgcttttgaaccaggccatgcgcgggtcgtggatgtgatgcgcttcgtcgttgaacacggccagttcgtcaatctcgcgcacgatctcgccgaggtcggttttgctgtcagtggttttgccgactggcttggcgccgaagggcgaaaggaaatagtcgcgcaggtcgtcgtcatccagcgacggctcgcgcacgtcgccgagatagacgcggtggatgttggtgagaaacaggttgcccgtatcgcgtaccacgcgcacgtcgtcctggatatgcagcgtgagctggaagtcgtcgcgccagttgcggcctgcatggccgttatccggcaggatcggatcgttgaaaaaaatgcgcaggccgtcaaagtccgcgcgcaggcggtccagcacgatgatgttgggcgcgatcaagaggaagttgcgcgccaacgttgaatccgcttcgtagcgcttgtgaaaaaagctccaggcaatgagcagcgacaaaaccttggtcttgcccgcgccggtggccattttcaccacgtagcgcggccagtcttcatcgaacatgttggcggaaacggcgcccgaagcatcaaagcgcagcagatcgaacttgtcgcgcaccttcttcacatcatgcagccagatcaccgtttccaccgcttcgcgctgagcgaagtaatagcggaacggcgacagcgcgccatcggcctgctcgacaaggtgttcggcctcgaaccaccagttcaacagcgcacgcgaggtctccgaagcgcccgcataacctgcgctccgccacgccgatacctcgccgcgaatagtggcgaccagcggcggcagcagctttgcataggattttctaagttcttctgccgccgggaaccagcgttgttccggcagtaattcggcatagggggatttcggaaactcaggatgtagcgccatgggttagcagatgatctgtttgtaaagtgattccaaccttccttcgtactgcgagcaagacgatgtataagccaagcgaattgtagctttccaaggcaggcaatgaagcaggactgtcgaggctgctatcccttattttcacctccctggccatacgcatggcatgaatcgctctttgagcgcttcgtacaggacatcatttgccgccatagttaattttcacgccgtatcaccagcgccgacttttttcatcgcgacatcccagttttgctacatccaaggtgaaaaagcatcaacagttatttgcggcgctgatgagacgctaaagaccaattagcaggcctttggattttgaatatccaaaatgtctaaagcaaaataaaaggcccgacaggcaagcctgtcgggccggactcagtacgccgccctaaggcggctactttattgcagcaacggctctcaccccggaaagctacaatgacgctattctaatcaaaatggatggcagtatgcaaaaagaaaacagaccctacacgcttggccttgacattggcatggcttctgtcggcgccgcgcttttgctacctgagacacaacgcatcctttcgctttatgtacgcaccttcgataaagccgaaaccgcaaaagaaggcgaatcactcaacaaaatccgccgcgatgcacggcttatccgccgtcgcatccgccgccgcgcgcatcggctggtgcggctggcacgcttgatgaagcgttatggcctgatcgaagccgccacgcctgaatcatttgcgctgcccgatgcctcgccttggggcttgcgcgccgaagggcttgaccgcttgctcgaacccaaggaatgggcaagtgtgctgtatcacctggtcaagcatcgcggctttcagtccaaccgcaaatcagaagccaaggcggacgaaaaggccgggcaaatgttgtctggtgtgagccgcaaccaggcattgcttaaagaaaccggctaccgcaccatgggcgagttggccgccaagcacgaaaccttcacggacgccaagcgcaacaaaggcggcgcttacacacacctttgcccgcgctgacattgaagccgagctcgccctgcttttcgagcgccaaaacgcattcggttgccgtatcgccagcgccgacttttacgcagcagtgcatgacctgttgctggcaaggcaacccacgttatcaggcgccaacctgctcaaaatgatcggcaaatgcacgttcgaaaaaagcgaattccgcgcccccaaggccagctaccgcgccgaacgttttgtctggcttggcaaactcaacaacctcaagattgtcggtggcggcgatgcacgatcactcaccgataccgaacgccgcatcatccttgatttgcctttcacccaggccaagctcaccttcaagcaagtgcgcaaggcgctcgacctggaagcccatcaacgctttaacctgctctcttaccgcttcgaccccaaaggccgagacaaagacccggaagaatccacgctgtttgaagccaagtactttcacaccctgcgcaaagcgtatgaagccgccgggcttaaagccgaatggcagcgcgacgccatcaattccgaccggctggatgcgctggcctatgcaataacctgctacaaggatgacaccgaagcgcgcgactggatggctgcgcaaggcatcgaatcccaaatcatcgaagccgtgctcggcgactcatttgaccaattcatccaactctcgcaaaaagcgctcaaagccattttgccgcacatggaagcgggccagcgttatgacgaagcggtcaaatccgcaggctacaaccacagccagcctgatgcagcgacagaaaaacgaaagacgctgccagcgcccgataaagacattatccgcaaccccgtggtgtatcgcgcgctgaatcaggcgcgcaagctcgttaacgccatcatcgccgaatatggcccaccggctgccgtacacatcgaactcgcgcgcgatttatccaagccttgggacgagcgcaagaaaatcgagcgcgagcaaaaggaatttcaagtagaaaaagaaaaagccttcgccgactttgaagaccggtttaactttcgccccaaagggccagacttgcaaaagtggcggctgtttcgcgaacagctcgaccaatgcccttattgccagcaagcgctggaagtggatcgcttgtttgaacccggctacgcccaggtagaccacgccctgccctattcgcgcagctttgacgacagcatgaacaacaaagtcgccgtgcacaccaaatgcaaccaggacaaaggcaaccgcacgccgtatgaagccttcgatggcgcaagcgacagcgatcactggcaacgctttgaagcctgggtgcaaagcaataaagccatacgccaggccaagcgcaaccgattgctgcgcgtgaatttcggcgcagaagaagcggaagaattccgcgaccgcaacctgaatgacacacgctacatctgcaaggaattcaagcgcatggttgagacgcacctggcttggcatccggacagcacggcggataaccgctgcgtggtgctctccggccaactcacctcgctgctgcgcgcccgctgggggttgctcaaagtgcgcagcgaaggcgatttgcaccatgcgctggatgctgccgtgattgccgccaccagccgcagcctgatcaagcgcatgtccgattattcgcgacgaaaagaattagcaacgttgcgtactaacattcctgatccagaaagcggcgaaatcattgatgttgcagcattacgccaaattgaggaacatttccccatgccttggccatacttttgcgaagagctgctcgcaaaactctcggcaaaccccagccagcaactggagcgcatcaccagttatgacgaagctatgcgtaacagcatccagcccgtgcgcgtctcccgcgcgcccacccggcgcgggctaggcgcagcacatcaggaaaccatccgctccatgggcaaggcaggcaagctgctcgctggcgggcaatcggctatcaagacgccactggccagcctgaccttgaaagacctcgacaacatcaccgagcaacgcgataccgcgctcatcgaagccattcgcgaacgcctcacggcctttggcggcgatggcaaaaaagcctttgccccgaaccagccacccttgcgcaaaccctcaggcgagggcaaggccgcaccgatcatccgcagcgtgaaactgcttgccacgcaaaaaagcggcatccatattcgcggcggcatcgccaacaacggcgccatgctgcgagcggatattttcaccaaagcggggaaatttcatgccgtgccagtgtatgcctcggatgcggtgaaaacagaactgccgaatcgggcagtcattcaagcaaaacctgaagaagaatggacggtaatggatgaaacctaccagtttctatttagcttgcatccgaatgattgggtctgcattcgctataaaaatgcgcctctccgcgaaggctattactcagggctaaatcgagcgactggcgcggttgatctttggctccatgaccgcaatcaaaccgttgctaaaaacggaatgcttgaaggcaacggcattaaaaccgccctcgccgtcgaaaaataccacgtcgacctcctcggcggcctgcatcgcgtacatcacgaggagcgccagccgatccaccggaaacgcggccgctaaacatgagctggcgcagcgttgtgattgccaatcctgccgcgcttgccttggaagaccgggcgattttcatccgccaaggcgagcgcgaagcccgcgtcatgctggaagacatcggcgtgctggtgctggatcacccgcaaatcagcctcaccgccccgctgctggccgcctgcgcccaagcgcaaattgcggtgattaccgtggatgactcgcacctgcccaacggcgtgctattaccctacctgccgcacagtcgggcacttaaagtgatgacagcccaactggctttaagccagcccgcgcgcaagcgcctgtggcaacggctggtgcaattcaagattgataaccaggcggcggtactcgccaaacacacccgccatgccgccgcacgccggttacgtcgtttaagtgatgaaacccgttccggcgacccggataactgtgaagcccaggccgcgcaagtttattttcgtaccttgatccatcccaactttggccgcctgcaaagccgtttttacaatgccgcactgaactacagctatgccgtggtgcgcgcagcccttgcccgatcactggttagttacggcttcctgcccgccttcggcctgtttcaccataacgaacaaaatgccttcaacctggcggacgacctgattgaaccttaccgcccgtttgtggatgcccatgtgctcaaacactacccccaagagcccgaccgcgagctggcgccgcaagacaaaggccagctcgtcgcgatattgcatgacgatgtcacgctatccagccatacggcagacgatggccgctgcactttgcttgccgccatagaagcgacggtatccggcttgtcgggcattgtgctgcacgatacgccacatgaacggctggccttgccgcgactgcaacatgtactcaatccatcgttcgtcgcgcctgacgacgaagacgactttgcatgagcagccgaacccgccgttatatgcgtctgcttgtgttctttgacctgccggtaaccacgaaagaaaagcggcgcacctacaccatcttccgccgttttttaattcaggacggatatgacatgatccaatggtcggtttatggccgcatggtgaacggcatggatgatgcggaaaaacatttgaagcgactctctgacaatctgcccaaagaaggctcgattcgctatttgcaggtcagcgaaaagcagtttgcgaacatgaaactgctggtgggcaccaaaaattatcaggaaaaaaaggtcaatgccgaccaaatgctgcttttttgatgca

SEQ ID NO: 2926 - DNA, 9016 bp, synthetic construct
  source 1..9016: mol_type = other DNA
  misc_feature 1..9016: note = Synthetic
cgcaagctggccatgaagcaccatcctgaccgcaatccggacaatcccaaagccgaagcgcagttcaaggaagccaaggaagcttacgagatattgtccgacgaacaaaagcgcaccgcttatgatcaatacggccatgccggtgttgatccgcaagcccgcagcggggcaggcggtggcggcggctttggtgatgccttctccgacatctttggcgatattttcggcggtggtggcggtagtcgctctaacatttatcgcggcgcagatttgcgctacaacctggaaatcacgctggaagaagccgcccgcggcagtgagacccgtatccgcatccccaccatggctccctgcgaagaatgcaatggttcaggcgccaaaaaaggcacacaaccccaaacctgccccacctgcgcaggccacggccaagtgcgcatgcagcagggctttttctccgtccagcaaacctgccccaaatgccacggcacaggccgctatattcctgacccctgcaacacctgccacggctcaggacgagtcaaacatcacaaaacactctctgtcaaaatccctgccggggtggatgaaggcgatcgtattcgcttaacaggcgaaggcgaagccggtgtaaacggcggccccacgggtgacctgtacgtacaaattcatctcaagccgcacgccgtcttccagcgtgaacatgacgacctgcactgcgaaatgccggtgagcttcaccaccgccgcacttggcggagaaatcaaagtacccacgctagatggcgcagcccacctgaaaattcccgctggcagccagaccggcaaagtattccgcctgcgcggcaaaggcgtcaagggcgtgcgatcacacgcccatggcgacctgctttgccatgttgtcatcgagacccctgtaagcctcaccgagcggcaaaaagaactgctgcgcgaatttgaagaaatcagccagggcaatgccggccgcaacaaccccaaagcccagggctggctggatcgggtgaaggatttttttagcgagtaaacacctcttttctaccgacaataccttgaaaagcgcggacaccctccgcgcttttttattcagcatagattaaaagtcggcaatgatgaggccctgcacagttgggcggtctagtagaagacgctcagctttgcagacccgaaattccgctttgcgggcaggtctcctcgccgctggcgatggcgaggcgagaattcgcagttcctgatacccaaagacaaaataaataataaaaggccacacaaaataaaaggcccgacaggcaagcctgtcgggccggactcagtacgccgcccgaaggcggctactttattgcagcaacggctctcaccccggaaagctacaatgtcatcattctaatcaaaatggatggcagtatgcaaaaagaaaacagaccctacacgcttggccttgacattggcatggcttctgttggcgccgcgcttttgctaccggagaaacaacgcatcctttcgctttatgtacgcaccttcgataaagccgaaaccgcagaaagaggcgaatcactcaacaaaatccgccgcgatgcacggcttatccgccgtcgcatccgccgccgcgcgcatcggctggtgcggctggcgcgcttgatgaaacgttatggcctgatcgaagccgccacgcctgaatcatttgcgctgcccgatgtctcgccttggaccttgcgcgccgaagggcttgaccgcttgctcgaacccaaggaatgggcaagcgtgctgtatcacctggtcaagcatcgcggctttcagtccaaccgcaaatcagaagccaaggcggacgaaaaggccgggcaaatgttgtctggtgtgagccgcaaccaagcgctgctgaaagaaaccggctaccgcaccatgggcgaactcgccgccaagcacgaaacctttacagacgccaagcgcaacaaaggcggcgcttacacacacacctttgcccgtgctgatcttgaagccgagctcgccctgcttttcgagcgccaaaacgcattcggttgccgtatcgccagcgccgacttttacgcagcagtgcatgacctgctactggcaaggcaacccacgttatcaggcgccaacctgctcaaaatgatcggcaaatgcacgttcgaaaaaagcgaattccgcgcccccaaggccagctaccgcgccgaacgttttgtctggcttggcaaactcaacaacctcaagattgtcggtggcggcgatgcacgatcactcaccgatgccgaacgccgcatcatcatcgatttgcctttcacccaagccaagctcaccttcaagcaagtgcgcaaggcgctcgccctggaagcccatcaacgctttaacctgctctcttaccgcttcgaccccaaaggccgagacaaagacccggaagaatccacactgtttgaagccaagtactttcacaccctgcgcaaagcgtatgaagccgccgggcttaaagccgaatggcagcgcgacgccatccattccgaccggctggatgcgctggcctatgcaataacctgctacaaggatgacaccgaagcgcgcgactggatggcggcgcaaggcatcgaatcccaaatcattgaagccgtgctcggcgactcgtttgaccaattcatccaactctcgcaaaaagcgctcaaagccattttgccgcacatggaagcgggccagcgttatgatgaagcggtcaaatccgcaggctataaccacagccagcctgatgcagcgacagaaaaacgaaagacgctgccagcgccggataaagacattatccgcaaccccgtggtgtatcgcgcgctgaatcaggcgcgcaagctcgttaacgccatcatcgccgaatacggcccaccggctgccgtgcatatcgaactcgcgcgcgatttatccaagccttgggacgagcgcaagaaaatcgagcgcgagcaaaaggaatttcaagtcgaaaaagaaaaagccttcgccgactttgaagaccggtttaactttcgccccaaagggccagacttacaaaagtggcggctgtttcgcgaacagctcgaccaatgcccttattgccagcaagcgctggaagtggatcgcctgtttgaacccggctacgcccaggtagaccacgccctgccctattcgcgcagttttgacgacagcatgaacaacaaagtcgccgtgcacaccaaatgcaaccaggacaaaggcaaccgcacgccgtatgaagccttcgatggcgcaagcggtagcgaccactggcaacgctttgaagcctgggtgcaaagcaataaagccatacgccaggccaagcgcaatcgattgctgcgcgtgaatttcggcgcagaagaagcggaagaattccgcgaccgtaacctgaatgacacacgctacatctgcaaggaattcaagcgcatggttgagacgcacctggcctggcatccggacagcacagcggataaccgttgcgtggtgctctccggccaactcacctcgctgctacgcaaacactggggattgatcaaagtgcgcagcgaaggcgatttgcaccatgcgctggatgctgccgtgattgccgccaccagccgcagcctgatcaagcgcatgtccgattattcgcgacgaaaagaattagcaacgttgcgtactaacattcctgatccagaaagcggcgaaatcattgatgttgcagcattacgccaaattgaggaacatttccccatgccttggccatacttttgcgatgagctgctcgcaaggctctcggcaaaccccagccagcaactggagtgcatcaccagttatgacgaagctatgcgtaacagcatccagcccgtgcgcgtctcccgcgcgcccacccggcgcgggctgggcgcagcgcatgaggaaaccatccgctccatgggcaaggcaggcaagctgctcgctggcgggcaatcggccatcaagacgccactggccagcctgaccttgaaagaccttgacaacatcgccgagcaacgcgacaccgcactcatcgaagccattcgcgaacgcctcacggcctttggcggcgatggcaaaaaagcctttgccccgaaccagccaccactgcgcaagccctcaggcgaaggcaaggccgcgccgatcatccgcagcgtgaagctgcttgccacgcaaaaaagcggcatccatattcgcggcggcatcgccaaaaacggcgccatgctgcgggcggatatttttaccaaggcaggaaaattccatgccgtgccggtatatgtctcggatgcgatcaaggcggagttgccgaatcgggcggtaattcaggccaaaccagaagaggaatggacggtaatggatgaaacctaccagtttctgttcagcttgcatccgaatgattgggtgactatccgattaaaaaatgaagtgcgtgaagggtattacgctggcatcaaccgtgcgacaggaaatattgatctttggctgcatgaccgcaatcaaaccctcgctaaaaacggaatgcttgaaggcaacggcatcaaaaccgccctcgccgtcgaaaaataccacgtcgatctcctcggcggcctgcatcgcgtacatcacgaggagcgccagccgatccaccggaaacgcggccgctaaacatgagctggcgcagcgttgtgattgccaatcctgccgcgctcaccttggaaaaccgggcgattttcatccgccaaggcgagcgcgaagcccgcgtcatgctggaagacatcggcgtgctggtgctggatcatccgcaaatcagcctcaccgccccgctgctggccgcctgcgcccaagcgcaaattgcggtgattaccgtggatgactcgcacctgcccaacggcgtgctgttgccctacctgccgcacagccgcgcccttaaagtgatgacagctcaactggctttaagccagcccgcgcgcaagcgcctgtggcaacggctggtgcaattcaagattgataaccaggcggcagtacttgccaaacacgcccgccatgccgccgcgcgccggttacgtcgtttaagtgatgaaacccgttccggcgacccggataactgtgaagcccaggctgcgcaggtttattttcgtaccttgatccatcccaactttggccgcctgcaaagccgtttttacaatgccgcactgaactacggctatgccgtggtgcgcgcagcccttgcccgatcactggttagttatggcttcctgcccgccttcggcctgtttcaccataacgaacaaaatgccttcaacctggcggacgacctgattgaaccttaccgcccgtttgtggatgcccatgtgctgaaacactacccccaagagcccgaccgcgagctggcgccgcaagacaaaggccagctcgtcgcgatattgcatgacgatgtcacgctatccagccatacggcagacgatggccgctgcactttgcttgccgccatagaagcaacggtatccggcttgtcgggcattgtgctgcacgatacgccacatgaacggctggccttgccgcgactgcaacatgtactcgatccatcgttcgtcgcgcctgacgacgaagacgactttgcatgagcagccgaacccgccgctatatgcgtctgctcgtgttttttgacctgccggtaaccacgaaagaaaagcggcgcacctacaccatcttccgccgttttttaattcaggatggttacgacatgatccaatggtcagtttatggccgcatggtgaacggcatggacgatgcggaaaaacatttgaagcgactctctgacaatctgcccaaagaaggctcgattcgctatttgcaggtcagcgaaaagcagtttgcgaacatgaaactgctggtgggcaccaaaaattatcaggaaaaaaaggtcaatgccgaccaaatgctgcttttttaatgcagaaaaaaccgccctcaaacccttgccaaccaaggctggcaagggtttgagggcggtctattgtagctttccggggtgagagagggagctacaacaaaccaagcctggtacatcagcacctgccaattgtagctttccggggtgagagagggagctacaactcatagccatccgccatgtgctggttgctgattgtagctttccggggtgagagagggagctacaaccatcgccctgcaagacgtcgacgtcgcagtattgtagctttccggggtgagagagggagctacaactgtcgtaagccgctgcaaaattcgctgacaattgtagctttccggggtgagagagggagctacaacatggccgatgcggggaaccccgcgccatgcattgtagctttccggggtgagagagggagctacaacgcgatgagctggatggcggatgataacgtgattgtagctttccggggtgagagagggagctacaacacccgtgccgccggtggcagaaaactcagcattgtagctttccggggtgagagagggagctacaacgccattaccagtccatcaatcccgtcacgaattgtagctttccggggtgagagagggagctacaacctcatgatttcggggtacgctaaaaacgcgcaccccaaaatcatgaggttcttgcttcgcaaggtctgcaagatcatggcaggctgaggctgctctgcttaacatggcgcatgttccgcccttacttgcaaacgtcaaatctactttagcagctatcctttagttgctatgatgattcgccgcctcaccagcgccgtctgattggatgccgcttcgcataacgttttatcagacagatacgccttacccaaattcaaactcatttgactaactgattcaaaatctttgttgttgctccaagcaaattgccatccgcgaacgagactatgccgcgcatccaaagctttcaacctgtggcatcccaaaatgcaaaagtcctcatccttggcagcatgccgggtagcatttcgctcatcgctcgccagtattacgccaacccgcaaaatgctttttggcgcatcatcgctgagttgctggggtttgatttttctgcaccttatgccgagagagttgctgcgttaaagtcggcgcgcattgcgctttgggatgtgttgcagtcatgcacgcgggaaggcagcctggacgctcgcatcgcccgcgataccgaggttgtgaacgacttcggggcattttttgaaacgcacaggcacatcacgcacgtgttttttaacggggcgactgcagaagcctgttttaagcggcatgtcataaacaatatcaacaacttcgctaacctcgcgctccgtccgctccattattgtcgccttccttccaccagtcctgccaatgcggcgatgtctttggcggataaatatcaagcatggcaaaaaatcattgcgcccctgagtctcctgggtatcgacaagcggtaaaagcggtaaattgaccaatggcaggcaagtaaataagatagcctcgctatcagtggtttgtcacccatagccattcactacaacaaggggatatcaatgcatttgcctgattttatttacaaccagaaagcgattatctgctgtgctattgggtttattgctggcttgattactgatcgctcgcctttgctgactgcggctcaggttgtattactggtgattgcggcggttattactcaattacgaagttcaaaaaccagcgcgggtagtagtgggcgttagttttttgtcttcattcgcacgataaacgttgtactcgttttacctaagattcaacgctttgcggcgtatcaccagcgccgactttttgatgtttttttatatttttcatttttatcaggagcagctatgaaaccacttttttcaagcgggttgatcgggttgggactattgtgcttgggcgggtctgcccaggcttttgattatggcaatgcgatcaaaggcgtgctggaaaaaaacaaggtcaatgctgcggctcctgcgactcccaccactcctgcaactcctgccaacgcggccgcaagcaatagtggcgccggtgtgagcagcctgacatcatccgagatgaatagcggcttgaaagaagcattaagtcggggcgcggaaatggcggttgcgcaattagggcagaaagatggtttttttggcaacgcggcgatgaaaattcctttgccacccatgctgcaaaaaggcgaaaaattgatgcgtgctgcgggcatggggcagcaggcggatgatctggttttgtcgatgaatcgcgctgctgaagcggctgtgcctgaggcaaaaaccttgctggtgggggccgtcaaaagcatgacgctgcaagatgccaaaggtattttgacgggtggtgaaacgtctgcaaccgacttttttcgcagcaagacagaggcttcactcactaaacgctttttaccgattgttaaagcaacaaccgataaatccgggctggcccagcagtacaacagttatgcaggcatggccaccaaatttggcgtaagtaaaaaaggccagaacacggtggaagattacgtcaccaagcagtcgcttgaccgcctgtataagctggtgggtgagcaagagcgcacaatacgcgccaacccgttgcaagcaggcagtgatttgctcaagaaagtttttggcgcagtggcgaagtagtttttttatacgccaaaggctgcatgcccctgctttgcgaaaaagccatgacagaaaactgtcgtggcttttttacatgacaaaccaatgctcattgcttaactctgacacggtaagtcaaggtcgctttgccttcggcgggcacgcgaacttgccattcggcaacgcctgctgcacgcttggtgtggggttgagattcactcaccatcgtccaatcgccgggcattggctcacgcacggtaacggtaacagccgctggtttggcgttagtcaaaacaatctcatatgcagattctgtattgatggtgtagcggccgctgttgggcaggcgttgaaacgatgtctgttttttat

SEQ ID NO: 2927 - DNA, 8862 bp, synthetic construct
  misc_feature 1..8862: note = Synthetic
  source 1..8862: mol_type = other DNA
ctgggcgtgatcaccgaggtgacggtgcgcctgtacccgctgcccgaggcggtcagcgcggccatctgctcgttcccgagcatcgaggccgccgtgcgcaccaccatccagaccatccagctcggcgtgcccatcgcgcgggtcgagctgatcgaccgccacagcgtgcgcatggtcaacgcgcacagcaagctcggcctgcgcgaagagcccatgctgctgatggaattccacggctcgcccgccagcgtgaaggaacaggccgagaccgtgcaaaccatcgccagcgagttcggcggcaacgcctttgaatgggccagcacgcccgaagaacgcacccgcctgtggaccgcgcgccacaacgcctacttcgccgccgtgcaaagccgccccggctgccgcgccatcagcaccgacacctgcgtgcccatcagccgcctggccgactgcctgctcgaatcggtggacgaggccgaagccagcggcatcccctattttctcgtcggccatgtgggcgacggcaacttccacttcggctacctgctcgacccgaacatccccgcagaacgcatcaccgccgaagccctgaaccaccagctcgtggcacgggcgctgggcatgggcggcacctgcaccggcgagcacggcgtgggcctgcacaagatgggctttctggtcgacgaaaccggcgcgggcgcggtggacatgatgcgcgccatcaagcgcgcgctggacccgaagaacatcctgaatccggggaagatttttgcgctgtgaactggcagcacggatttcagaagcgccgcttgcggcgcttttttattgcccggcagtcttttgtgtgaggtcgtcaagcaatggtatctcccaccgtagcgatacattttttgacaaaaatcgcaaagcccagacaatgaaaaagcctggcaggttgccctgtcaggcttttgggtacggacggggcctttcgacccctccttattgcagcaacggctctcaccccggataactacaaacggtgcgagtgtagcagggagattccatgaatccaacaacaaacaacgcaccattgcctcctgattttttgaccctggggctggacatcggcattgcatcggtggggtgggccgtactgagtgaaagacacatcgtggacataggagtgcggtgtttcgacaaggcagaaacggccaaagagggtgaatctctgaacctgaaccggcgccaagcccgtctcatgcgacgacggctctatcgtagaagctggcgcttgaccaagttggggcggctgctcaaacaacgaggcttgatcgacagtgccgcctttttcaaacaccaaccacccgccactgtttcgacttggcagctgcgagtagaaggtctggaccgccaactatcggcacaggagtgggcgcgtgtgatctaccacctgtgcaagcaccgagggtttcactgggccagcaaagccgaggaggtgctagccgaaggggatgccaaaggcgagggcggccgcgtgaaaaagggcctagccgacaccgccgcaaaaatggcagccaaagattaccgcactgctgcagagatggtgctggctgaatttccgcacgcgcagcgcaataaacgcggggaatatgacaaggcgctttcgcgggttctgctcgaccaggaattttccttgctgttcgaacagcagcgccgtttgggaaacccctgggccaatgcagagtttgaacagcgcatacgcggcgatggcgatcgcaaaagtggcctgttctggaatcaaaaacctgcattagcagggtcagatctgctcaaaatgttgggccaatgcacgttcgaaaagagcgagttccgcgcaccgaaggccagctttacggcggagcgccatgtgtggctgacacggttgaacaatctccgcgtagtggtagatggagcatcgcgccctctgacccagaacgagcgcatattggcgctgctgctgccgtaccaaaccgatcagttaaagtacaaaacgctcaaagccgcgctggtgaaggcaggccatattcccgatagcgcccgctttggtggactggcctaccccagcgaggcccaaaaggaaacaggcaaaaccaaggaccccgaagaccaacccctggtgagattgcccgcttggcatgacctgcgcaaggccctgatcaaagccggtttgcaagctgcatggcagcagatcagcgtggccgccctggatgggcaaccgcagtggctcgacagcatcggctgggtactcagcgtgtacaaggacgatgccgaagtggagcgtgagcttgcagccttggagctgccgcaagcgcaggcggtcataccagtcttgctgggcttgcggtttgacaagtttcacgcactctcactcaaggccctgcgccagatcgttccgcacatggagcgcggcctgcgttacgacgaagcggtggcgcaaatcccagcttacggacaccacagccagcgcgtcgtgctgggcacgggcgcaaagcgttacctgccgtcgttttacaaagatgagcgcagcagcaccggctccatggtgttccgcgatgacatcgacgtcccccgtaacccggtggtactgcgtgcgctcaaccaggcacgcaaggtggtgaacgcgatcatcaagaagcacggcaacctatcttcagtgcacatcgagatggcgcgtgatttgtcgcgaccgcttgacgagcggcgcgaagtcaagaagctacaggaagaattcagagaccgtaacgacaaagccagagagagctttgaggctgaccatggctatcgccccaagggcatcgtgtttgagaaatggatgctctaccgcgaacagcagggcaaatgcgcttattcactggaggggctggacattgaccgcgtgctcaatgatgccaactacgcccagatcgaccacgccctaccctactcgcgcagctatgacgacagcaagaacaacaaggtgctggtgctgacgcgcgagaaccagaacaagggtaaccgtactgcctatgagtacttgaccagcttctccgggggcgaagacggcgaccgatggcgcaactacgccgcgtgggtcaacagcaacaagagctaccgcatggccaagcgcaatcgcttgctgcgcaagaactatggtgctgacgaagccagcggcttcaaagatcgcaacctcaacgacacgcgctatatctgcaagttcttcaagaactatgtggaggaacacctgcagctggctccacgcgcggatggcaatgccaacaagcgctgcgtggtggtcaatgggcaactcactgccttcttgcgcgcacgctggggcttgagcaaagtgcgcagcgagagcgaccgccaccacgcactagatgccgctgtggtggcagcctgcagtcacggcatggtgaaagcactggccgactatgcgcgcaacaaggaagtggcctatctaaaagagggtttccccgacccggaaaccggcgagatcatcaaccccgaagcccatgcgcgcggagtacaacactttccggaaccctgggcacacttcaggcacgaactgcaggcgcgtttgtatacagacgatctgcaagcattgcgtgaagacttacaaaggctgggtacttattcggagcaggacttgcttggtgtacgcacgctgtttgtatcgcgcgcaccccagcgacgcaatgatggcgcggtgcacaaagaaacgatttatgcccaacccgaagccttgcgcaaacaaggtggggtgacgcaaaaagtgcccctcaccagcctgaacctcaaagacctggacaatctggcagacccgcaccgcaacgccaagctgtatgcagccattcgcgcacggctagaagccaacggaggcaaagccgacaaagcctttggcccggaccaaccgttctacaagcccgataaggacggaaaccccactggccccattgtgcgtaccgtcaagctcgtcatcgacaagctcagtggcattcccattcgcggtggcatcgccaagaacgacaccatgctgcgggtggacgtgttctccaaggcgggcaaatttcacttggtgccggtgtatgtgcaccaccgggtgacagggctgcctgatcgcgcgattgtggcgttcaaggatgaagaggagtggactctggttgatgggagttttgaatttctcttttctgcgtacagcaacgacctgttggagataagcctcaaaaaggaccggcatgttggctactacgctggatgtgatcgatcgactggcgcactaaatctatggacacatgatcgagcgattcatgtcggtaaagacggacttatacgcggcatcggggcaaaaactgcgcaatctataaaaaagctaaacgtcgatgttctgggcatcacccaccccgcacgtccggagcaacgccatggtctggcgtagcgtcatcgtcagcaagcccgccaaactcaagcgcgagcacttcgcgctggtggtggagcaagagcaatcggcccgcgttccgtttgaagacatcgctgtgatcgtgctcaaccaccgcgaaatcacactcacgcatcctgtgctctcggcctgcgcggaatatggcattggcatgtacagcacgggcgacaatcaccagcccaacggcgtgttcttaccttttttgccgcacagccgcgctgcccgcatgcagcgcctgcagctgagcattgacaagcccaccgccaagcgcgcctggaccaccatcgtgcaaaacaagatcgacaaccaggcccggtgcatgcaactgctggctatcaccggagcagaccgcttggcctcttatgcgcgcagggtgcgctctggcgacactggcaacatggaggcgcaggccagcgcctactactttccacagctgtttgggcgcagctttcatcgcaatcaggaaggctgggtcaatgccgccttggactatggctatgccgtcatgcgtggtgcctgcgcccgtgcgctggtggcgcatggcttgctgcccagcgtggggctgtttcacagcagcgagcaaaacgccttcaatctggccgacgacctgatcgaaccctatcgcgccatcgtcgacctgcatgtggcgcaaacctgccccgcagagacagacggcgaactgcgccccaccgacaaagtggccctggtgggcctgctgaacgtggacgtcgtcatgccgcgcggccagatgagcgtgctgtcatccatagagcaggcggcagagtcgctggccaggctactggacggcggtggcgaacaggtgctggagcttcccaggttgatgggcctggaccagcaccgctttgagatgtagctgcagcagcaccccaccctcactaccatgggccaggccacgagacgattcatgcgaatgatggtgttcttcgacttaccggtggtcaccaaagccgaacgccgggcctacaccgtgttccgccgctttttgctgaacgacggctacgacatgatccagtactcggtgtacggccgcatcctcaacggcagcgacgccgaagaaaaacacatgaagcgcctgctggcgaacctcccccccgaaggctctgtgcgggtcttgacagtgaccgaaaaacagtttgcaagcatgaagatgctcgtgggactgcctttgtttcaggaaaaaaagatcaatgcaacccagattgcgctgttttgaatggcagttttccgaaacgaaaacccgctccaagcaaagcttggtgcgggtttcgagagggccaagtgtagctatccggggtgagagagggagctacaacacaccgggaacacggggatccagtggccggagtgtagctatccggggtgagagagggagctacaaccttggctgcgcggacacgattgcgcattttagtgtagctatccggggtgagagagggagctacaacgcctaggcggatcgcccgccttttccgcaaagtgtagctatccggggtgagagagggagctacaactgagttcattggggtaatcacatggcacaaagtgtagctatccggggtgagagagggagctacaacgggcggacgaccgtggccagggcatgctgtagtgtagctatccggggtgagagagggagctacaaccatcgtcctcaagctgtcaaccgggttcgaagtgtagctatccggggtgagagagggagctacaaccatgcgcgacacatccaggccatgcgcctgagtgtagctatccggggtgagagagggagctacaaccgtaagggccgcatcctgccaagttgtggcagtgtagctatccggggtgagagagggagctacaactggtgccgttcgcgtggttgcccgatgtggagtgtagctatccggggtgagagagggagctacaacgagctcgtgatgatggattgccatgcatttagtgtagctatccggggtgagagagggagctacaaccccgtggacgggcggcgcagggctggttttagtgtagctatccggggtgagagagggagctacaaccacgcgctgctcggcagtgagctgctcgtaagtgtagctatccggggtgagagagggagctacaacagcgcgaggggcagcccgcatgacccgagcagtgtagctatccggggtgagagagggagctacaacatacggcacagcctggaagcccgcctcctcagtgtagctatccggggtgagagagggagctacaacgccaatggtaggcactgggctgccaccgatagtgtagctatccggggtgagagagggagctacaacggcgggcgctgcgggcagcgtggccgtggcagtgtagctatccggggtgagagagggagctacaaccgcgtcagcagcttcacgcccgggcgccccagtgtagctatccggggtgagagagggagctacaactgatgcgcttgcgctagtagctattaatttagtgtagctatccggggtgagagagggagctacaactgcctgtcgctgcgccaaaaacggcggtggagtgtagctatccggggtgagagagggagctacaacgcaatcaactcttcttcataagcaattacgagtgtagctatccggggtgagagagggagctacaactgggcgcccaggccctcggcccatgccttgagtgtagctatccggggtgagagagggagctacaacccgggcgttgatggtgaacgtcttctcgcaagtgtagctatccggggtgagagagggagctacaaccgctgcggtggcggtgagctccgcggcggcagtgtagctatccggggtgagagagggagctacaacgatattgtcgatgccgaggtacttgacgaaagtgtagctatccggggtgagagagggagctacaacgtgtttcctgaaacgtttcttcgtggctttagtgtagctatccggggtgagagagggagctacaactcagcgatcacatctgtcgttgctgttttaagtgtagctatccggggtgagagagggagctacaacgccggagccggatatgtacacggttgccgaagtgtagctatccggggtgagagagggagctacaacgatgtgctcgacgcctgtgctgtgcgtgaaagtgtagctatccggggtgagagagggagctatgacatgagattggtgggtaaacccaccaatctcatgtcagcgcttcgcgcggtttatcaattgaatgtggtctccatatcgccccccagcctctgcaccggaagccatactgatgcaatggaaaaaacattttttctcttcatcgccaccgccctggccgaaatcgtgggctgctacctgccctggctgtggctgcggcaaggcaagtccgcgtggctgctgctgcccgcggcgctgagcctgggcctgttcgcctggctgctcacgctgcatgccacggccgcgggccgcgtgtatgcggcctatggcggtgtctatatcggtgtggcgctggcctggctgtgggcggtggatggcgtgcgccccacggcctgggatgtggcgggcgtgctggtggcgctggcgggcatgggcatcatcatgttccagccggagcgctgacggccactgcggagcaccgggccgcgacaatggcccgccgtgcgaacccgtgcgcacaagaatttgccctcccctgtccacccctgctgttgcttggagcccccgcatgacccgtcctttctcttccccccgcatgctgaaggcggtgctgctcagcaccgctctggccctgtccggcctgacgcaggcccaggtggtcttcaagatcaccgccatccccgacgaatcacccaccgagctggcgcgcaaggccgcgccgctggtgaagtacctggaacagaagctgggcaccaaggtggagttcaccccggtgtccgattacgccgccgccgtggaagcgctggccaacaagcaggtggacatggcctggtatggcggctttacctttgtgcaggcccgcatccgctcgggcggcaaggtggtgccgctggtgcagcgcgaggaggacgaaaaattccgctcggtgttcatcagcggcgacccggccatcaagaccctggcggacctccagggcaagaccgtgggctttggctcgcagtccagcacctcgggccacctgatgccgcgcagcgttctgctgcaggccaagatcgaccccgacaaggacttccggcgcgtggcctactcaggcgcacacgatgccaccatcgccgccgtggcctcgggcaaggtggatgcgggtgcgctcaacatctcggtgtgggaaaagttcgtggccgacaagaaggtggacaccggcaaggtgaaggtgatcttcaccaccccggcctactttgactacaactggac

SEQ ID NO: 2928 - DNA, 8481 bp, synthetic construct
  source 1..8481: mol_type = other DNA
  misc_feature 1..8481: note = Synthetic
gattgtttccaccatcaccctgctcgcttgcggcccggacaacaaaccccagcccaaactgcttgaagccgaacgcaacaccctggacaaggcaaaagcgatggataaaaaaattcagcagcagactcaagaacagcaacaaagtgtcgataaacaaactcaatagggcacctgcctgagtcttgaagcacacttgaacaatgaaaacaaaatccggcagccggctgcgcatacctgttacccacggactaaaagacctctatgccatggatatgcatctggcctaccaggccgcttgcgcggaacaatttaacgtcatctccttcagccgtctggccgcagccgtgtcagtggtgcgcttcgccctcacccggcacaagacaaaaatccccgacgccatcaccacactcgatatcgctgtaaacaccctgcaaacggtcagaaccaggggagatgcaacaggcgtttgggaaattaccgaaaatgaacgtccaggtgtactcaacggcattgaaatggccgagcattgcataggcaccctgcatgttgcactgcttgaacaaaccgcgcaactgctgctgcaacagctttatggcgagcaatcgacctcccctgagaatctgcaaccacaaagcctttcatagcacatccctgccgcccgattttattccgtatcagcttgcaatccgggtgcaagtttcacgccatagccccgtaaatttcagatactatcgccacaggatttcatggtatttatgctgctgaccagcccgtatacaataaaaagtacatgaccggatttaaccgtcacctgtggcaacggtttggggaaatagccaagccttactggttctcgcaagaaaagtggcgcgcgcgcggcttgcttgcgttgctggtggtgctgctgttggggcagacacaatttaatgtgctgttcaacgagcaaaccggtgaattcacctccgcattagcaggcagggatgccgacaggttctggcaatccatcagaacctgtttcattattttagtcatcgccgtgccgatatacggctattatttctatgtgcgcgacaagttggccctgtactggcggcaatggctaacaggccgttatcttgaacgctatttcagcgacagggctttttacaaactgctttccaatgccgagatagacaacccggaccagcggatttccgaagacatcaataccttcacccagcgctccctgtattttttactgattatttcgggcgaactgattcagctcattgccttcagcagtgtgctctggtccatctcccgcgaactggtatttttcctggtcgcttacgcgtttgctggcaccctgattacccttttcttttttggcaaggctttaatcgggctgaacttctaccagctcaaacgggaggctgattttcgtttcagtctggtgcgcatccgcgaaaatgcagaatcaattgccctttaccggggtgaggcacgggaatcaatccatgcaaaaaaacgctttcatgaagcattcaccaattacctgaagctcatcaaactgcaactcaaactgaacctgtttcagtatgcctacagctttctgaccatcatattgcccagcgcaatcatcgcgacacgcgtgctttccggtgagcttgaggtaggccgcgccatccaggcagcaggggcctttgctgccgtgttaagcgcaatggctgtgataatagacaattttgaaaacctcagcaggttcatagccggcatcgaccggctcgatacgttctcgaaagcattgagcggaatatcctcgcctgaaaaaaacaactcgcagaaagcagccagcactatccatactgcagaagatggccatgtagcgcttgaaaaccttaccttgcagacaccagagcatgatagaaccctgatcagcaatctcacggttacgattagtccgggagaaaatttactgatcacaggtgccagcggcgagggcaagagctcattgctgcgcgccattgcgggcttatggacgagcggcaacggcatcatcgtgcgccccaagcaggaaggaatgctgttcttgccacagcacccctacatgattctgggtaacctgcgcagccagttgctatacccggacaagcacataaaaattcaggacgatgaactgctgctactgttaaacagggtgaaccttccgcatttggccgaaaggttcggcggcctgcaagccgtgcgtgactggagcaaggtactgtccgttggagaacagcaaaggctggccattgcgcgcgtgctgctcacccagccccgttacgcaatgctggacgaagccaccagtgcgctggacatagaaaacgaggaaagcctgtacaagcaactggcgcaaacttccacaacactgatcagcatcagccacaggtcaaccgtcctcaaataccacagtcaggtactggagctgaccggaaatgggcattggcaactgcaacctgccgcttcgtacagctttaaatactaagagaatcatgatgacaaccgcctacctgtcacacccttcttcgctcaagcacgacatgggtgcaggccacccggaatgcccggcacgcattcaggccatcgagcatcagctagtcgccgatgacttgctcaaccttctgcaacggcacgaggcccctgccgccacccgtgagcaactcgaacgcgtgcattcaaccgggcatattgaaaccatcttcgaaagctccccgctgcatggcctgatctatcttgatcccgataccgcgatgaacccttacacgcttgaagccgcactgcatgcggcaggcgcagccgtaaaagcagttgatctggtgatgtccggccaggttgaaaatgccttttgcaacatacgtccgcccggccatcatgccgggcgcaacaaggcagcgggattctgcatcttcaacaatgttgcagtggcagccacacatgcccttgagcagcacggcttgcagcgtgtagcgattgccgattttgacgtgcatcacggcaacggcacagatgaaatttttaatcaggacaatcgcgtcatgctgtgttcaacctttcgccacccctactacccgtatcagggaaccagaagcgccaatgagcacatcatcaacgtgccccttgctgccggtgccacaggcgcagaatttcgtgccgcagtaagcgaacactggctgcccgcactggaacgcttcaaaccgcaactattgctcatctccgcaggcttcgacgcacaccgcgaagataatatgggcggcctcgccctgggagatgaagactatatctgggtcactgaagtattaaaaaaactcgctgcaacccatgcacaaggccgcattgtttccgtgctggaagggggttatgcattacaggcactggggcgctgtgcagcggtgcatatcaggatacttgcggggtattaaaatttactgccttcttgaattgttcatttttacattgcaaggcaaggcgtgcattggtcggttacaatgcgtcgacgagtgtgatacagagactacaaatccaatatctataaattagcaggtgcattcctgatgcttacaaaatgagaagcccggcaagtttccctgccgggctggatacagaatctttcgattctttattgtagcaacggctctcaccccggatgcacacaacgccttcattatcatggagaacgaaatgacaagcaagcaaaataatctcgggccacttacttttgggttggacatcggtattgcttcggttggttgggcggtgctgggcgaaaaccgcatcattgatcttggcgtgcgctgcttcgacaaagcggaaaccgcgaaggaaggcgaatcgctcaaccttgccagacgctccgcgcgcctgttgcgccgccgtttgcggcgtagagcatggcggctcaccaagctggcgcggttgctcaaacgcgaaggggtgattacaaatgcgagtgttttcaaaaagccattcaacttgcaagatgccagcggaaagggactatccttttggcagcttcgtgtggacgcgcttgaccgtcaactgagcgccgaagaatgggcgcgcgtgatctatcacctgtgcaaacatcgcggcttccattggattagccgcgccgaagcaaaaccaatcgagggcgacagcaagagtgaaggcggcagagtgaagcaaggcttggctgatacggaaaaactaaagaaggcaaagaactaccgtaccgccgccgaaatggtgcttgccgaattcccggaggcacaacgcaacaaacaaggtgattacagcaaagcgctttcccgcctgttgctcaatgatgagtttgtgttgctgttccaacggcaacgagagttaggaaactcacacaccagtgcagaattccaagaaaggatactcggcacgggcgataaaaagagcggcttgttctgggcgcaaaaccccgcgctggctggcagcgatttgttacaaatactggggcattgcaccttcgagaaaagcgaataccgcgctcccaaagctagcttcactgcggaacgccacgtctggctcacccggctcaacaatctgcgcatcgtggtggatggtacgattcgaccgctgaatgaggcggagcggcgcatcacccttctcatgccttaccagcaggcaggcgacttcagctacaagcaactgcgcaccgcgctgactaaagcgggatttttgcctgagtccttccgctataccggactctcttatgccagcggacaaaaagccgatgagaaaaccaaagacccggaatccgctacgctggtgaaatttcctgcttggcaggaattgcgcaaaacgctggagaaaaaagaactcgcatccgagtggcagaaaatctctaccgatgcgctggaagggaaaccagagctgctcgaccagatcgcttgggtgttgagtgtctacaaagacgatgccgaagtggaagccgaattgcgcaagctgaacttgcccaatgccgaaaagatgatcgacgcgctgctggatattcgtttcgacaaattcagcaacctctcgctcaaagcgctgcgtcaaatcgtaccgttcatggaacaaggtcagcgttacgacgaggccgtcgctaacatcccggaatacggccaccacagccagttacaccaagtcggcgtgggcgaacacaaatacctgccgccgttctacaaggagcgcgacaaaaccgggcgcatggtgttcaacgatgatatggacatcccgcgtaacccggtggtgctgcgcgcgctcaatcaggcgcgcaaggtggtgaacgcactcatcaaggaatatggctcaccacacgaagtgcatatcgaaatggcgcgcgatttgtcgcgcccactcgatgaacggcgcgatatagaaaaactgcaaaaagaattccgcgacaacaacgaaaaaggcaaagctcagttcgcccaagacttcaacatcgtgggcgcagtcaaaggcaaagagttcgaaaagtaccagctttatcgcgagcaacaaggcaagtgcgcttactcgatagagctaatagatattcaccgcatatttgaagcaggctatgtagaaatcgaccacgccctaccctactcgcgcagttacgacgacagcaagaacaatcgtgtactggtactgacgcatgaaaaccgcaacaagggcaacatgacgccctacgaatatcttgatggcaaagataatagtgaacgctggcggcagtttgttggcttcgtcgaaggcaacaagacatatcgcctcgccaaacgcagccgcttgctgcgcaaggatttcggcgaaaaggaatccagagaatttcgcgaccgcaacctcaacgacacccgatacatctgccgcttcttcaagaactacgtcgagcaatatctgcaactgcatgaggacagcgaagccaaacgctgtgtggtgcttagcgggcaaatgacctcctttctgcgcgctcgctggggattggtcaaagttcgcggcgacagcgaccgccatcacgcgctggatgccgctgtcgttgccgcgtgcagccacggcatggtcaagcgcttatccgactactcacggcgcaaggagctcgaccaagtgcgggaaggtttcgtggatgtggaaacgggcgagattgtgaaccccgccatgttccagcaaatgcatgaacatttccccgacccgtggctttatttccgcgatgaactcaaagcacgattgagcatcgacgaccctgctctgctgcgtgcagagatggaacggctcggcacttattcgccagatgcgctggttgctttgaaacccctcttcgtctcgcgcgcaccgcagcggcgcaacagcggcgctgcacacaaggaaaccatctacgcacaaccggagcgactgaaggcacaaggcggtgtcacgcagaaagttgcggtaaccagcctcacgataaaagacctcgacaacctcgttgatccacaccgcaacaaaaaactctacgccgcaatccgtgagtggatgaaccaccgcgataccagagataaacgtgcgaaagaaatcgaagcaagcacggggcgcggcaaagacaaacgcgaattaacggcagatgagaaagccgagatagccgagttgcgcgcgttgccgcgcaagccagacaagaacggcgaccccaccggccccatcgtgcgcaccgtgacaatggtgatcgacaagctctctggtattccgatacgcggcggcatcgccaagaacgacaccatgttgcgcgttgatgtattcaccaaagcaaacagattttatcttgttccagtttatgtgtatcacagcgtggcaaaggcgctaccgaaccacgctgttgtagcatacaaagatgaagacgaatggacgcagattgacgacagctttccgttctgcttctcgctatacccgaacgattttgtccgtgtaacactaagaaacgagactcaacttgggtattactcaggctgtgaccgttccacaggtgctatcaacctgtgggcacatgaccgcaaccagcaggttggcaaagatggattggttcgcggtatcggtgtcaaaacagcacttagcgttgaaaagttcaacgtcgatgttctcggtaatatttacccggccccgccggagatacgcagtgacttggcgtagcgtagtcatctcgcgcccggcaaaactacggcgcgatcagttccggcttgctgtggagcaggaagaaactgcctttgttccgttcgaggacatcgcggtgatcgttctcaaccaccgcgaaatcacgctcacccatcccgtgttatctgcctgcggcgaatacggcatcagcctgttcgccacgggcgacacgcatcatcccagcggcgtgttcctgccctttctgcaacactcccgcgccacgcgctggctgcgcttgcaactcagcctgccgaaacctgtcgccaaacaagcctgtgcttccatcatccgtcagaaaatcagcaatcaagcgacatgcttgagaatgtccggccacgttggcgctgatcgactggattcttacacccagcgtgttcgttccggggataccgacaatctggaagggcaagctgccgctttttatttcgttcaactattcggcaaggactttcaccgtaatcaggagcgcttcaccaatgccgcacttgattatggctatgcggtgctgcgcggcacgattgctcgggggctggttgctcatggattgatgccttccatcggtttgtttcatgccagcgaacaaaatgccttcaatcttgcggatgatgtcatcgaacccttccgccctctggttgatttgttcgtcagaaaaatgacgccacagcccgatgatgaattgcatccggaagacaaagtgtcgctggttagcttgctcaacgtggatgttggcatgcctcgcggcaagatgtcggtgctttctgccatcgagcatatgatagaaagccttgcacgtgtctatgacggcggcaatgtgtcactacttgaattgcccaccctgatcgggctgaagccgcaccgcctggagtgctgacacatgagcacggagacaaggagatttatgcgcctgcttgtattcttcgatcttcccgttgtcaccaaggcggagcgccgtgcttataccctgttccgccgcttccttatcaatgacggttacgacatgatccagttctcggtgtacgggcgcatcctgaatggcaacgacgcgctggaaaaacactacaaacgcctcatagtcaacctcccgccggaaggctcagtacgttgtctgtctgtcaccgaaaaacaattcgccagcatgaaactgctcgtcggtttgccactttttcaggaaaaagccctcaaagccaatcaaatgctgcttttctaaccattttttaaaagcaaaacgcccgcccagcctaagctggacgggcgtttgcgtgaggcctattgtagtgcatccggggtgagagagggagctacaacgct

SEQ ID NO: 2929 - DNA, 7976 bp, synthetic construct
  source 1..7976: mol_type = other DNA
  misc_feature 1..7976: note = Synthetic
caggctattctaggagtgctgcttgtaaaggcagaggagcactttattgatgaagagcgttttatggcgcaaaacgactacccggggtttcatgatcatcgtctcattcatatgttgcttttagataatctgaaagatgtgcagtccagactaagttcaggagcgttaaatttaggaactgaaatcgttcaacttttaagagcatggctgatgcggcatattattgattccgatatgctttttggcgagcactacgcgactaaaaatgctaactcactgtcttcaaatttaacagtagagccctcaacgtctgtttttgtatggagtgatgactattccatcggcattgactcaatcgataatgagcataaaaacatcgtttccatactatcagatttgcacaaatccattcacgaacgacgcagtttagaattttctcgagaaattttggatcgcttagtacaacgcacagttttacattttcatgacgaagaaatgatgatggaggatcttagctatcctgggttgcaagaacaccgtacactacacaaattgttaattgatcgcattgcaggattacaaaaaaaattagacgctggtgaaactaaaattaactttgaattactgcattttttgcgagtctggttaattaagcatgttcgtgaatcggacaatcgcttcggtaattactacaacaaccttcctccttcagaacgtcaaaagggaaaagattttaatgaattaaatgtaaacgagaaagtcaaagccaaaaaatcgctttggatttcttggtaagatacacctgttttatgtttacagcaggctttggcactcaatttgatcgaagttcgtcccgctcaacaagagcttacccgcaataacggattttggatttggggattcagccgtttttacttcgagtgtcacatcgggggtgtagaggtttttaggtaaaattagcgatgtgctattaatcccctgttgcttgtaatttaatacaagcgcatctgaaaaaagctggtttgaagataatagtgcttcatctgggttaatgctacgaacttgaatgccttgcggggttccaagaagtaggcgtactccaatttctgtaccactttcaatattatgctgaacccagcgtacttgtgctaataaaaagcgtggactgtcttcggtacgaattgcaattagctgtttagcttgaatagcatttcttacggtaaaactacccagtcggaaaccggctggggattgatctaatatattccatgattcaataccaagcaaatttcctggtaataatgttgcatcaaaattattgttagggctgcaagttgtttctactgtttcaggctcattacaagaaggaatgatatttgaacaaattgctctccattgacttaaaagtagcaaacatgaattgtctccgctacgcctagggtattggcgcttagtgttaccgccgcttacccagggacgataaaaagcacttactaatgctaaaagcctatcatgagagacctcagccatgagcccaaggcccgagggtataacacctcggcgaatttcactacgcatagtatgcaaggcaaccatcagttcaccaccatcaagatagcgtaagttgccggttttatttagcagagcaacagaacgaggttcattattttggtcaaggtctacaccgaagatatggtttacctgcgaggtagatgcttctgcacttattttgcaataaggagcaaactgctgagctaaataaataattaaagaaagggcaatcgcgttgtacgagcttggctgcgtgagatagacaagattgaccatcacataagcttcttcagcactttctgcgctccaaataaaatttagcgcatctgtaacgcgaattcgtgcaacccctttgcgttctgcttcaaggtaactttcgtgaaattgagaccaataaccgggcggaagcgaataatggctacgagaagactcaataatcgcagcaccaaaggcttgggttctacgttgcgcgagcaaaggcatttctgtttctaagctacgatccatctcagccatttttgctacatggatgtaactcctgcctaagtcacaccatagttttaatactttattaaaggcaactttttgttgctctggcgaactcgtggcagataagagatacgtatcggtgaacgctgtttgtattttatgaatatagggccgtatagcctccaacgcactaaggtgttctttgggcgtgaggcttgagcgcaaaaactcctgaagcaactcttgcaatcccgcctgagctgctggcacatcttgtgtttttaaagtattaaaagcctgttggtactgagcgggaatttcgtagttcatttgtattctctaaaataatagtgaacagcgctaacttacaacaaataaaagaaaaggtcattaaaataagtcttgcggctattttgcgataatttgaagacctctggcaagcatcctagcaaatatagagctcatccgctatccacacaattttccttgagttttcaagcagtaaaattgatttgaacatcgtatgtaaaaataatcaaggcattctgcaatgttaaataacatatttaagacagatttattgtaaataaacattaacgcaaactaatctcaaaagcattgcaatgagaggtaaaacagtaaaacagcttaacaaaactgcacctatgtaggaatagcacatcagcttctgtgctgaaaaacttagattccaatgaggtagagtaattattgaccttcggttaatttagccatttgaatcaatttattaccattacgctcctataggtggtaactggctgcaaaaataattccccaatcctcaccacttttcgaagcacgcaggtttgcatgcttaacacttttatctaagaagttttaaacaaacttttagatcaatacccaagaaacaaaatttccacaccaacagtatctgattatatgaagtgggtctataaaggataagcgcccgcctgcagtgcaggacgggcgcttggattcggttctccccataacggggagccttattgtagcaacggctctcaccccggaaagctacacgcgcgtatcataacacgatcttaaccaaagaaagtgcttcgatatggaacaacgaggacaacagcgctatatactaggcttagatatcggcatcgcatccgttggctggtgcgtgatggcagaagaccatattatcgacttaggggtgcgtgcctttgaccgggcagaggtggcagattctggcgaaccgcttaatttgcagcggcgcatggcccggctaatgcgccaccgcatccagcatcgcagagcacgccttgtcaaactggcccgcacattggttgcgcatgggttgatacccaatcagcattttttcaaaccagcaaatccgcatacaggagaagactccctttgggcgttgcgtgtcaaagcgctgtcagaaaaggtcgggcctgaagaatgggctagaattttgtatcacatttgcaaacaccggggttttcactgggtgagccgggctgagcaaaaaaaggccgaatctgaaagccaaagtgaaggcggcaaaattaagcaaggcttgcaaaacatacgacaacttatgcaagccaagggctatgagagcgttgcgcagatgttattggcggagttccccgaggcccagcgcaataaacagggggaatataccaaagcagtccctagagcattattagacaaggaactggcgctgttgtttgagcgccaagcgcagtttggtaccccccacgcaacggcctcgcttaaagaggcaatcctgggcaatggcgatcaaaagaccggcctgctgtggcaacaaaagccctcgctttctggcgaagctttattggcaatgctgggaaaatgcagctttgagcccggtgagtatcgcgcacccaaagccagctttacggccgaacagcatgtttggctcacccggctgaataatttgcgcgtgacttatgatggcaaagaataccccctcacagaggagcagcgccgcttagcctatcccttgccttatcagcagtctggagactttacctataagcaactacgtaaagccctgctcaaggccgggctgctgccagaagattttaaatttaaaggcatcacctaccccagccaagcagaacagcaaggcacaaagcagaaaaacccggaagatgaatgccttatcaaactaccggcctggcaagctttgcataaatgcttaaaagaccatgggctggaaaccgaatggcagagcattgcgggcgccgccaccggtggggacccagcgctgtatgacaaaatcacctgggtgctgagcgtttataaagaagatgaagaggttgaacgcgagctgcaaaagctgcccttgcctaacgcggctaagctgataccggctttgctagaagagcgttttgagggttttcatgccttgtctttaaaagcgctcaacaaaattgtgccgcccatgctagcgggcgcgcgttatgaccaagcttgcttagaagcgggttaccaccacagccaatcgcagtctttgcaggaaaagcaagactatttacccagtttctaccaaggccgggaccatcgtgggcagttgcgctttgcggcagacctagatattccccgcaacccggttgtgctgcgtgcgctgaatcaggcccgtaaagtcatcaatgccattatcaaactctatggcccgccagatagcgttcacattgaaatggcccgggatctttctcgaccttacgataaacgcaaagccattgaaaaagagcaaaagcgttatcgggacaataacgacaaagtaagagaggactgcaaaagcacgctcggtatcaacagagacccctccggccgggaatttgaagcttttcgcctctaccgagaacaaaatggccaatgtgcttatagcggcgaacctattgatttataccggctcactgaaagcggctacgttgaagttgatcacgcgctgccatattcgcgcagttatgacgatagtaaaaacaataaagtgcttgtactgacagcagaaaatcgtaataaaggcaaccaaacgccttacgggtatttaggcggcgtcaaccaaagcccccggtggctgcactttaaggcttgggtagagaacaataaaaattatcgcggggctaaaaaaagccttttgctgaaagcagattttggaaaagcgcaagcagaagactttatgcaacggaacttgaacgatacccgttacatctgccgttttcttaaaaattacatcgagcaaacgctcaaactgcatccagaaagtcgcgcccagcggtgcttggtggtgagcgggcagttcaccagctttttaagggcgcgctggggcttaatgaagctacgggcagaaagtgaccgccaccatgccttagatgccgccgtgattgccgcagccagctttggcatggtcaaacgtttgtcagactacgcgcgaagaaaagagttagacgctgttaaagaaggttttgtcgaccccgaaaccggggaagtgctggacctccaaaaactacgccagctggacgcccactttcccaaaccttgggcgcatttccaaagggaactcgaagagcgcttgcactgcgacgatgttacaaagctgcgcagcacactagaggctcttggtacctacccggcggaggctttgcaaaccctgcaacctctttttgtttcgcgcgcgcctaagcgtcgaaaagggggggctgcacatgaagaaacgatctatcaccaaagcccggctttacaaaaaaagggcaagggaactaagaaagtggcgctttctaaattaacgcttgaaaaacttgggaaggcttttgatgacaggcgcaatagggcgctttatgccgctattcgcaagcgcctggaggactatgcaaaagccgggggtaaatttaccaagcaaggtaacaaggcattcccccctgacaatcccttatataaaccaagtgcagatggtcaaactcgcgggccagttgtacgtagtatcaaactgattgagtcgatctcaggtattcgtgttcatggtggtttggcgtgtaacggcagcgcgctgcgcgtggatatttttactaaagccggcgaacattatttagtaccgatttatatccatcaccgaacctctggtttaccgcaacgtgccgttgtggcaaaaagaaatgaaaaagattggacgctagtagatgatagctttcaatttctgatgaggatttatccaaatgactttatagaggttgttactaaaacgaaaacactctctggttattacatagccatggatcgttctaacggtagtgttgatttgtggagtcatgatcgaaatattaatgagggtaaagggggaaaatttgaaggtattggccttaaaaccgcgcttagcattaaaaagtaccacgtcgatgttttaggccgacgttattccgccgcttgggagccccgccgtgggctggcgtagcctgctgatttcccgcccggcaaaattgcagcgggtgcatttctctttggagattgtgcaagcagaaacagtcaaggtcccgtttgaggacattgccttgattgtattgaaccatcgagaaatcaccctcacgcacccggtgctgagcgcctgcgcagattacggcattgcgctttacagcaccggggatagccaccaccccaacggtgtgcatttaccctttctttctcatagtcgcagcacccgcctgctacgccagcagcttgggctgacgaaaccccgcacaaaacaactttgggcgcagatcgtacaacgtaaaatcgaaaatcaagcacagtgcctcacccttcttgcccggccagaggaggcaaaagcattacgtagcatgctttcgcgtgtgcgctctggcgacccggataacatagagtcccaagcggctttgcgctattttgctgctttgtggggtagccactttcaccgtcaacaaacctgctggcaaaatgccgcgcttaactatggctatgccctactacggggcgccattgcccggggtttggttgcccacggttttcatcccagcctagggctttggcatagcaatgagcaaaatgcttttaatttggcggatgacctcattgaaccctttcgtcccctcattgatctgcatgttgcccagcaaggtctcaaacccccggacatggcactgtcgcccgaagataaagccgggctcattgcccttatgaatgttgaccttcaaatgcccgagggacgcatgaataccttaagcgcgattgagtactgtatcgaaagcctggcgcgaagctacatgggcacagaagctctagacctaccatcccttattgggcttaaccctcatcccccctctttttaaaaatgagccaagaaacgaggcgattcatgcgacttttggtattttttgaccttcccgtggtcaccaaaagtgaacgccgggcctatgcccaattccggcgtttcttattagatgatggctacgacatggtgcaattttctgtctacgcccggttgattaacgggctagatggtgtgaataaacaccttgcgcgtctaacaacccagcttccgccagaaggcgctgtgcgagcaatggtggtcacagaaaaacaatttagtggcatcaagctgttggtcggcgcccccaaaattcaagaaaaagctgttaccaccaatcaacttttgctgttttaagtcttttttaaaaaataaaaacccccgcaaaggcatgccctgcgagggtttgagaccaaggtattatagctttccggggtgagagagggagctacaacattggaaaatgacaccttcgcttgctccttattatagctttccggggtgagagagggagctacaacattaaagcgacttgtacgttcagagatttgattatagctttccggggtgagagagggagctacaactgcca

SEQ ID NO: 2930 - DNA, 7655 bp, synthetic construct
  source 1..7655: mol_type = other DNA
  misc_feature 1..7655: note = Synthetic
gctgtatcgtaaatcaacaccttgttgtcgtcacgcgccgagatccagacgttttcgccacgcggcgtgaattccatgtgcagaacggccttgcccggctccatggttttgacgatcttgccggaaagcgtgtcgatcacctgaacccaggagttgtccgggaaggcgaaattcacccagacttgccgcccgcccggccgcgccatggcaaacaccggctgtcccttgaccttgatccgcccaacctctttccaggtatccatatcgaccaccagaacctcgtgccggccaactgccggcagataggcccggccctgcgccaccgaccagccacgcaagtgcggcatcttgaacaccggaagtttctcctcgccgcgcccgtagcgatcaagaatcttgcgcgtgccctgttcgggcagccaggagtcgagcagggaaacaccatcctcgccaaacaggcccgccagataataacggccgtcgggagtcaccagcccgtcgtaaggctgcatgccagctggatagcgttgggttttgggatgtttcggatcggaaaagtcactcacccagatttcaccgccgtcgaacaaggcatagccaaaacggttgcccgacaaatcggccagtccaaccactttcgagaacttcccgggagcgtattcggccggaacttccgagagcaaatcgagtgtttctgcgtcgaacgccttgatgcctcccggcgtgtaattctgtgcgacgacaatgcggccgtcctgcgaaatcgatccgccgatcgagttgccggcctgcatcacgcgcttgacgattcgcgcctcaagcagatcaatcttggtcaggccaccgtcgcgaccgaagatgtaggcatagcgcccgtcgcgcgaataaacggccgaagcatgcgaaagatcgccgagaccttcaatgtgcgcataaggcgcgcgtttgctggtatcgaccagtatcacgctgccactcgcgcgctcaatcaccagaccgagatcgccggtaccgcgaagttgcggcgacgcgcaggccgaaagaaacaatgcaagaaacagcgaagacagcagcacgaaagaacgaaacagggagaatctcatcatcaactcatacaaaggtagcaacggcaggagcatgcgccttctattatcggaatactttggtttacgtcaaagggtttgtttgattctggctgcctcgatggccgatcagcagtatttctgagtcgtttgaactctggaaagcaattgcgccaaagaaaagacccgacaggcaagcctgtcgggtcgggttcggtcgtcacccgaaggtgacaccttattgcagcaacggctctcaccccggaaagctacaatgggaacattctatgccttttgggaggagccatgcaaaataaaaacgacccctattcccttggcctcgatattggcattgcctccgtaggctggtgtctccttggcgaaaatcgcatcatcgacctgggcgtccgcgccttcgacaaggcagaaaccgccaaggagggcgattcgcttaatcttgtaaggcgcatggcacgcctcatgcgccgccgactgcgccgccgttcctggcggctcaccaaacttgcgcgcaccctcaagcgccacggcgtcatcgccgacaccaatattcttcaaccgcaacacccgttcgggcaatcgctctggcaactccgggtcgatgcgctggatcggcaactcgcgcaggaagaatgggcgcgcgtcatttatcacctgtgcaagcatcgcggctttcattggatcagccgcgccgaagaaaagaaagctgaaggcgataaggcaggcgaaggcgggaaggtcaagaaaggtctcgcaggaacgcaaaagctgatggccgagaagggctatcgcaccgctgccgaaatggtgctggccgagtttcccgacgcacaacgcaacaaagccggagactacggaaaatccctgtcgcgcgtcctgttgagcaacgagttgacgcagcttttcgaacggcaacgtgcgcttgggaaccgatatgcgaactctggattgcaaagcgcggttcttggcaacggcgaccgcaagagcggtctgttctggtcgcaaaaacccgcactatcaggtgccgacctcctgaaaatgcttggccactgcacccttgaaaaatctgaataccgcgcccccaaagccagtttcaccgccgagcgccatgtctggcttacacgccggatcaacctgcgcatcgtttgtgacggcatcacgcgctccctgaacgaacaggagcggaaactggtcttgcccttgccttaccagcaaatcggtgacttcacctacaagcagcttcgcgccgcgctggtcaaggcgggtcgcctgccggacagcttccgctttgctggactctcgtatcccaccggagcacagaacgaaagcggcaaagcgaaagacccggaagccgaaaaactcgtcagactcccagcctggcaggaactgcgtgcgggtttcaagaaggccggcctagaaacggaatgggaaggcatagctggcagggcgatgtcaggacaaccggaagaactcgatgaaattgcgcgggtgctgagcgtcttcaaggacggcgatgaggtcgagcgtgagcttcgcgcactcggcctgtccggtggcgaaacagccgttcaggcgctgctcgatatcagcttcgacaaatttcacgccctctcgctcaaggcgctgcgccgtatcgttccacacatggagaaaggcttgcgctacgacgaagccgtcgccgccattccggaatacgggcatcacagtcagttgcaaaagccggaagaaggcaaacagaaatacctgccgccgctatataagggacgcgacaaggacgggcgcatgctgttcagcgaggacatggacatcccgcgcaacccggtcgtgctgcgcgcactaaatcaggcgcgcaaggtcgtcaacgccatcatccgcgaacacggatcgccagagaacgtgcacattgaaatggcgcgcgatctttcgcgcccattggatgaacgccgcaccatcgaaaaggaacagaaggaataccacgaccgcaaagacaaggacaaggccctctttgccgagagtttcgatcagccgcccaaaggcgctgaatttgaaaaatggcgcctctaccgtgagcagcaaggaaaatgcgcctactccatcgaccccattgacctccaccgtctgcttgaaccgggttatgtcgaaatcgaccacgccctgccctattcgcgcagcttcgacgacagcaagaacaacaaggtgctggtgctggccagagaaaatcgcaacaaaggcaaccagacgcccttcgagtatctggatggcaagaacagcagcccgcgttgggaagcattcaagatatttgtcgaaagcaacaaggcctatcgccttgccaagcgcagccgcctgctcagaaaaggcttcggagtcaaggaatccgaagagttccgtgagcgcaacctcaacgacacgcgctacatctgcaagtttttcaagaactacgtcgaagaccatctgcaactggccgacggcagcgaagccaagcgctgtgttgtcctcagtggccagacgacctcgtttctgcgcgcgcgatggggcttgctcaaggtgcgcggcgacagcgaccgacaccatgcgctcgatgccgccgtcgttgccgcctgtagccatggcatgatcaagcggctggcggattacgcacggcgcaaggagctggagaaagtccgcgaaggcttcatcgatctcgggaccggcgagatcgtcaatccggccatgctccagcaattgcagatgcactttcccgaaccatggccacatttccgccatgaactcgaagcgcggctgagaatcgacgacccggcgcaattaagcgtcgaaatggaacgactgggcacttatccggctgaagcgctggcggcgctacggccgttgtttgtttcacgcgcaccgcaacggcgcaacagcggcgcagcgcacaaggacacgatctacgcgcaaccggaacgccttaaagcccaaggcggcgtcacgcaaaaggtgacgctctccagcctgtcgctgaaagatctcgaccaactgattgacccgcatcgcaacgagaaactttatgccgccattcgcgcaaggctcgaagcgcacggcggcaaggctgacaaagcgttcccggccgacaacccgctgcgcaaaccagatcgcgaaggcaatccgaccggaccggttgttcgcaccgtcaccaaagtgatcgacaagctctcgggcatcccggtacgcggcggcattgccaagaacgacaccatgctgcgcgtcgatgttttcaccaaggcgggcaagttccatctggtgccggtgtatgtgcatcacgcggcgacggaggtattgccggaccgggcgattgtggcgttcaaggatgaggaggaatggacgctgatcgatgagagtttcgagtggcggttctcgctgtatccgaatgatttcatccggatacagcagaaaggaaaaccagccctcacggggtactacggaagttgccatcgaggtacgggaaacataaatctctggtcccatgaccgcagccaacaagtcggaaaagatggaatgattcagggcatcggtgtaaaaaccgctctgtcgctcgagaaattccacgtcgacgtcctcggcaacatctaccccgcgccgatggagccgcgtcgtgggctggcgtagtgtgatgatttctcgcccggcaaagctgcggcgggagcatttctcactggccatcgagcaggaacagacagcctttgttcccttcgaagacattgctgtcatcgtcctcaaccatcgcgaaatcaatctctcgcacccggtgctctcggcctgcgcggaatatggcatcagccttttctccacgggcgacaaccaccagccgagtggcgtttttctgcctttcctgccgcactcgcgtaccaaccggctgcttcgcctgcaactcgacattgcccgcccattggccaagcaagcctgggccaacatcgtccggcgcaagatcgagaatcaagctacctgcctgcgtctcgccggatgcaaaggcgtggatcggctcgaatcctatgcccgtcgcgttcgctccggtgatccggagaatctggagggccaagccgccgctttctacttcgtgcaactgtacggccccggttttcatcgcgccgaagaacgctggatcaacgccgcgctcgactatggctacgccgtgctgcgcggtgccattgcgcgtggactcgtcgcacacggtctgcatccgacggtcgggctgttccacgacagcgaacagaacgccttcaacctcgccgacgacctgatcgagcctttccgcccgctcgtcgacctccatgccagaaaaaacgccccggcggtggaaggcgatctgacgccaaccgacaaagccgcgctggtcgcgctgctcaacgtcgacgtcggcatgccgcaaggcaagatgtctgcgctttccgccatcgaatacgcggttgaaagtctcgtgcgcgtgttcgagaccgacgagaactccctcgaactccccgtattgattgggctacagccgcaccggctggagtgctgaccggtgggcagcgagacgcgccgcttcatgagactgctcgtattcttcgacctcccgatggtcaccaaggccgaaaagcgagcttatgtgcagtttcgccgtttcctgctcaacgacggctacgacatgatccagtggtcggtctacgggcgtttgctcaatggagcggacgctcaggagaaacacctcgcccgcctcgccgattccctgccgccagccggctcagtgcgctgcatgaccgtaaccgaaaaacagtttgccggaattcgcctgcttgtcggcatgccgctttttcaggaaaaaaaggtcaccgccgagcaaatgctgctcttctgaaagcggaatccaaagaaaaatccccgcacagccaaagctgggcggggatttcagcgtttcctgattatagctttccggggtgagagagggagctacaaccaacggatcgattgcgcctccttctcacctgattatagctttccggggtgagagagggagctacaacgaagaccatgatctgaccgcctgtgccgaagattatagctttccggggtgagagagggagctacaacgcaaccaggccagctcagtattcactttacgattatagctttccggggtgagagagggagctacaacgagtttttcgctgcagcaacgatgctgcaggattatagctttccggggtgagagagggagctacaacgacggttgccgttcagatacaccgggctcagattatagctttccggggtgagagagggagctacaaccgaaacgccgtgcgcataaagaaagtgcgggattatagctttccggggtgagagagggagctacaacgtagctgtgtgcgctgctcaggttcgccacgattatagctttccggggtgagagagggagctacaacgtgatgtcggaaacatacaaacctatgaaagattatagctttccggggtgagagagggagctacaaccactttccatgtgacgcccaccaggccgcagattatagctttccggggtgagagagggagctacaactcgaagctgccgccaaactcacggcgcaaggattatagctttccggggtgagagagggagctacaacatatggtcttcgcagtaaccgcttccgtctgattatagctttccggggtgagagagggagctacaacatcggattgaccgcgatccagcgccactcagattatagctttccggggtgagagagggagctacaacgcgagcctgggctgttctccagtgggccaagattatagctttccggggtgagagagggagctacaacagcgtcacatcgcgcggcacagtcttcgttgattatagctttccggggtgagagagggagctacaacgagccaactgacggcctgaaggccatctgttggctcgtgtcgctaacgcgacgccaccaatgatgttctcttccaacgcctttgcggcacgctgatactctggcgcttcttcacaggggtaagcagcacacggttacaatgccagcctctgctgccaaacaacgccatgccaaacattcgcaacactctggaactcctggccccggccaagaatgccgaattcggtattgaagcgatcagtcacggcgccgatgccttgtatatcggcggcccggcttttggcgcgcgcgtaaatgccggcaactcggttgccgatatcgaacggctggccagccacgcacaccgcttcaatgcccgcgttctggtcgcgatcaataccctgctcaaggacgacgaactggaagaagcccggcggctggtctgggagtgctatgaagccggcgccgacgcgctgatcgtccaggacatgggcctgctcgaactggacctgccgccgatcgaactgcacgccagcacgcaaaccgatatccgcacgccggaaaaagcccgctttctcgaagacgtcggcttttcgcagatcgttctggcccgcgaactttctctccagcagattcgcaagattgccgagcgcaccacggcaacgctggagtt

SEQ ID NO: 2931 - DNA, 7648 bp, synthetic construct
  source 1..7648: mol_type = other DNA
  misc_feature 1..7648: note = Synthetic
tcaacatcttcaacggcatggtcggcctcaccttctcgtgcgacggctcgcactacctgccgtgggacgaattcctctccaagggctacgatttctgggccagcggcaaagcgctcggctgaaccacaggtcgataaggcaggcgcccccgtcacctgccttgcacatcccccacttgcctcctacactgcattgcatatgcaatgcaaggaccccgccatgaaaaacgccaccctgccccccctgcgcgttgacagcgcactgcgaagcgcagccgaatcagtcctgcgcgagggagaaaccctgtccggtttcgtgctcgaagccgtacgcctgaacatcgaacggcgccaggcccagcgcgaattcatcgcacgcggcctgctggcccgcgaggaagcacgggccacaggcgactacgtgagcgccgaggacatgctggcgcggctggatgcaagcctggcccgtgcacgcagcaagcaggcatccggagcgcaatgagctaccggctgcgccttgcagcccgcgcggccgacgatttacagcgcctgttcgattatttggcggagcacgacctggaggcggccgaacgcgcacgggcggcgattgaaaaggcctttgggtttctggaggcttttccgtttgcctgccgcaaggcctcgcccgaccatccctttctgcgcgaaatggtgatcgaatttggccaatccgggtatgtcgcgctgttcgaaatcgaagacgccgacaccgttacgatattgacggtgcgccaccagcgagaggacgatttcttctgataggcgatttccgcaagcaagctgtgcttgagtcacgagcaaacagccccctctgccatcgcccgcacccaggcttgcaagcgcccgccgcatccagcacacttcatcaaacaacaaaaacaaccggcgcggagaagcgaatgaaaatgaacaagcggcccggaacccttgagcaaactcgacgaaatctatcgcctgcaccgtctgctggatggacggcgcaccgggctcccccgcgccgcgctcatcgctgagcacggcttttcgcgttccaccctcacccggctcatcgccgacctgcgcgacaagctcggcgcgcctatcgtctgcgaccctgagcggggcggttatcgctaccgctatgtggcgtcagcgcgtggggactttcaaagaaaacagaaaacaatgtgcggaaatagaaagacccgaggcaagcctcgggtcttggattcggttcatccccgaagggataaccttattgcagcaacggctctcaccccggaaagctacaaccaatcgaagtctacaccaaaggagacgcgacacgccatggctttgaatacctttctgccctacacccttggcctcgacattggcatggcctcagtcggcgcagccttgctcaccgagcagcgcattcttggcctccacgtgcgcaccttcgacaaggccgaaaccgccaaggaaggcgaccctcttaacaaaacgcggcgtgaagcgcggctgacacgccgccgcattcgccgacgcgcacacagattgctgcgactggtgcggctcttcaaacgaaccggactcatcgccgaggcccgcccggaggccttcgccttatccggcgtaagcccttgggatttacgcgcggaaggactcgatcgactactcgcccctgcccaatgggctgcaacgctctatcacatcgtcaaacatcgcggctttcagtccacacgcaaaagcgaggcaaaggacgacgaaaaagctggacagatgctgtccggcgtcgcggccaatcaaacacgttgtcaggaaaaaggctggcgcacagcgggcgaaatggccgcgtgcgacgagacttttgcagcagccaagcgcaacaagggcggcgcctacacccacaccttcgcgcgggctgacttggtggccgaactcaagctgcttttcaggcagcaagcaagctttggaaatccatacgtcagcgccgaattcgaaaatggagttgaacaactgctgctcgcccggcgtccagcgctgtcgggcgatgcactcttgaagctggtcggcaaatgcccattcgagacaaccgaataccgcgcccctaaagccagcttcagcgccgagcgcttcgtctggctgacaaaactcaacaacctgcgcatttcagaagtcggcgagcaacgcgcgctcaccgcaggcgaacggcagattctgcatgaccagccatacatactcgccaagctcacctacaaacaggtgcggcaaaaactcgggttggccgaaaccaccaaattcaacacgctgacctaccggggcgacaaagacccggaaggtgcgaccttcttcgaggccaaggcctaccacgccctgaaaaaagcgtacaaggaagccgggctggagagcctctggcagcgcgatgcgctcgatcccacacggctcaaccgcttggcctgggcgctaacttgtttcaagaccgacgacgacattcgcgcccatctcatcgaacacaacgtggaacccgatatcgctgaggctgtgctgggcgagtccttcgacaaattcgtcgggctctccttgaaagcgctcggcaaaatcctgcccttcatggaacaaggccaacgctacgacaaagccgtgcaaagcgcgggctacacgcatcacagccagttgcatcaggacagtaccaaagcccactatttgccgccgcccgacaaagaccaaatccgtaatcccgttgtctaccgtgcgctcaatcaggcccgcaaactggtgaatgccatcgtccgcgagtacgggccgcctgcggccatccatatcgagctggcgcgggatttgtcaaagcccaagaaggagcgcgacgagatcaaaagggagcaggacaaattccaagccctgaaacagcggctatctgacgagtttatctatgacgaagaacgcgcacccaagcgcgacgagttaatgcaattgcggctattccacgagcaattgagccagtgtccatactgtgggaaagaaataattcgcggtcggatgtttaacaactctgacgtttacgtacaaatcgaccacgcgcttccttactcacgtagttacgacgacagccagaacaacaaggttctggttcacaccaagtgcaaccaagacaagggcaaccgcacaccctacgaatatctggatggcacaaatgacagccctcagtggcaactgtttgaagcctgggtactgtcaaataaagcttaccgtcgtgccaagcgcgaccggctgttgcgtaaacactttggcgaggatgaggcaaaagaattcaaggagcgtaatctcaacgacactcgctatatctgcaaagaattcaaacgtatggtagagacccatttcaagtggcacgacgacgcagaaggacaagaacgttgcgtggtcgtgtctgggcagttcaccagccttttgcgcgcgcgctggggactcatcaaggtgcgcgaaaacggcgacctgcaccacgcgctagacgccgccgtgattgccgccgccagccgtagcctggtcaaacgcatggcagattactcaaagcgtaacgaacttgcccaagtgcgcgatcgctacctcgacccggaaaccggcgagattctcgatatcgcggcaatgcggcaagtcgaagaacacttccccgcgccttggccgcattttcgcagtgaactactggcttggctctcgccagaaccagcgcatgggctggatggcctggctcactacccgatcgaggaactggaacagctacgtcctgtgcgcgtgtcccgcgcacccacccgccggggtttgggcgcggcacatcaggaaaccatccgctccttgggccgcgaggggcggttattggccgatggacaatccgccgtcaagacgccgcttacagcactcaagttgaaagacctggaaaacatagttggttacagccattcgcataaccacgccatgatcgaagcgatcagaaagcgcctggaagcaaacggaaacgacggcgccaaggcattcaaagcgccgttattcaaacccagcgcagccaacggttacgacgccgacaaaagccatgtgggcgaaaccgatcagcgcgccccgcaaatccgcagcgtcaaactgctcgccacgcaaaaaagtggcatccccatccgcaaggggatcgccaacaacggcagcatgttacgcgtggacgtgctcagcaagggtggcaagttctacgccgtgccggtttacgtggccgatgccgccaaggtggaattaccaaatagagccgcgacagcacacaagccagaggaacaatggcccgcagtggataacagctatacctttctcttctcgctccatccaaatgattggattcgggtgaagctgaaagagggcatcaaagaagggtacttctgtgaacttgaccgagccagtggtgcatcgatctctatctatactcacgaccgaaatcaggctacaggagagaaaggaaaattacgtggcatcggtctaacaaccgccctcgccatcgaaaaataccacgttgatctgctcggaaatctccatcgcgtccacaccgaaacccgtcaacccatccaccgcaaagggcgctgaacatgggctggcgcagcgtggtcatcggcaacccggcgcaactcgattttcaccagcgcgcgctgcgcgtgcagcaggagggcaacactgcccacgtgccgctggaggacatcagcgtggtgttgatcgaacacgctcaaatcacgctgacctcggcgctgttgtccgcgctggcggacgcgcagatcgccgtactgactgtcggcgctgaccatcacccaaacggcgtactgctgccctacctccctcacagccgcgcgctcaaggtcatgcgcgcacaactcgacacaagtctgcccacgcaaaaacggctgtggcaagccattgtccaacagaaaatccgcaaccaatctgctgtgctggcgcggcataccgacgccgaccgcgaccgccggacgttgttggcgatggccgacgacgtccgctccggcgaccctgacaacatcgaaggccaggctgcgcagcgctactttcgcgccctgtggggcgacgatttcacacgcaaccagccccgctttgtgaatgccgcgctgaactatggctacgcagtcgtccgtgcggcgattgcccggagtctcgtcgcttacgggttcctgcccgccttcggcatccaccatcgcagcgaacagaacgcctttaacctggccgacgacttgatcgaatcctaccgcccgctggtcgatacccacgtgttgaagagttggccgcttgagccccaacgtgagctctcgcccaaggataaacagcaactggtcgccctgctgcaccgcgacatcaccacgaccctgacgaagcagactctgctcgccgccgtcgaggcgaccgttgtcagtctcagccagtggctggaatacgccagccccgccgtctttgtcatgcccgtgttgaccaaccagccgacttacccggaggacgcggatggctaaagccacccgccgctacatgcgtctgatcgtcttcttcgacttgcccaccgtcaccaaggcggaaaagcgcgcctacacggtgtttcgccgcttcctgctgcaagacggctacgacatgattcagtggtcggtctacgggcgcatggtcaacggctttgacgacgccgaaaaacacctcaagcgcctgtctgccaacctgcccaaggaaggctcagtgcgctgcctgcaagtcagcgaaaagcagttcgccagcatgaaactcctcgtcggccagcgcagcttccaagaaaaaaccgtcaacgcccagcagattttgctgttttgagaagtgaaaaaagaaagctgctatcccgcatgaagccaagcgtcatgcgggatagcagcgaggtgattgtagctttccggggtgagagagggagctacaacaagtctcgcgatcaaatatacagggagttgattgtagctttccggggtgagagagggagctacaaccgccagcgcgcggtctgatgccacatagcgattgtagctttccggggtgagagagggagctacaacagaaagaatgttgaatcgtccatcaccaccattgtagctttccggggtgagagagggagctacaacctgttcaaacatacgtaagacgctatctgtattgtagctttccggggtgagagagggagctacaacgtcagcccatgcgccaagactgtttcgctcattgtagctttccggggtgagagagggagctacaacctgatctcctcaggcgtgccgaagatcgagattgtagctttccggggtgagagagggagctacaacgccctgctgcgcaatgattactggtgcaagattgtagctttccggggtgagagagggagctacaacacgaacgcaagaacactgacgcggtgagcaattgtagctttccggggtgagagagggagctacaactgcttgagtttccacgtctaactcctatgtattgtagctttccggggtgagagagggagctacaactgaagtggcggcagttgcagcaatagcgttattgtagctttccggggtgagagagggagctacaacgctgaaaccggtgcatgtactgccgagccgattgtagatttccggggtgagagagggagctacaacgaatcctgtgctgttgattgccacggtgatattgtagctttccggggtgagagagggagctacaacggctcagtccgtcggcctggcggtcgacctattgtagctttccggggtgagagagggagctacaacctctggcatggcgatcagcagatgcacaaaattgtagctttccggggtgagagagggagctacaactaactgctatggagatcgtcgaacacgatgattgtagctttccggggtgagagagggagctacaactgggagagctaggaggagcagaaacttttgattgtagctttccggggtgagagagggagctacaacccagcgggcggcggcttcgagcggcacttcattgtagctttccggggtgagagagggagctacaacggaaatggaatgcagctttgacgctgctttattgtagctttccggggtgagagagggagctacaaccgtctcggcgccggtgtcccgctgcttggcattgtagctttccggggtgagagagggagctacaaccaatgtggcggcggctgtcgttgggagtgcattgtagctttccggggtgagagagggagctacaacgaaattgcgccacgggtggaagaactcgaaattgtagctttccggggtgagagagggagctacaactaacaagttcgccgggtactactacttcgaattgtagctttccggggtgagagagggagctacaacagatttgcgggggctgaagccccgcaaatctgttgagccgccttcggcggtctgtctataagaaatggggggctggccataggcaaacgcgtatgatctcattgaccagcgccttttcagacgttgacagtcattgcccgcagtctagccatgagagggtgtaagaatttttgtgtaaacggtcatttggcaggagactgccgcacttcacgagagaaccgcaatgaccgt

SEQ ID NO: 2932 - DNA, 7536 bp, synthetic construct
  source 1..7536: mol_type = other DNA
  misc_feature 1..7536: note = Synthetic
gtgtcttcgtctataaataaccagctcgcgctgctggcctacgaatacgaccccgccacccgcctcctgctgctgctcggctcgcacgagaacttctaccgcgaactgaagcggtcctggatcgcacgcttccgcatcgatgggcatggcttccgcatcatgccgggtgcaaattcggcttgcccgctcagaatccgagtcgcataataaaaagcccggcgggtttccccgtcgggcctggatacagaatctttcgattctttattgtagcaacggctctcaccccggatagcaacaatggggccgattatgcgggaggcaagcatggatggcaaggatttcggttcgctcacattcggtttcgacatcggtatcgcctcggtgggctggtgcgcgctcaatgaaacccgcatcgtcgacctcggggtgcgctgcttcgacaaggcggaaaccgccaaggaaggcgaatcgctgaatctcgctcggcgcaccgcacggctgatgcgccgccgtctgcgccgccgggcgtggcggctaaccaaactggctcgattactcaagcgcgaagacttgattaccgacgttcatctgatgcacggaccgtcggccacctcgccgtggaaactgcgcgtcgagggactcgaccgccaactcaccgatgacgaatgggcgcgcgccatctaccacctgtgcaagcaccgcggtttccactggatcagccgcgccgaggaaaagaaagccgaaggcgacaagaaggaaggcggcaaggtcaagaaggggctttccgacacccagcggcgcatgagcgagaagggctaccgcagcgccgccgaaatggtgctggccgaattccccgaagcgcaacgcaacaagcagggtgactacggcaaggcgctctcccgcgttctgttgaacgatgaacttgccctgctgttccagcaccagcgcgaactcggcaacccacatgccagcgccgaactcgaaaccgccatcctcggcaacggcgaccgcaagagcggcctgttctgggagcaaaagccgccgctcgccggtgccgatctactcaagatgctcggcaaatgcacctttgagaaagaggaataccgcgcgcccaaggccagtttcaccgccgagcgccatgtttggctcacgcggctcaacaacctgcgcatcgtcgtcgatggcacgacgcggcagttgacggaagacgagcggcgtgtcgccatgccgctgccctacagttacgtggacgccaaactcagttacaagcaattgcgctctgccctaaccaagaaaacgggactgaataatttcaacttcgccggcatcgccgaggacaaggaaaaggacacgctgacgaaactacccgcctgggaaacactgagcaagacgctcaaaggcaaggcgctcgaaactgaatgggagagcatggccggcgccgcggccggcggcgacccgacactcctggacgaaatcgcgcgcgtgctttccgtcttcaaggatggcgacgaagtcgacgccgaattgcgcaagctgcccctgcccggcggcgagaaaatgatcgaggccttgagcgaaatcagcttcgacaagttccatgcgctttctctcaagtccctgcgcaagatcgtgccgcacatggaaaccggcctgcgctacgacgaagcctgcgtggcggcgggctaccaccatagccagttgcacgaagccggcgcgggcggacataagtatttgccgccgttctacacccggcgcgacaaggacggccgcatggtgttcgacgaagaacttgacgtgccgcgcaatccgatcgtgctgcgctcgctaaatcaggcgcgcaaggtgttgaatgcgctggtacgtacctacggctcgccgtccgccgtgcacatcgaaatggcgcgcgacctgtcgcgcccgctgaatggatatttcacggacaacggtaaacgcatcgatggcaggcgcgacattgaagcaaagcaaaaggaatatcgcgagcgcaacgaaaaggacaaggccaccttcgctgccgagcacggcatcgccgccaagagccgcgagttcgagaagttccagctctaccgcgagcagcaaggcaagtgcgcctactccctcaagccgctcgatctgcatcgcgtgctgcacgacatcggctatgccgaggtcgaccacgccctgccctactcgcgcagctacgacgacggcaagaacaacaaggtgctggttctcaccgaggaaaaccggaacaagggcaaccgcaccgcctacgaatatttgacttcgttccccggcggcgagaacggcgaacgctggcgcaacttcatcgcctgggtcgaatcgaacaaagcctaccgcctcgccaagcgaacacgcctgctgcgcaaggatttcggcggcaaagccgccgaggaattccgcgagcgcaatctcaacgacacgcgctacatctgcaagttcttcaagaactacgtcgaacgccatctgcagttgaaagtcggcgctgacgggacggcggccaagcgttgcgtggtgctcagcggccagaccaccgcattcctgcgcgcgcgctggggcctgctcaaggtgcgcggtgccagcgaccgccaccacgcgctcgatgccgccgtggtcgccgcatgcagccacggcatggtcaagcgcctggctgattacgcgcgaactagggaactggcgaaagtacgcgacggcttcgccgatcccgaaaccggcgagatcgtcgatccggccatgttccagcaactgcacgcgcacttccccgacccgtggccgcattttcgcggcgaactcgaagcgcgactgcaactcgacaacagcgccgaactgcgcgcgcaactggaaatgttcggcacctatccagccgaggcgctggagaccctgcgtccgctgttcgtctcgcgtgccccgcagcggcgtaacggcggtgcggcgcataaggacaccatctacgcccagcccgaacgcctcaagaaacagggcggcgtgacgcagaaggtggcgctctccagcctgtcactgaaagacatcgacaaactgatcgacccccaccgcaacgaaaagctctatgcggccatccgcgagcggctggaagcacacggcggcaacggcgacaaggcatttccggccgacaagccgctgctcaagcccgaccgcgaaggcaacccgaccggccccatcgtgcgcaccgtcacaatggtcatcgacaagctctccggcattccgattcgcggcggcattgccaagaacgacaccatgttgcgggtggatgtcttccgccacaagaaggacggcaagtttcatctggtgccggtttatgtgcatcatgccgtggcgcaggaattgccgaaccgcgcgattgtgcaggccaaggacgaagacgagtggacgctgatcgatgacaagtttgactttctgttctcgctccatccaaacgacttcattcgtgtcacgcagaagaacaaagcaccgatacctgggtactacgccagttgtcacagaggaacagggaacctgaatctctgggctcacgaccgaaatcaaaaagttggcaaggacgggcaaatcgaaggcattggcgtcaagaccgctgttgccttggagaaatttcacgtcgacgtcctcggcaacatctaccccgcgccgatcgagccgcgccatggtctggcgtagcgtgatgatctcccgccccgccaagctgcggcgggagcatttctcacttgccatcgagcaggaggaaacggccttcgtgcccttcgaggacattgcggtgatcgtcctcaaccaccgcgaaatcaccctcacccatccggtgctgtccgcctgcgccgagtacggcatcggcctctacgccacaggtagcaaccatcagccatctggcgtgttcctgcccttccttccccactcgcgcaccacgcgcatgatgcgcaagcaactcacggtggcaaagccgaccaccaagcaggcctgggcctgtgtcgttcgccgcaagatcgagaatcaggcggcctgtctgcggctttccgggaaaaagggagtggaccggcttgcttcctatgcacgccgcgtgcgttcaggtgatcccgacaatatggaggcgcaggccgccgctttctacttcgcccagctctacggaaaggatttccatcgggccgaggagcgctggaccaattcggcgctggattatggctacgccgtgctgcgcggcgccatcgcgcgtgggctggtggcccacggcctgcatccgaccgtcggcctgttccacgatagcgaacagaacgctttcaacctggccgacgatctgatcgagcctttccgcccactcgtcgatctgcatgtcaccaaacatacggcggccaccgagggcgaccttatcccggccgacaaggcggcgctggtcgctctgctcaatgtggatgtaggcatgccccaaggccgcatgtcggtcctgtcagcaatcgaatacacggtagagagtctggtgcgcgtctacgaagaagacgccaaggaactcgacctgccggtcctgatcggcctccaggcgcaccggctggagtgttgagtgggcatcgagacgaggcgatacatgcgcttgctcgtcttcttcgatctgcccatggtcaccaaggccgagaagcgcgcctatgtgcagttccggcgcttcctgctcaacgacggctacgacatgatccagtggtcggtctatggccgcatcctgaacgggcatgacgcggagaaaaagcatttggcgcggctggcggagaacctgcccccggagggctccatacgctgcatgacggtcaccgagaagcaatttgccgggatgcggctgctggtcggcctgccgctgtttcaggaaaaaaaggttccggcgtcgcaaatgctgctcttttgaaaccaaaatccaaaagaaaaatccccacccggcaaaagccgggcggggatcaaggttgagtcagattgtagctatccggggtgagagagggagctacaaccctgcctgcgcattgtgcacaacaacacgggattgtagctatccggggtgagagagggagctacaaccttcggcggtatctatcttgcgcagctcttgattgtagctatccggggtgagagagggagctacaacagggacctgccatgagcgaaggttgcccaagattgtagctatccggggtgagagagggagctacaacggcgaggtgtcgtgtgccgtgatgcccttggattgtagctatccggggtgagagagggagctacaacaagcgcgacgacgcagcgatcgagaaacgtgattgtagctatccggggtgagagagggagctacaacgcgccgggcgggcggtcggtgatctgttcggattgtagctatccggggtgagagagggagctacaacaacgatccccttcggcttgctggccagtacgattgtagctatccggggtgagagagggagctacaacttgtactgcgcaatgtgctctcttgcgtttgattgtagctatccggggtgagagagggagctacaactgatcttccaggcgttgcgatccttcgccagattgtagctatccggggtgagagagggagctacaacgatcaagctcaaatggaagcagcatttcccgattgtagctatccggggtgagagagggagctacaaccgcagccaatgcgtttcgggcttgcttggagattgtagctatccggggtgagagagggagctacaacggggcggttccggcaaaggcgtcccgcagcgattgtagctatccggggtgagagagggagctacaactgagacatccggcgatgaaaccgcccccaagattgtagctatccggggtgagagagggagctacaaccgaggaggaggcccaggcgctggctgagttgattgtagctatccggggtgagagagggagctacaacccgtggccaagcccttgtgtgcgtagggtggattgtagctatccggggtgagagagggagctacaaccgctccgggttgtacgtgtcgagcgccggggattgtagctatccggggtgagagagggagctacaacccatagctgggcaccgcgacgcggcgcacggattgtagctatccggggtgagagagggagctacaaccgccggccacgccacgccgcataggccggcgattgtagctatccggggtgagagagggagctacaacggatgaatgagccaagccaaagcctagtgcgattgtagctatccggggtgagagagggagctacaactcgctgtaactctcggcttccgcgtcaagcgattgtagctatccggggtgagagagggagctacaacctgatgtggtgggatatgcgagctgtcaaagattgtagctatccggggtgagagagggagctacaaccgcgctatatcctcctcgaatcgcgtgcgggattgtagctatccggggtgagagagggagctacaacccggccggtgcttgatccaccaaacaaaaagattgtagctatccggggtgagagagggagctacaacatgtcgccgtcgttcatgctttacccttttcgattgtagctatccggggtgagagagggagctacaacaagaggatgtgggcgacctcgtggtcgatggattgtagctatccggggtgagagagggagctacaaccccacgaagccgcgaaagaactgcgcgaaggattgtagctatccggggtgagagagggagctacaaccacgttggctgcatcgccctaaccggagtggattgtagctatccggggtgagagagggagctacaacctcttcttagtgcgcagcacggcgccaagcgattgtagctatccggggtgagagagggagctacaacccgtgccgctggcctgcttggtcaccaagagattgtagctatccggggtgagagagggagctacaaccgcgatagcacatgatgtccgacggcggcagattgtagctatccggggtgagagagggagctacaaccccgccgcgagtgcggcatcaccgaagcgcgattgtagctatccggggtgagagagggagctacaacgctgcgtcgaattcatacgacccggtggcggattgtagctatccggggtgagagagggagctacaacacacgattacggcggtcgacaactatgccagattgtagctatccggggtgagagagggagctacaactgcttggaatagacggcacggcagaaatgggattgtagctatccggggtgagagagggagctacaacaggtagccgagcgggggcgtggtgaccgtggattgtagctatccggggtgagagagggagctacaacgttaggccgacagggggagattgctggtgcgattgtagctatccggggtgagagagggagctacaacctcatgatcgacggatgtgccaaaacccggcacacccctcaatcatgaagttcttgcttcgcaaggtcagcaagaaagtgaatccctacgcgccctctcgcgcaagagtcg

SEQ ID NO: 2933 - DNA, 7513 bp, synthetic construct
  misc_feature 1..7513: note = Synthetic
  source 1..7513: mol_type = other DNA
tgaccgaagacgatatccggattgaattcaccggcctgcgcccgggcgaaaaactttatgaggaactgcttgccgacagcgaacacacgttgccaacgccacacctcaagctgcgtattgcgcgggcgcgtgaggtaaatgcagcatgggtggaaagcttgctggcctgggttggtacgcgtgccacgcaggatgatgcggaggtaaaacgggtcttggtgcaatgggtgccggaatatgtgccagacaaaacaaaattattgtaatcaccgggttgcccggcaagatatgggttacaagtgacacctcaaactgaaagtaatgccgctgggctatccgtaatcatcatcaccaaaaacgagacgctcaatatccgcgcctgcctcgagtctgcgatgtgggcggacgaaataattgtggtggactccggcagcacggacgatacggtgagcatctgtaagggcatgggcgcacaggtgtatgtgcatccggactggccaggctttgggccgcagaaaaatcgtgctttgagccatgcgaccaagaactgggtattttccatagacgctgacgagcgcatcacaccgcaactgcgatcagagattgaacaggcgatttgcgagccaaaagtagacggctattactgcccgcgcctttcgcagttctgcggcaaattcgtccgctactcaaactggtatccggattatgtgctgcgcctgtttaagcgagaaattggcagattctcggatagcctggtgcatgaaagcctggttctgcaaggccaagcggccaaattgaaaagcccgctactgcattacagctacctcacggcagatgatgtagaacgcaaggtggaacactactccacagccgccgcgcaacagatgttccaatccggaaaacgatccaataaactggttgctgtcttgcgcgggggctgggcgtttatgcggacttatatcctgcggctgggtatattggatggccctaccggatggaacatcgcacgcatgaacgcgcgcactacctacctgaaatatcgcaagctcgaactgcttgttgcctcaaataaaaggcagggtgaaatctgattcattgcctcacctgaaaaggtgagtcaaattgtgctatttcatggttcgcccgtttgcgagctgaagcgggtttcactcagatttttgatgaggcaactcgctcccttgacaccccaacacccatcacataaagttcacggctcttgcgcaaccgccggaacagaatcgcgccgcaatgtacggcacggtcacggcggataatcagcataggaggctggcgcatttccttcacttgagttccctctcccatcgggagagggttagggtgagggcgaatttcccgcatacagcggatttgttattaaggggataacaattgccggcctccatccatctcgtaatcgtgatactcgcgcagcgagtccgcatcgccctctcccgctcgcgggagaggggtggggtgagggaaacgtgcttgcacgttcgtgacgcacgggcgtttgcccatgaaggctcacgcgcaatgttcggcttctacagtttgaatccagaaactttttcggaaaagagaaagcccagaaggtttccccgctgggctttcggatacagattcagcctttcggctttatctttattgtagcaacggctctcaccccggatgaactactacaacagtttcattatcacggagaacgcgatgacaagcaagcaagaaaatctcggcgcactgactttcgggttggacattggcattgcctcggtgggatgggcggtgctaggtgaaaatcgcatcattgatttgggtgtgcggtgtttcgacaaagctgaaaccgccaaagaaggcgaatcactcaaccttgcgcgccgcactgcgcggctattgcgccgtcgtctgcgtcgtcgcgcatggcgattgaccaagctggcgcgcttgctcaaacgcgaaggcctgattgcggatgcaaaacattttcaaaagccgttcaacctgaaagatgccaacggaaaggggctatccttttggcaactccgtgtggatgcgctcgaccgaccactgaacgccgaagaatgggcgcgcgtgatatatcacctgtgcaagcatcgcggctttcattggattagccgcgctgaagaaaaagcggcggaaggcgatagcaaaggcgaagggggtgctgtcactcaagccttgaaaaaaacagaatcactcaaggccaaataccgcaccgccgccgaaatggtgctggcagaattcccggaagcacagcgcaacaagcaaggcgactacagcaaggcactgtcccgcatcctgctcggcgacgagttgaaagcactgtttgaatatcagcgcaaactcggcaacccgtttgccaccgaggaactggaagccgccattctcggcaacggcgaccgcaagagcggtttgttctgggcgcaaaacccggcgctgtctggcagcgatttgctgaaaatgctggggcattgcaccttcgaaaaatccgagtaccgcgcacccaaggccagcttcaccgccgaaaggcacgtctggttgacccggctcaacaatctgcgcatcgtggtggatggcacgacccgcccgctgaatgaagcggagaggcgtgtcgcgctgccattgccctaccagcaagctggcgacttgacctacaagcaactgggtagcgcgctcatcaaggaaggttttttgcagaaagacggcttcaaatttgcgggcctaccctaccccaccaaacaagccagcgaagaaaaaaccaaagacccggaatccgccgtgttgtgcaaactccccgcatggcataccttgcgcaagacattggagaagcatggtttggaaagcgaatggcagaagatttccaccgatgcgctggaaagcaagccgcagttgctcgacgagatcacgcgaatattgagtgtgtacaaagatgatgcggaagtagaggccgaattacgcaaagtagcgttgccgaatgccgagaagatgatcgacgcgctgctcgacatccgcttcgacaagttcagcaacctgtcgctcaaggcactcagcaagatcgtgccgttcatggagcaaggccaacgttacgacgaagccgttgccaatatcccggaatacggccaccacagccagttgcacatcgtcggtgcgggcgaacataaatacctgcctccgttttattcggggcgcgacaagaccgggcgcatggtattcaacgacgacatggacatcccgcgcaacccggtggtgctgcgcgcgctcaaccaggcgcgcaaggtggtgaatgcgctcatcaagcaatacggctcaccgcatgaggtgcatatcgaaatggcgcgggatttgtcgaggccactcgatgaacgacgcgaagttgagaagctgcaaaaagaattccgcgacaacaacgaaaaacataaaaccgagttcgcaagcacattcaacatcgtcggcgcagtcaaaggcaaagagttcgagaaattccagctctaccgcgagcagcaaggcaagtgcgcttactccattgagccgatggatattcaccgtttgtttgaacaaggctacgtcgaaatcgaccacgccctaccttactcgcgcagcttcgacgacagcaagaacaaccgggtgctggtgctcgcaaaagagaatcgcgacaagggtaaccgcacgcctttcgaatatctgggcggcaaagataacagcgaaccttggcggcagtttgtcgcctatgtcgaaggcaacaaagcctatcgcctcgccaagcgcagccgcttattgcgcaaggatttcggcgaaaaagaagcaaaggaattcaaagaacgcaacctcaacgacacgcgctacatctgcaaatttttcaagaactacgtcgagcaatatctgcaacttcatacagacagcgaagcaaaaaaatgtgtggtactcagcggtcagatgacctcgttcctgcgcgcccgctggggcttggtcaaagtgcgcggcgacaacgaccgccaccacgcgctggatgccgccgtggtcgcggcgtgcagccacggcatggtcaagcgtttgtccgattattcgcgccgcaaggaattggagcaggtaagagcaggctttgtggatatagacggcgtgatactcaacccggcgatgttcgagcagatagaaaagcatttccccaacccttggccaaacttccgcaacgaactcgatgcacgcctgaagctggatgaccccgcacagttgcgtgaagaaatgcagcgcctcggcacatattcagatgaggcattgcagtccgtgcaacctctctttgtatcgcgcgcaccgcaacgccgcaacagcggagcagcgcataaggacaccatctacgcgcaaccagagcggctggtcgcacaaggcggagtcacgcaaaaagtggctctttccagcttgaccttgaaggatatcgacaagctgatcgacccgcaccgcaacgagaaactttacgcggccatccgcacccgcttggaacatcacggtggcaaaggtgacaaggcattcccgtccagcaacccactgcgtaaacccgacagcgaaggcaacccgactggcccgattgtgcgaggcgtcacgatggtgatcgacaagctatccggcattcccattcgcggaggcattgccaaaaatgacagcatggtgcgggtggatgtcttcaccaaggcgagcaagttccatctcgtgccagtgtatgtgcatcacagcgtggcgaaggcgctaccggatcgggcaattgtggcattcaaggatgaagatgaatggacgctgatcgacgatagcttcagtttttgcttttcgctttatccgaatgatctggtgcaagtgcagcaaaaaggtaaggccgctatccttggctactactcaagttgccaccggggtacggggaatctcaatctttgggcacatgaccgcagcctacaagttggcaaggaggggatgattgaaggcattggtgttaaaactgccttgagcctcgaaaaattcaacgtcgatatcctcggtaaccgctaccacacaccgcaggaaaaacgccgtgacttggcgtagcgtcgtcatctcgcgccctgccaagctgcggcgcgaacaattccgtcttgccatcgagcaggagcaaaccgcgttcgtgcccttcgaggacatcgcggtgatcgtgctcaaccaccgcgaaatcacgctcacccatccggtgctgtcggcctgcggtgaatacggtatcagcctgttcgccacgggcgacacgcatcatcccagcggggtgtttattccctttctgccgcactcgcgcgccacgcgttggctgcgcctgcaactgaatttgccgcgccctgtcgccaagcaatcatgggcaacgattgtgcgcagaaagatcgacaaccaggccgcctgcctgcggctgtctggctgcgagggtgctgatcggctggattcctatgcgcggagggtgcgctccggcgataacggtaatctggagggacaagctgccgctttttatttcgcgcaactatttggcaaacactttcaccgcaaccaggcgcgcttcaccaatgccgcgctgaattatggctatgcggtgttgcgcggagccatcgcgcgcgggctggttgcgcatgggctgttgccttcgctggggctatttcacgacagcgaacagaatgcctttaacctcgccgatgatgtgatagagccgttccgttctctggtggacttgttcgtttccaaacatatcatgccggatgatgatgaattgcgcccggaagacaaggtggcgctggtaggcttgctcaacgtggatatgggcatgccacgcggaaaaatgtccgtgctttccgctatcgaacatacgatagaaagcttggcgcgtgtgtatgacggcggcagcgagtcgctgcttgagttacccgttttgatcggattggagcagcaccgcttggaatgctgagccatgaataagcggcgagaatttctatgttgtcattcccgcacaggcgggaatccagttttgataaaagcactggattccgggtcaagcccggaatgacgggatgccatgagcacggaaacacgacgattcatgcgcttgcttgtattcttcgatcttcctgttgtcaccaaggccgaacgccgcgcctataccctgttccgccgttttctgatcaacgacggctacgacatgatccagttctcggtatatggccgcatcctgaacggcaacgacgcgctggaaaaacacatgaagcgactggtgaacagcctgccgccggacggttcggtgcgctgcctgagcgtgacggaaaaacaattcgccagcatgaaaatgctggtcggcctgccgctttttcaggaaaaagcgctcaaggtcaatcaaatgctgctgttttgagcaacgatttttcaagcagaacgcccgccagattgaggtctggcgggcgtttgcgtgagagctattgtagttcatccggggtgagagagggagctacaacgcaagcccggctggcgatgatctgcgtgagattgtagttcatccggggtgagagagggagctacaacggtcatcaagttatgccccggcgcggccagattgtagttcatccggggtgagagagggagctacaaccacgcggcgctcggggtgttcggcgatccaattgtagttcatccggggtgagagagggagctacaacttgcagtgatggttggcagtagagcgcttaattgtagttcatccggggtgagagagggagctacaactacgtgagtggccagcagttgcagtgcttgattgtagttcatccggggtgagagagggagctacaacgctggcgcagacgacccctaaaggggccatctgtccagcgttctcgcttcgcgaggtttagcaggaaaggcctcccggcaattttccgatttgtccaaaccacgccctctgcgctgttatgcatggggcgtgtcactacgccggtatgttatccttcatcttggttgatttcgcatattccccgatgaagttttttttgctcgccctgcttttgatcccctctattgcgttggcggatcatgctgcaaaagtgtccacgctaaaccttgtagagtggacacctccagccatacaccaagaaaaaattgaagaggctgcccaagccaaggagcaagctccggcaaaggttgatgaaccagtcagcccgaatgccgaagaagctaaagttaaagctcccgaaccacaggttgcagatgtgcaggcaagccctgcagtggttgatgtgggcgcaaacaccgaattgcaggccgggctcgatttttacctgaatggaaactacctttccgcgctaaaggcgcttattccgcttgcggacaagggagttgtggccgcacagctccgccttggcgtaatgaatgagtttggccaaggcgttccgcagagctacaggaaagctgtagcgtggtatcgcaaggc

SEQ ID NO: 2934 - DNA, 7154 bp, synthetic construct
  source 1..7154: mol_type = other DNA
  misc_feature 1..7154: note = Synthetic
actcgaacccccacactgttaccagcggcggattttgaatccgctgcgtctaccgattccgccatcccggcaaagggccaaacgcgaacgcgtccggcgacagaagccgggcattatcgccgaaccgcgccaaatatggcaaggcggctaatccaacccacgtgattagtgtgaaataacgcgtagcgtttcttcaaccccatcgccctttagcacggagaggatggagcgaaggaaacggacattcaaaaatgtcgttttattgtttgggactgcgttttgtcatgcccaatagggttacaaaactgcaacacaaaagaaaaagacccgaagcaagcctcgggtcttttggattcggttcatccttttcaggataaccttattgcagcaacggctctcaccccggaaagctacaactgcaaacactatacaaggaggcaacggtggaaagcaacaacaagaatctgacgttcggtttcgacattggtatcgcctcggtgggctgggcagtgcttgcgcccgacaggatcgtggcgcttggcgtacgggcgttcgacaaggccgaaaccgccaaggaaggcgaatcgctcaaccttgcgcgccgctccgcacgcctgatgcgccgccgcctctatcgccgcgcctggcgacaaaccaaagtggcacgcctgctcaagcgtgaagacttgatcgccgacgcacggctttttcatgaccaacgccctgcccctttatcgccctggcaattgcgcgtcgaaggtctcgaccgcctgctcgcacctgaagaatgggcacgcgtgatttatcacctgtgcaagcaccggggctttcactggatcagccgcgccgaagagaagaaggcgggcgaggatgcaaaaggcgaaggcggcaaagtaaagcaagggctggctgccacgacaaagcggatgcgcgagaaaaactaccgcacggccgcggaaatggtgctggccgaattccccgatgcccagcgcaacaagcagggtgactacggcaaggcgctttcacgtgctttgctcgccgaagaaatcaacctgctttttgagcgccagcgtgcgctgggcaatccgcataccagtgaagcatttcagacggcgattctgggcgatggcgaccgcaagagcggattgttctggatgcaacacccagcgctgtctggcggaaaaatgctggagagaattggacgatgcacatttgaacgtgcgcctatgcgaccaggcggccctgatggaaaaggcgaataccgcgcccccaaagccagctttagcgccgaacgtcatgtttggcttacacggctgaacaatctgcgcgtcgtagtcgatggcgttacacgcccgctcgacgccaccgaacgagcggttgcactgccgctgccgtaccagcgtgctggcgacttgaaacacgaacacctgcgcaaagctttgaccaacgcgggcttgtggaatgagcgcgtgcgtttcgccaaattcccctacgcacaaagttcggatggcaaggccaaagacccggaaagcgaagtattggtcaaactccccgcttggcaggcgttgcacaaactgctgaaggacaagggtctagaaaccgaatggcagggcatggctggtgcggcgcaaacagatgactctgaaatgctcgaccaaatcgcttgggtgctatcggtttataaggacgacaccgaagtcgaatgcgaactcggtaagctcaatcttccgggcggcaaggcgatgatcgacgcactgggcgaaatccgcttcgacaaattcagcaatctctcgctcaaggcactgcgcaaaatcgtgccgtacatggaagccggccagcgttacgatgaagcctgcgaagccgccggctatcaccacagccagttgttcaagctgggggaaggtgaggaacgctatttgccgccgttttactcagggcgcgacaaagacgggcgcatggtgttcaacgatgatatggacatcccccgcaaccccgtcgtgctacgcgcgctgaatcaggcacgcaaggtgatgaatgcgctgattcgtattcacggctcgcccgcatcggtacatatcgagatggcgcgtgatctgtctcgcccgatggatgaacgtaaaaagatcaagacggcacaagacgaataccgggagagaaacgacaagatcaaggcaacattcgcagcggaattcggagtgccggccaagagccgcgagttcgaaaagtttcagctttatagtgagcagcagggtaaatgcgcgtattccatcgagccgctcgacctccaccgcgtattgcatgacatcggctatgccgaggtcgatcacgccctgccctactcacgcagcttcgacaacagcaaaaacaacaaggtactggtgctcgctaaggaaaaccgcgacaagggtaacgccacgccctatgaatatctcgacggcgcgaacgacagtgaacgctggcggcgctttgtggcctacgtcgaaggcaacaaaacctaccgcctcgccaagcgcacccgcctgctgcgcaagaacttcggcccggaggaagccaaaggcttcagtgagcgcaacctcaccgacacccgctacatctgcaaattcttcaagaactacgtcgagcgctatctgaagctcgccgatgaaagcgaatcgaaacgctgcgtcgttctttccggccagctcaccgcttttttgcgcgcccgctgggtgttgacgaaaatccgttccgacagcgaccggcatcatgcgctggatgctgccgtggtcgccgcgtgcagccacggcatggtcaagcgactgtccgattattcccgccgcaaagagttgaaagcggtgcgcgatggtttcgtcgatctggaaacgggcgagatcgtaaatcccgccatgtaccagcaattggaaactcatttccctgatccctggccggaattccgtcacgaactggaaacgcggctgttcacggatgaccctgcacaattacgggcaggcatcgaacagctgggcacgcacacgccggacgcactcgatgcgctgaaacctctgttcgtctcgcgcgccccgcaacgtcgcaatagcggcgcggcgcacaaggacacgatctacgcgcaacccgaacgcctcaaaacgcaaggcggtgtcacacagaaagtaccgctcgtgaacctcaccttggccgatttcggtgaggccaacaatgaagacaaaccctgcaaactgatcgacccgcaccgcaacgaaagactctatgcggccatccgcgaacgcctcgaagcgcacggcggcaaaggcgacaaggctttcccggcgagcaacacgctgcgcaaacccgaccgcgacggcaaccccaccggccccgtcgtgcgcagcgtcaccaaagtcatcgacaagcagtccggcatcccgatacgcggtgggctggccaagaacgacaccatgctgcgcgtggacgtgttcaccaaaggcggcaagttccaccttgtgccggtgtacgtgcatcaccgggtgaagggattgccggatcgggcgattgtagcgttcaaagatgaacgggaatggacgctgattgatgagagttttgcgttttgtttttcgttgcactccaatgactttgtgcgggtctctcaaaaagggaaaatgccaattcttggctactactcaagttgtcatcgaggaaccgggaacatcaatctatgggcgcacgaccgtaatacgcaagtaggcaaggacggcatgattgaaggcatcggcgtcaaaaccgcgctctcgatcgaaaaattccacgtcgatgtcctcggcaatctctaccccgctccgccggagaaacgtcgtgacttggcgtagcgtgatgatctcccgccccgccacgttgcggcgggacaagttcgctttgctgatcgaacaggaacacgacgcgcgcgtaccattcgaggacatcgccgtcatcgtcctcaatcatcaagaaatcacgctgacgcatccagtgctgtcggcctgcggggaatacggcatcggtcttttttccaccgggccgacgcaccaccccaacggcgtgttcctgccgtatctgccacacagccgtgccacccgcatgttgcgcctgcaactctcgttgagtcggcctgccgccaagcgtgcctggcaaaccatcatccaggccaaaattcagaatcaggccgactgcctgaaacttgctgacaaacccggcgtggaaaagctggaatccatggcgcggcgagtgcgctcgggcgacccggacaatatcgaatcgcaggccagtgcgctgtatttccgtgcgctgttcggcaacgatttctatcgtggtcaaccacgctggatcaatgccgcgctggattacggctatgccgtattgcgtgccgccatcgcgcgcgggctggtggcgcacggctttctgcccgccttaggcctgttccacgctagtgaacaaaacgccttcaatctggcggacgacctgatcgaaccctaccgcccactggttgacctgcatgtcatcaaacacaatctcgggcacggcgtggacgacttgctgcccgccgacaaagtgccgctggtcagcctgctgaatgtggacatgacgatgccgcgcggcaccatgtccgcgctgacttccattgagcaggcggtcgagtccttggcccggcgatttgagagcagcagcgaaaccctgctggaattgccgcgcctcatcgggctgaccttgcaccagcatgagtgttgagacgaggcgcttcatgcggatactggtattcttcgacctgcccgtcgtcaccaaaaccgaacgccgcgcctacaccgtgttccgccgttttctgctcaacgacggctacgacatgatccagttttccgtttacggacgaatcctcaacggcaccgacgccgaaacgaaacatatgaaacgtctggtggacaacctgccacccgccggttccgtgcgcgtgttaaccgtcaccgaaaatcagttcgcccgcatgaaaatgctggttggcctcccgctgttccaggaaaaatccgtcaatgctcagcaaattttgctgttctgaacacgaaaaataaagccgcaaacccgctcagagacaagctctgagcgggtttgcggcttgagtattgtagctttccggggtgagagagggagctacaacgccaggaactcagcggtcgagcggcggttgattgtagctttccggggtgagagagggagctacaacctcaaggcacaccgtagttgtcatgggcatattgtagctttccggggtgagagagggagctacaacatctcgagacggcgcttctgccatttcgggattgtagctttccggggtgagagagggagctacaacgcagcgcgcaccgcagcagtcgaagccgaaattgtagctttccggggtgagagagggagctacaacgaaggtggcggcgatgtcgagaaagccgcgattgtagctttccggggtgagagagggagctacaacgtgcaaaacgatagcaatggcgtgaccacgattgtagctttccggggtgagagagggagctacaaccgtggtcgttgtctcgcgtcgatgggtctcattgtagctttccggggtgagagagggagctacaactgatatgcgcgaaatatggacgctccggttattgtagctttccggggtgagagagggagctacaacctgctgattgaaggcgcgagacggcatctaattgtagctttccggggtgagagagggagctacaaccggtggccttgtgtttgtctagctttctgtattgtagctttccggggtgagagagggagctacaacgccgagggcggcgcagtcaacctgcccggcattgtagctttccggggtgagagagggagctacaaccagtgtttacgagcggaggcaggggattgaattgtagctttccggggtgagagagggagctacaacgaaagggatgtccgacccgtcatcatcgaaattgtagctttccggggtgagagagggagctacaacccgcaagatggcgagcttggcgagacggatattgtagctttccggggtgagagagggagctacaaccatacatcgttgctaccacaattcgggcaaattgtagctttccggggtgagagagggagctacaaccaccagggtcagcgtgaggtctttcggcagattgtagctttccggggtgagagagggagctacaacggtcgcgggcctcaccatacggcgggttgcattgtagctttccggggtgagagagggagctacaacccgagtgtaaggatgtcaccaggccccagaattgtagctttccggggtgagagagggagctacaaccagcgtcgccggcgacctcgccatcacctgattgtagctttccggggtgagagagggagctacaacgacgggctgatcgtggccggcacgccgggcattgtagctttccggggtgagagagggagctacaaccacgtccagcccggcaaggcttccagccggattgtagctttccggggtgagagagggagctacaacctcattcgtccgctccgctgcgtttgcgcgattgtagctttccggggtgagagagggagctacaaccttgcccttgtcgatgatgagcgagacggcattgtagctttccggggtgagagagggagctacaacagcgtcagcgtgccggcggccgaggcctggattgtagctttccggggtgagagagggagctacaacccctgttcgtcactcacccaaaggccgagaattggactgccccgtgttcagtaggcatccggggcctatgatttgagcataggaggagtgccatgagttcgcagagattcaccccggaatttaaagaagaagctgttcggcaggtggtcgagcgcggttattcggttgccgaagtgtccgcccggctgggcgtttccacccacagcctgtacaagtgggttaaggcagtcacgcccgacaagacggaaaagcaggctgccgacctgcttgaagccaagagtgagatattgcgtttgcgggcgcaaatgcgtcgcgtggaggaagaacgcgacatcctaaaaaaagccgcgcggtactttgccagggagcccgagtgaagtaccgcttcatcaacgaacatcgccacgagttt

SEQ ID NO: 2935 - DNA, 6998 bp, synthetic construct
  misc_feature 1..6998: note = Synthetic
  source 1..6998: mol_type = other DNA
cttgttaccggtgacgttgcggaaaacttcccactcctttatcacctcgacggcgcgttgaagctggttgtccttctccaggtcgaacaccttgcgcggcccgaactcctgctttatcggagccacaggttttgaggtttccttgtccttgtcggtcggcggaaccttcggtttaggggcgggcctgccgtcgccgccgcccgagaaactctccatcaaatccttttccctcatcggctcaatgccgtcgtcatctcttccgggaattttcagcttcacctctatgtcggggcttacaccgaccccgtgaatcatgattccggccggggtgaaatatctcgcggtggtcaggctaagccccgagccgtcgctaagctcccttaccgtctgcacggaacccttgccgaaagaacggttgccgataagcaccgcgcgttttgtgtcctttaaagcccccgccacgatttccgaggcggacgcagaaccggcgttgatgagcacgaccatcgggatgtcggccagtggagccttgttgtgggaataaaacacggcgttttgttcgggagtgcggccccgcgtgcttactatcgtctgcccctctttaaggaacagctcgcaaacctcgaccgcctctttcaacaggccgcccggatcgttcctgagatccagcacgagcgccttgaatttcttgtccttgaatttcttgagagcctccccggcctcaagcgcggtgttcatggagaaggtgacaatccgcagatatccgatgtcgccgtctatcatctcgaatttcaccggatgaacctttatcgtggcgcgggtaagctcgacgtcgaacggcggaagcgcctctttcccctcgccgcgcaggatggtcagcctcaccttggttccgacctcgccgcgcatctttttaacggcgtccataatctccatgtccttggtggtcgtgccgtcaatttttataatcttgtcggccgccagaagacccgccttctctgccggggtgtcctccatcggcgcgacaatggcaacaaagccgtcgaacacggttatttctatgcccaacccgccgaatttcccctcggtctcctgcttcctgctgtcgtaggccgacctgtccatgtatgcggaatgcgggtcgagcgtgcgcagaagccccttgatggccccttcggtcaaatccttggtggatttctcctcgacgtagtaattttgtatgagcgtcatgacctcggcaaacacgcgaaggttttcgtatgtcgagtcccccgccgcctgggccgacgtgcgggacaacgccacgataccgatgccgacgcccgcgaaaaacgcgcccgccgaaatgtaaagagtggccttcagcaaccgctttgcggcgttcataaacatggaattcttgttttcattcatagggcgaaatactatcacgattgcccccaaaactgaaaattttcggatatcgcttgatatttgcgtgctttcccacaaaccagccggaaagtcgttgaataaagtcctccccgtccgctttcgcttgggagaggctaaggtccccatgcagaacttgcgttccgggggggcgcctgcgagccgaagctcttgttatgagtccccttagggaggaccgagtaaatccgccattttgacattacatcttgatagtatataatttcttattgaggaaggggaaaatacaaattgttaaaaagacccggcgccgaagcgccgggacggtttcgggtcatcgccctaaggcgattcccttattgtagcaacggatctcaccccggtatgcaacaacctgctgtattgtatctttaaaaagagggttttatgcaaaaaaaatctccgccttacacgctagggttggacataggcattgcttcggtaggcgccgcattacttattttaaaggaaaaacggattctcgccctccatgtcagaacttttgacaaagcagagaccgccgacaaaggcgaatcgctcaacaaaattaggcgcgaatcaaggctgacccgccgacggattggcagacgcgctttccgcttaaaacgccttgccaggctgatgaagcggaaaggtattattgagagagcctctccagatacatttgtaacgccccacctatcaccttgggatttgcgtgccgccgggcttaaccgtatgctggaaaaaaaggaatgggccgccatcatctaccatatggtcaaacacaggggttttcaatcaaaccgcaaatcggaggccaaagccgatgccaaaatcggcgatatgcttgccggggtcaggcagaacagcaccttactgaaaaaaggtgagtacagaagcataggggaacttgcggtacaggatccggcattttcggggtcaaaacgtaacaaggggggcgagtataaccacaccttcgccagggaagacttgacggcggaattggatctgctatttgaacgccaaggagcgttaaaaaaccccttcgccggtgagacttttcatgccgaggtaaaaaaattgctattacagcgccgcccacccctttcgggtgatgctcttctaaaaatggttggaacatgcacgttcgagaaagacgaactccgcgctccaaaagccggatatacctccgaacgtttcatctggctgggaaaactaaacaaccttaaaatcgtaggcgacggcaatccacgcccattaaccgatgaggaacgcaaggccgtaattgagttgcctttcgagacgtcaaaactaactttcaaccagattcgcgccaaacttaatctcacacagaaccagcggttcaacctgctctcatatcgcaatggcaaaaagggggacgacaaagacccggaaaaaaagaccttttttgaggcgacattttttcataagctttgcaaggcatacagtgatgccgggctagattcgcaatgggaacgggacaaagccaaccccggaggcaaactggacacgctgggttacgcacttacggttttcaaggaggactctaaaagccgcgaatatctcagggccaatggagtggacgatgccataattgaggcggccttgacggaatcatttgaaaagtttattcacctatcgcaaaaggcccttaacaaaatacttccattcatggaggacggccagcgttatgacgaggccgctaattccgcaggatacaaccacaaccagccgattcccaccgctgaaagaaaaccatccctgtcagccccggacaggaactctataaggaacccggtggtatatcgcgccctcaaccaggctcgaaaaatggttaacgctatcatcaagcaatacgggccgcctgcacaggtcaacatagaactggcgcgcgacctatccaaatcatttgatgagcgcaatcgaattgcgaaagagcaggaaaacttccgaacagaaaaagagggggcggcaagggatttccaaagattatttcaaagagcgccgaaaggcccggacataatgaaatggcggttttttaaagaacaaattgatcaatgtccctattgccagaaagcgctcgacgttaatcgcctgtttaatgacaactactcccaaattgaccacatactcccttcctcgcgctcttttgacgacagcctgaacaataaggtggtcgtccacataaaatgcaaccaagacaaacgaaacctcacgccatacgagtttttggacggcgccacagatggagaacgctggcgcaaatattcaggttgggttcaaagcaacaaatccataagacaggcaaaaaagaacaggcttctccgtgtcaatttcggcgcggaagaggctgaaaaattccgagagcgcaatcttaacgacacacggtacatttgcagggaattcaaaaacatggtggagtccaaccttaagtggcatgagaattcggaggggaatgagcgttgcctcgtcctctcgggacaacttacggccctgctccgcgcccgctggggtctgctaaaaaatcgagagggaggggacttgcaccacgctctcgatgcggccgtaatagccgcaactaacagtagcctagtcaaacgaatgtcggactactccagacgcaaggaattggaaatggttcgtgaaaactgtccggatccagaaacgggagagacgctggatgtagccacacttcgtcaaattgtgtcggacttccccaaaccatacccccatttcagggaggaattgcttggccgcctctctgccactccggctgagaaactccgagacatacagggatacgatgtagatttgatttcagaggttcgaccaatacacgtttcccgtgcgccaaccagacgcgggttgggctccgcgcaccaggacaccatcaggtcaatcggtggcaaaaagaaaaaggtaactgagaatagatggttgaaaaaagatgagtcggccgtcaaaaccccgattgataaacttcgtttagctgacttggaaaagatcgtgggggcggacgacccgcgcaataagaaatggatagacgctctgagggaaagacttgaacctcacaaggccgaggatggcaagtcgaacaaatgcgcaggcgcgaaggcgttcgccaaaggccagcctccccttttcaaaccaagcggggacggtaaaactcagccacaaatccgaaacgtaaagcttaagacaacccaaaaaagcgggattcaaattcgtggcggcattgcaaacaatggggatatgttaagggctgatatcttcaccaaagaaggcaaattttatgccgtaccactgtatgtggcggatgcggtgaagaaagagctttctgatagggccgtcagtccaaaaaaacctgagaatcaatggccggttatggacaagagctaccagttccttttttccctttaccggaatgattgggtggtaatccgccttaaaaatgaagtcagggaagggtattatgctggtctgaacaggtcaaataactccattgatttatggtcccatgatcacaagaccatgctggaagggaacggtataaggacagcccttggccttgaaaaattccatgtcgatattcttggcaatctttaccgggccaagccggagactcgaaagaagattcacgtcgtgcggcaaaccaaaaggtaggaaatgggctggcgaagcgttgtcatcgcaaacccggcgtccttgacggtgcacgacaaggctttgtcaattacccaaggcgacaatacggccagagtcatgcttgaggacataagcgtattggtgctggaacacgcgcagataaaccttaccgcctctttgctttcggcctgcgccgaggccggggttgccgtgcttaccgtcaacgcttcccacctccccaacggagcgctaataccttatttgccgcacagcaggggcctgaaggtaatgactgcccaactggaacttcctctgccgcttaaaaagaggctttggcaacgtattgtccggcaaaaaataaacaaccaagccgcccttttaatacgggcaggaaagaatgacgattccaaacgccttttgcaattggcgggtaacgttcgctctggcgaccccgacaacaatgaggcaaaagccgcccaattatattttcgcgctttgtacggccctcagtttcataggaaccaagaaaggttctttaattcggccatgaattatggttatgcggtcgtacgagccgcaatagcgcgcactcttacggtttacggctttttgccggccttcggacttttccaccacagcgaacaaaaccccttcaaccttgccgacgatattatcgaaccctatcgtccgattgtagacagtgaaattatatcccattttccagaagaacctcatgatgacttggaacccccagacaaggtaaaactagtttccattctgcatggagaggtagtgctttccagccacctttccagcgaaggacgatgcacgttgctagccgccgtggaggctacggtgtcgggactttcctccattacattacaaaacgtcccaatcgagcatcttgcgcttccctacatggagtgtcaaacgccgagcgacaatgagccatgagcgaggaaacacgtagatttatgcgtctgttggtattctttgaccttccggtcacaaccaaggaaaaacgtagattttacgtccttttccgccgattcctaattcaagacggatatgacatgattcagtggtcggtatatggcagaatggtaaacggaattgacaacgctgaaaaacatctaaaaaggctctcatacaacctgcctccggaaggctcggtgcgttgtcttcaggtcagcgagaaacagttcgccaatatgcgccttttggttggtagacgcggttttcaggaaaaaaaggtgaatgctaaccaattgttgctattttgaacggaatttttcgacccaaaaacccgcgccgggtttgcctggcgcgggtttgcctggtagtgattgtagcataccggggtgagagagggagctacaatttgcaaggccacggataaatacctcgtcgtattgtagcataccggggtgagagagggagctacaatttactgccgcgcattattctggttgcgtcgattgtagcataccggggtgagagagggagctacaatcaattaatcatgtaatcctgattgccgttgattgtagcataccggggtgagagagggagctacaatgttttttccagcaggctgattccatattccattgtagcataccggggtgagagagggagctacaatgccataatcggcggcgattccgcaaccaccattgtagcataccggggtgagagagggagctacaattatcgtgtgcgagactctggcgcaacacaaattgtagcataccggggtgagagagggagctacaatgccgtcatcggaggccattcggaacgtcatattgtagcataccggggtgtgggtattccacggaaactttccaccgattccggtgaaactttccactccgtcggagcgaagcgacgctggtatt

SEQ ID NO: 2936 - DNA, 6905 bp, synthetic construct
  source 1..6905: mol_type = other DNA
  misc_feature 1..6905: note = Synthetic
gcccaggaactggcggccgttcagtcacggctgaaggagggcgacctcctcgcctacgtcatccccggcaagccgcgggaacggctcggccttctgctcgtatccgcgacggcgacgcggatcctgcggctcgtcggcactgtcgacgatgtggcgacgcgcctgaagcgcttccgcgacgccgtcgaggacaacgaccccaaggcgcagcgcacgctggcgcaagcgctgtccgccgcgctcgaaatcggcggctggggcgcgaagaaaaccctgtatttcgtccccgacgggccaacccacttcctgccctggggcgcgctcgccatcgaggtgccggtcgtcgtcctgccgacgggaggctggctgctgcgttcgcccaggcccctggccgacgccaaggcggccaccgtcctcggcgaccccgacttcgccggcaggctgccgcaattgcccggcgcgcgcgaggaagcgcgcgaggtggcaaaagtctacggcacctcgttcctggccggcgaagcggcgacggaacgcaggctgcgcgaggaaatcggcagcggcgtgggcatcctgcatctggcgacccacggcatgttcgacgccgactcaccgttgcagtcggcgatcgtgctggcgggaccggaagaggcgcgcaagctgaccgcggcccgcctgctcgaggcgccgctcgcggcgaggctggtgatcctctcggcctgcgaaaccggcgccggcaaggtgctcgccggcaacgacatcctcgggctcgcgcgcagcctgtacctgggcggcgccaccacggtggtgcacagcctgtggccgatcgaggacgccagcacgctcgaattcatgcgcagtttccatgcccgcgcccgcgacggcgactacggccaagcctggctggccgctcgcaaccgcttgcgcaagcccggccattccccctccgcctacggcgccttcgtcctcggcggcacgccgggagagtctcgttaagcatgcggccccgagggaagatcgcgggcggcgccgtcccgcacggactgacttttgcggcggagcgcgccgtcaggcggccagctccagggcgagggcgacggcgcccggcagcgcctgcgcccagaggatcttgcggctggcggtgagcgcgccgaagacgccggcgacgacgacgcagccgaggaagaacaccttgatcgacgtgccgcccgcgccgagccacagtccccacgccaggccggcgacgaggaagccgttgtagaggccctggttcgccgcgagcgccttcgaggccgcggcgaactccggcgtcaggccgaaggcgcggcggccgagcggcttgtcccagaaaaacatctccagcacgaggaaatacaggtgcagcagcgcgaccagcgcgacggcgatgttggcggcgatgtccatgattccctcctcagcgcttgcgtccggtgaaggcgtccatgctcctgctgatgccgaagaaatccatcagcgcgtcgaaccatgaaatcggcagcaggcgcagcgggaaggcgcagcgcacgaaccagggcaggatcacgcgcgactcgccgcgctcgatggcgcgcacgatgcgcgcggcgaccgcctccggctccatgatcggcagcagcagcgggaagcgcgtgcgcacgccctcgaacatgccggtggaaatgaagtacgggcagacgatggtggtccgcaccggcgcgccgtcgtgcttgaattccagccgcagcgactcgtcgaaggcgatggcggcggccttgctcgccgagtagtcggccagccgcggcacggcggcgatgccggacgccgaggcgatggtgacgatgtgcccccggccctgcgccagcatgccgggcaggaaggcgcgcgcgaggcggaacggcgccagcgtattcaccgcgaaggtgcgctcgatctccgcgtccgtcgcctccagcagccgcttgccgtccacgatgccggcattgttgatcagcacatcgaccgcgccgtgctccgccagcgtgcgcgcggcggcggcctcgatggcctcgcgctcggcgaggttgcaggcatacgtcgccgcctgcccgccggcggcggcgatctccgccgccaccgccgccaggtgcgcctcatccacatcccacaaaatcacccgtccgccccgcgccgcgatgcgcagcgccatcaagcggccgatgccgctggcggcgccggtgatcagcacgcgtcgactctggaattcggacatgatttcaccctcgggaaagttcagccgcaggtcgcattatggcgcaggcgcgagatccgccgtatcgtagaaactgacttttccgtagccggaaatagtaaggcccgacaggcaagcctgtcgggccggattcggtcgttacccgaaggcaactaccttattgtagcaacggctctcaccccggaagactacaatggaaacattctatccgcatggggcgccgtcatgcaacaagaaaaacttccctatacgctgggcctggatatcggcatcgcctccgtcggctggtgcgtccttggtgagaaccgcattatcgacctcggggtgcgcgccttcgacaaggccgaaactgcaaaagaaggcgacccgctcaacctgatacggcgcacggcacgtctgatgcgccgtcgcctgcgccggcgggcctggcggctgaccaagctgacgcgtctgctgaagcgacacggcttgatcgaggacgcaggtttcttccagccgcagcgcccatttcagggctccctgtggcgacttcgcgtcgagggactggaccgccgactcgacaatgaggaatgggcgcgcgtcatctaccatctgtgcaagcaccgcggcttccactggatcagccgggccgaggagaaaaaggccgaggaggacaagaagggcgaaggcggcaaggtcaagcaggggcttgccggcaccgccaagttgatgcgcgagaaaggctaccgcagcgccgccgagatggtgctggccgagttccccgatgcccagcgcaacaagcacggcgattacggcaaggcgctgtcgcgcattctcctgggcgacgaactcgccctgctcttcaagcggcagcgcgaactgggcaacccgcatgccgacccggcattggaaactgccctgctcggcaacggcgaccgcaagagcggactgttctgggcgcaaaaaccggcgctgtccggccaggacctgctcaagatgctcggcaagtgcaccttcgagaagggtgaatatcgcgcgcccaaggccagcttcaccgccgagcgccatgtttggctgacccggctcaacaatctgcgcatcgttgtagatggcacgactcgccccctcaacgagcaggaacgcagaaccgtgctgcccttgccgtacaagcaagccggcgacttcacctacaagcaactgcgtgccgccctggtcaaggccggcctgcttccagaatccttccggtttgcgggactctcctatccgaccggcgcgcagcaagccgaagggaaggccaaggagcctgagacggaaaagctggtgaagctcccggcatggcaggaattgcgcaagactctgaaggacaaggggctggaaaccgaatgggaaagcatggccggcgcggcagccggcggacaaccggaacttctcgacgaaatcgcccgtgttctgagtgtctacaaggacgacgaggaagtggccgccgtattgcgcagactgactttgcccggcggcgaaagaatggtcgaggcgctgctggacatccgcttcgacaaattccatgccctatccctgaaagccctgcgcaagatcgtgccgcacatggagaccggcctgcgttacgacgaagcctgcgaaaaggccggctaccaccacagccagttgcacgaagcgggcaagggcgatcagcaatacctgccacccctctactccggacgcgacaaggacgggcgcctggtgttccgcgaagacctcgacgtgccgcgcaatcctgtcgtcctgcgcgccatcaaccaggctcgaaaggtactcaacgccgtcgtccgtcgtcatggctcgccagctgccgtgcatatcgagatggcgcgcgacctgtcgagacccttcgatgaacgcaacaagatcaagaaggatcaggatgagtttcgcgcgcgcaacgagcgcgacaaggcggaattcgccgcccaattccgcatctccggcaccccgaagggcggcgatttcgaaaaatggcgcctatatcgcgaacagcagggcaaatgcgcctactcggtcgagccgatcgacattgaccgcctgctggaacccggctacgtcgaagtcgaccatgccctgccctactcgcgcagcttcgatgacagcaagaacaacaaggtgctggtgctcgccaaggagaaccgcgacaagggcaaccgcacgccctacgagtatctggatggcgccggaaacagtccgcgctggcagcaatacgtcgctttcgtcgaatcgaacaaggcctaccgcctggccaagcgcacgcgcctgctgcgcaaggatttcggcgccaaggccgccgaggagttccgggagcggaatctcaacgacacgcgctacgtttgccgcttcttcaagaactacgtcgagcgctgcctgaaactcgacgcggacagcgcggccaagcgctgcgtcgtggccagcggccagctcaccgccttcctgcgcgcacgctggggactcatcaaggtacgtgccgcgaacgaccggcatcatgcgctggacgccgccgtggtggccgcgtgcagccacggcatggtcaagcgcctggcggattacgcccggcgcaaggaactggagaaggtgcgcgagggcttcgtcgatgcggagacgggcgagatcgtcaatccggcgatgtttcagcaactgaagcagcatttccccgaaccctggccgcatttccgcgaggaactcgaagcgcggctgaagatcgacgatccggccctgctgcgcaaccagatggccttgctcggcacctacccggaagaagtccttgccgccttgcgcccgttgttcgtctcgcgtgcgccgcagcggcgcaacggcggcgcagcgcacaaggacaccatctatggccaaccggaccggttgaaagcacaaggcggcgtgacgcagaaagtgcccctcaccagcctgacgttgaaggacatggacaagctgatcgacccgcagcgcaatgaaaacctctatgccgccatccgcgccagactggatgcgcatggcggtaagggagagaaggcgtttctggccgacaaccccttgcgcaagccggaccgtgagggcaaccccacagggccaatcgtgcgcagcgtcaccattgtgatcgacaaactgtccggtatcccggtgcgcggcggtatcgccaagaacgactcgatgctcagggtggatgtgttccggcacaggaaggacggcaaataccatctggtgccggtctatgtgcatcatgcggtagcaaaggagctgccgaatcgggcggtcgtggcattcaaggatgaggcggagtggacgctgatcgacggcaactttgatttctgttttgctttgtatcctaatgacctggtccgcgtaaccttgaaaaaggaatcacacaccgggtactacgcaagctgcaatcgttcgaccggtgctatcaatttgtgggttcacgaccgtaaccaacaggttggcaaggatggattcattgagggcatcggcgtcaaaaccgctgtcgctgttgaaaagtttcacgtcgacgtcctcggcaatatctacccggcccctatggagacacgccgtggtctggcgtagcgtgatgatttcccgccccgccaagttgcggcgggagcacttctcgctcgccatcgagcaggaagaaaccgctttcgtgcccttcgaggacatcgcagtcatcgtcctcaaccaccgcgagatcacgctcacccatcccgtcctttccgcctgtgccgaatacggcatcggcctctacgccaccggcgccaaccaccagccggcgggcgtattcctgccctttcttccccactcgcgcacgacgcggctcatgcgcaagcaactcgatgtctcgcgtccggcagcgaagcaggcctgggccaacatcgtccgtcgcaagatcgagaatcaggctgcctgcctgcggctggcgaagcgcaagggcatcgaccggcttgagtcttatgcccggcgtgtgcgctcgggcgatagcgaaaatctcgagggccaggccgccgccttctatttcgtgcagttgttcggcaccggtttccagcgctccgaggagcgctgggccaatgctgcgctcgattacggctatgcagtactgcgcggcgccatcgcgcgcggactggtggcccacggccttcatccgaccatcggcctcttccacgacagcgagcagaacgccttcaacctggccgacgacctgatcgagcccttccggccgctcgtcgatttgcatgtcttcaagcacccgcccgccgtcgaaggagaattgacgcctgcggacaaggcggcgctggtcgccctgctcaatgtcgacatggaaatgccgcaaggcctcatgtcgacgctctcggccgtcgaatacgccgtggaaagccttgcccgcctctatgaggaaggcgacagcgaactccaactacccagactgatcggccttcagccgcaccggctggagtgctgaaaatgggcgtcgagacgaggcggttcatgcggctgctcgttttcttcgatctgcccatggtgaccaaggccgaaaagcgcgcctatgtgcagttccgccgcttcctgctcaatgactgttgattttcacccaaacttgacccggggttttcatctaaaactgacccacggtttatgcgcgtagtatagc

SEQ ID NO: 2937 - DNA, 6710 bp, synthetic construct
  source 1..6710: mol_type = other DNA
  misc_feature 1..6710: note = Synthetic
gccgagtttttttccgcggtgcccatcatcgcgcgcaagctgcatacgctgctcgatgtcggcctgggctacgttaccctcggccagagcgcaaccacgctatcgggcggcgaggcgcagcgcgtcaaactcgcactcgaactctccaagcgcgacaccggccgcacgctctatattcttgacgagccgaccaccggcctgcacttccatgacatcgacatgctgttgcgcgtcttgcaccgcctgcgcgatcatggcaatacggtggtggtgatcgaacacaaccttgatgtcatcaaaaccgccgactgggtgatcgatctcggccccgagggcggcgacggtggcggaaaaattattgccaccggcacaccggaagacgtcgcccgcagcgccgacagctacaccggccgctacctggccaagttactatcctgagacgatgaacccgcgcgacctgttactcggcagtttccacgcagcagtggcggcggccgatcccttgcagatcgtgccggcccatctgccaccaccaccggccggccgcacactggtgatcggtgcgggtaaggctgcagctgccatggcgctggccgtcgagcagcactggcccgccgacgcactcctcgcaggcactgtcatcacgcgctacggtcacggcctgccgacccaacgcatcgccgtggtcgaagccggccatccggtacccgatgccgccggcgaaagcgctgcacgcggcatctttaccgcagtcaaatcgcttacccacgatgacctgctgctggcactggtatccggtggtggatcgagtctactctcactgccggttgcatcgatcagcatggctgatttgaaggccgtcacccaggccttgctgcacagtggcgcgacgattcaggaaatcaacaccgtcagaaaacatctctcctcgatccagggtgggcgtcttgccgctgcctgcgcagcgccgatccgtgcgctggtgatttccgacgtaacaggcgacgacccgacacacatcgcctccggcccctgcgcgcccgaccccacgacttatgccgatgctttagagatcctcgcgcgttatcgctgcgcagtgccgccggcagttctgcaaaccctgcaacgcggtgcgtgcggtgaactcagcgagacacccaagcccggcgacccaatcttcgcgcgcacagaaaatcgtgtcattgccaccgcgcaacaatccttgcaagcggcggcggattattttgccgcgcagggcattcctgcagtgatcctgggtgacagcgtcaccggtgaagcacgcgccatcgccgccctgcacgccgcactggcacgcgaagttgcgacacgcggcctgccgtggcgtgcgccactggcgctgatttcaggcggtgaatgcacggtcaccgtccgcggcaagggacgcggtggccgttgcgcagaatttctgctcgccctcaccaccgaactccaaggtcaggccgatatgcatgcgctggccggcgacaccgatgggatcgacggcagcgaagacaatgccggtgcgatcagcgccccggataccctcacgcgtgctgccgcgctgggcctcaacgcgcagcaacacctcagcaacaacgacggctatggatttttttcagcgctcggcgatctggtgatcaccggcccgacgcgcaccaacgtcaacgactatcgcgtcatactcgtcggcgtttgacgcgacgcaactcatgcgcgcggggtgggcaaactcttcgatcaaagcgatgtttcttgatgctgcagacatttttcgggcgtcttcaaacattcagcccaaagtcaaaactggggtagacttttgccaacggggacgctggcgcgtttaggggaagcaccaaacgaaaagcccggtggatttctccaccgggcggattcgttttggtcttgcgaccaaaacttattgtagcaacggctctcaccccggattgcaacaatcgccacaagtatcgaggaggtcttcatggctgtcaagacaactgattcactgacttttggtctggatatcggaatcgcttcagtcggctgggcagttctggcgcccaaccgcattgtggctctcggcgtgcgcgcctttgataaagcggagacagccaaagaaggggactcgctcaatttaatcaggcgcaccgcaaggctcatgcgcagacgactgcatcggcgcgcctggcgcctgaaaaaactcgcgcgcgtcctgcacgcctctggcattgcggaatcggtcaacccgcaaaaatcacaaaatgctgccgtgcgttcgccatgggagcttcgcgtcgaagggttggatcgtcaactatcgccgcccgaatgggcgcaagtgatttaccacatcaacaaacaccgtggctttcactgggtcagccgggccgaagaaaaaaaagccgacgatgatcccaaaggcgagggtgggaaagtcaaaaagggactcgccggtacggcgcgactgatgcgggaaaaaagctatcgcacagtggccgaaatggtcatggccgaatatccggatgcacaacgaaacaagcgcggcgattatggtaaggcactttcccgggtattgctggctgacgagttggcgcaattgttcacgcgccagcgtgctctcggaaacccagatgccccagtagaactggaacaagcgattctcggcaacaatgatcgaaaatccggattgctctggatgcaaaaacccgcgctgtcgggtgccgacctcctaaagatgctgggcaaatgcactttcgagaaaaacgaataccgtgcccccaaagcaagttttaccgccgagcgccatgtctggctgacgcgactgaacaatctgcgcatcgttgtcgatggcgttacgcgcccgctcaatgatcaggagcggcaactcgctctgccactgccctatcagcaggcaggtgacctgacctacaaacaactccgtagcgcgttggtaaaagcaggcttggctgaggtgacagggttccagtttgccggcctcccctacccaagcgagaagcaaaaagccgaaggcgatgcaaaagatccggagaaaacggttctagtgaaaataccagcgtggcaagagattcaatcaacgctaaagaaggccggtctggaaaccgagtggcaaggcatcgccggcgcggcgatcacgggcacccctgaagtgctcgatcaaattgcatggattttgagtgtctacaaggaagacgacgaggtcgaagccgaactcagaaaattatcgctaccgggcggcgacaagatggtgcaagccttgctcgcgacgcgcttcgacaagtttcacgcgttatcactcaaagccctgcgaaaaatcgtgcccctgatggaaaacggggcgcgctacgacgaagcctgcgagcgcgcgggttatcaccatagtcaattgcataaagccggcgaagggaaggaaacctatttgccatcgctttactcgggccgggataaatgggggcgcatggtattcagcgacgatctcgacatcctgcgtaatccagtagtgctgcgcggattgaatcaggcgcgtaaggtcgtgaatgcgctggttcgcgaatacggctcgccggcttcggtgcacatcgagatggcacgcgacctctccaagccgctcgacgaacgacgcaagatcgaaaaaagccagatcgaataccgcgaccagaacgacgctgacaagaaacgcttcgaggaacacttcagcgcacgacccaggggcatggagtttgaaaaatggcgtctctaccgtgagcagcaaggtaaatgcgcctactcggttgaacccatcgatatcgatcgcctgctcgaaccaggctacgttgaagtggatcatgctctgccctactcgcgcagctttgatgacagcaaaaacaacaaggtgctggtgctggcaaaagagaaccgtgacaagggtaaccagacaccgtacgaatatcttcacggcgcggcaaacagcgagcgctggcgccgttttgtagcgttcgttgagtcgaccaaagcctatcgcttggcgaaacgcagccgcctcctgcgcaaggactttggtgcaaaggacgcggatgagttcaaagagcgcaatctgaacgatacgcgctacatttgccgtttcttcaaaaactatgtcgagcgctttctcaaactggccgacgacagcagctcacggcgctgcgttgtcttgagcggacaactcacctcgctgctccgcgcacgctggggcctgctcaaggtgcgcgacgaaagcgaccggcatcacgcgctcgatgccgttgtcgtcgccgcctgaagtcatggcatggtcaaacgcatgactgactatgcccgtcgcaaagagcttgcccaggttcgggagggctttgccgatgcggagactggcgaaatcgtcaatcccgccatgttccaacaattacgcgaacactttcccgacccttggccgcactttcgcgatgaggtggaagcgcgcctgcaactgaatgatccgcagattctgcgctcacggctcgatccgttgggcacttaccctgaagaagcactaagcactgtgcggccattgtttgtttcacgcgcgccgcaacgccgcaacagcggcgccgcacacaaggacacaatctacgcgcaaccacggcggctggtggcgcaaggcgcggtcacacaaaagcgcagcctgtccgatctgaccatcaaagaccttgataatctggtcgatccgcaccgcaatgaaaaactctacgcagcgatacgcgcaagacttgaggcccatggcggtaagggagaaaaagccttcacaccagataaccccttgcgcaagccggacaagaacgacaatcccaccggccccatagtccgcacggttacacaggtcatcgacaaattgtcgggaatcccgatacgcggcggcgtggcgaagaatgacaccatgctacgtgtcgatatttttaccaaggcaaataagtttcacttggtgccagtgtatgtacatcacaaagcaaccggcttgccgcaccgtgcgatagtcgcattcaaagacgagaacgaatggacattactagatgacacctttcagtttatcttctcgctgtatccgaacgatcttttacgaatcagtcagaaaggaaaagaaccaatacttggctactacgccagttgccaccgcggcacgggtaacctaaatatttggactcatgatagaaacgcaaatacaggtaaagatggaatgattgagggtattggcgtcaaaacagccctttccattgaaaaattccatgtcgatgtattaggcaacatctatcccgccgcgccggagaaacgccttggtctggcgtagtgtcatgatttcccgcccggccaagctgcggcgggaacattattcacttgccattgagcaggaccaaaccgccctggtgccgtttgaagatattgccgtcatcgttcttaaccaccgcgaaatcacactcacccaccccgtcctctccgcctgtggtgaatacggcatcagcctgttcgccaccggcgaaacccatcatccgagtggaatctttctgcctttcctttcgcactcacgggccacgcgctggctgcgtctgcaattggatatgccccgcccgcttgcaaaacagacctgggccgccatcgtgcggcagaaaattacaaatcaggcccggtgtctggcactgaccggtcgtgatggcatggagcaaatgcagtcgtatgtgcggcgggtccggtccggcgacagcgacggcatggaagcgcaggcggcggcccattacttcccgcgattattcggcgccgattttcagcgcggacatgaggtatggatcaacgccgcactgaattatggctatgcaatactgcgtggcgccatcgcgcgcagtctggtggcgcatggtctgttgccatcaatcggtttgtttcacgccagcgagcagaacgcattcaatctggccgatgacatgatcgaaccgttccgaccgctggtcgacctgcatgtagcccgccacacaatgcctgccactcaagcactgcgtaccgaggacaaaatcgccctcgtcagcctgcttgatgtggacgtgcgcatgccgcgcggcaccatgtctgcgctggccgccattgagcaggcgatcgaaagtctggcacgcatctatgagcacggtgatgcccacccgctggaactgcccgtcatcgaagcactcaaaccacaccagcgcgaaatgtgaacagcattgagccatgagcgccgggacgaaacgacatatgcgccttctcgttttgtttgacctgccggtggtcgcgagtgccgaccgccgcgcttatacggttttccggcgcttcctgctcaatgatggctacgacatgatccagttctcggtctatggtcggatcgtcaatggccacgacgccgagcaaaaacacctgcgccgactggtcgacaacctgcccccggcaggctcggtacgctgcctaagcgtcacagaaaaacaattcgccggaatgaaactactggtcggcctgccgctttttcaggaaaaagccgtcaaggccaatcaaatgttagtggcaccggagttggaacaaatagcaatgttccggttgcacctaacccgccaccgccacaagcaacactaacacctgcacaatacccatacccgtcataatgttgtgaaaaaacgacactaaatgcc

SEQ ID NO: 2938 - DNA, 6624 bp, synthetic construct
  source 1..6624: mol_type = other DNA
  misc_feature 1..6624: note = Synthetic
ggcatggtcggcctcaccttctcgtgcgacggctcgcactacctgccgtgggacgagtttctcgccaaggggcgggaattctgggggagcggggggtcggcaggctaaacccttgccaaccaaacgggtatcgagcacactcggcccataacaagcaaaaccagtgcggagaacacaaaacatgaacactggatttgagcagactcgacgacctctttcgcctggttgacggacaccaggaaaacccacggcgttccgaatcgaatggaatgccgaaccgcttgcgtcccggcgtcttggtcattgcgtcgccgaacagcgctaaagacttccgcgaaataccccgaaaaacagaaaggcccgagcaagctcgggccttgggttcggtttgtcccttgcgggactaccttattgcagcaacggctctcaccccggaaagctacaacgagtcgaagtgtactccagaggagacataacgcaacaccatgatgaataacaacagaaacacctcatacacacttggcttagacatcggcatggcttcggtcggtgcggcacttctggcccaagaccgtatcctggccttgcacgtccgcaccttcgacaaggccgaaaccgccaaggaaggcgatccgctcaacaagacccggcgcgaagcccggctgacccgccgtcgcatccggcggcgcgcgcaccgcctgctgcgcctcgcgcgttgcatgaagcgtacagggctaatcgaacgcgccgaaccccaggcgttcgcacttgatggaatttcgccgtggacgctacgcgccgaagggctcgaccgccgtctcgaacccaccgaatgggccgccgtgctctatcacatcgtcaagcatcgcggctttcagtccacgcgcaaaagcgaggcgaaggatgacgaaaaagccgggcaaatgctcagcggcgtttcggcgaatcaacagcgcatgaaagacggcggctggcgcagcgtcggtgagatggccgcccacgatcccgcattcgccaacgccaagcgcaacaaaggcggcgcgtacacgcacaccttcgcgcgtgccgatctgacggatgaactcaccctgctgttcgcgcaccagcgtgaaaccggcaatccccatacaagcccggaattcgaagcccaggtacgtgaactgctgctcgcccgtcgtcccgcgctggcgggcaacgccctcttgaaactggtcggcaaatgcaccctggagcccggcgaatatcgcgcccccaaggccagctacagcgccgagcgccacgtctggctgaccaagctcaacaatctgcggatttcggaagtcggcgagcaacgcagtctgaccgcgggtgaacggcaaaccctgctcgacgagccgtacaaactcaccaagctgacttacaagcaggctcggcaaaagctgggcttgaacgaatccgcgcgcttcaacagccttgcttatcggggggacaaagacccggaggtcgccacgctgttcgaagccaaggcttaccacatgctgcgaaaagcctatgagaccgctggactcaaggcgttttggcagcgcgatgcgctcgaccccgagaaactggaccggctcacctatgcactaacctgctacaaaaccgacaacgatatccgagccagcctcgttgaacagggtattgagccggaaatcatcgaagccgtgctcgatgtatcgttcgacaagttcgtctcactgtccctaaaggcgctgcgcagaatcctgccattcatggaacaaggccagcgttacgacgaggccgtgcagagcgcgggctacgcgcatcacagtcagttgaatacgggatgcatcaaatccctgtatctgccgccgcccgaccgcgaccagattcgcaaccctgtcgtctaccgtgcgctcaaccaagcgcgcaagctggtcaatgccatcatccgcgaatacggcccacccaccgccgtgcacatcgagttggcgcgcgacctgtccaaacccatcgacgaacgccgccgcatcgagaaggagcagaaggaattccaggccaacaaggaaaagctacgcgccgatttcatcggtcagttcggcttcgagcccaaggggctggatttgcagaagtaccggctctaccgcgagcagatgagccagtgtgcctacagtcagaagcccatcgacgtgacacggctgttcgaggccggctacgtagagatcgaccacgccttgccctactcgcgcagtttcgacgacggccagaacaacaaggtgctggtactcaccgccgagaaccgcaacaagggcaaccgcacaccttacgaatacctcaatggcgcgagcagcagcccgcaatggcaggcattcgaagcctgggtattagcgaacaaagcctaccgccgtgccaagcgtgaccgcctgctgcgcaagcatttcgacgaagacgaggccaatgaatttcgcgagcgcaacctcaatgacacgcgctacatctgtcgcgcattcaagcgcatggtcgaagaccatctgcaatggcatcccgacagcgatgccaagaaccgctgtgtcgtcatcgccggccaattgaccagcctgctgcgcgctcgttggggcctgctcaaggtgcgcgagaacggcgatctgcaccatgcgctcgacgccgccgtcatcgccgccgccagccgtgcgctggtcaagcgcatggccgaccacgcccgacgcgacgaactggcacaggtgcgtgagtgctacatcgacccggaaaccggcgaagtgctcgatctcgccgcgctgcgcgatctggaagagcgcttccccacaccgtggccgcatttccgcaccgaactcctcgcatggctttcaccggacccggcaaccgcactgatcggtgtgcccggctacgacgaagcacgccgcgctaacatccatccaatacgtgtctcgcgggcgccaaccaggcgcgggctgggcgcggcacatcaggaaaccatccgttccatgggccgcaagggccgcctgttgcgcgatgggcaatcggcggtgaaaaccccgttgacgagtctgaagctgaaggatgtggacaacatcgtcggtgcggaggacccacgcaatgcggcatggatcgccgcgctacgtgaacggctagagcagtttggcggcgacggcgcaaaggctttcgcgcccaaccagccactactcctgaaacccagcgcgccgggcaaggccgcaccggccatccgaacggtgaaactactcaccacgcagaaaagcggcatcccggtccggcagggcatcgccaacaatggcgcaatgctgcgggtggatgtgttcaccaagggcgggaagttctacacggtgccggtgtatgtggcagatgcggcacggacgatgctgccgaatcgggctgtggtggcttacaaatccgaagaagaatggccggaaatggacgagagctatgcttttctgttcagcctgcatcccaatgattgggttcggctgacatataagaatgggccaatcagagagggctattactccggattgaatcgagcgacaggtgcagtcgacatatgggtacatgaccgaaatcctggcgcagccaaaaacggactatttgaaggatgcgggattaaaacagcactcaccgtcgaaaaattccacgttgacctcctcggtaatctccaccgcgtccacacggaaacccgccagccgctgcgacaagccagaaagccgaaggccgattgacatgggctggcgcagcgtcgtcatcgccaatcctgccgcgctggatttccaccagcgtgccctgcgcatccgtcaaggcgataacactgcacatgtcccgctggaagacatcagcatgctgctgctcgaacatcgggagatttcactcacagtcacactgttgtcggcttgcgccgatgcgcagattgccgtcctcaccgtcggcaaggatcaccatccgaacggtgtcctgctgccctacctgccgcactcgcgcgcgctcaaggtcatgcgcgcccaactcgataccagcgaacccgcgcgcaagcggctgtggcaggccattgtccaacgcaaaatccgcaaccaagcggcggcactcggctgcatcgaaggcgcggacgccgaacaacgactgctcctgcgcatggctgacgacgttcgttcaggcgatacagggcatcacgaaggccaggccgcgcaacgctatttccgcgctctgtggggagacgactttacccgcaaccagccgcgtttctacaatgccgcgctcaactacggctatgcagtcgtccgcgccgcccttgcacgcagccttgtcgcctacggattcctgcctgccttcggtatccaccatcgcagcgagcaaaacaccttcaatctcgccgacgacctgatcgaaccctatcgtcccctggttgacgcgcatgtcctgaaaagctggccgcttgagcccgagcgtgaactgagccccaaggacaagcaacggctcgtcgccctgcttcatcgagacgtgcagaccacggcatcacgccagtccctgctcgcctcggtggacgcctgtgcggcgagtctcggccagtggctggaattcgccagtccggccgtgctcgtcatgcctgtcatacacacggcagaggatggggatggctaacgccacccgccgctacatgcgcctgatcgtattcttcgacctgcccaccgttaccaaggccgaaaagcgcgcctatacactcttccgccgcttcctgctgcaagacggctacgacatgatccagtggtcggtgtacgcgcgcatggtcaacggtttcgacgacgccggcaaacacctcaagcgcctgtccaccaacctgccgaaacaaggttcggtccgctgcttgcaagtcagcgagaagcaatttgccgcgatgaaactgctcgttggccagatgagcttccaggaaaaaaccgtcaacgcccagcagattctgctcttctaagcgccagaaaaaaagaaaccaacccgcatgaatcctgaattcatgcgggttggcggggagggaattgtagctttccggggtgagagagggagctacaaccgtatttccgcgtgctgggacaggaagcgcattgtagctttccggggtgagagagggagctacaacccgcggcatatacctcggcacgcggctcgcattgtagctttccggggtgagagagggagctacaacgcatttcgtgatcgttgaccacttctggcaattgtagctttccggggtgagagagggagctacaactcatgacatgaccgagtttctgcgcatcgaattgtagctttccggggtgagagagggagctacaactgcgccgcaccggagcggcagacgctcccgattgtagctttccggggtgagagagggagctacaacctcgaccgtgtagccctgccgcagccggtcattgtagctttccggggtgagagagggagctacaaccggcgatctcatctttgagcagatcgagctattgtagctttccggggtgagagagggagctacaacccttcgacggccttcatgatctgggacaggattgtagctttccggggtgagagagggagctacaacacatttcgttctgccagtcggccggcagcaattgtagctttccggggtgagagagggagctacaacattacgtgagcggtcacatcccaggccatcattgtagctttccggggtgagagagggagctacaactctgcaatgacgccgggtgcccgacgtgcaattgtagctttccggggtgagagagggagctacaacccccccggacgccgccctcgcccgtggccaattgtagctttccggggtgagagagggagctacaacccgtgtctggcgtctatccggcatggcaggattgtagctttccggggtgagagagggagctacaacacaacacgcgcagcgcgatgctgatcgtttattgtagctttccggggtgagagagggagctacaacgcgcgcaggccagctcggccgctgtgcagtattgtagctttccggggtgagagagggagctacaaccttttctccttcgtttctaagttttttcagattgtagctttccggggtgagagagggagctacaacagtgcatccgcaactgggtgatgcgcgacgattgtagctttccggggtgagagagggagctacaacgcggcgcgaggctgcggcatgggcggcgcgattgtagctttccggggtgagagagggagctacaactcgttcgggtatagaaaactccgccactggattgtagctttccggggtgagagagggagctacaacgtccagcacgcgcggcacgacgtggacgcgattgtagctttccggggtgagagagggagctacaacaaggcggcggagcctaaatacgaagtgtttattgtagctttccggggtgagagagggagctacaacgacgtttcacgttttttagaaatgcgcgggattgtagctttccggggtgagagagggagctacaaccagccacgggcaggcccgtggccatgcgcaattgtagctttccggggtgagagagggagctacaacgcgagccgccgagttgagtacgctcctcagattgtagc

SEQ ID NO: 2939 - DNA, 6557 bp, synthetic construct
  misc_feature 1..6557: note = Synthetic
  source 1..6557: mol_type = other DNA
gggcgggcagatgatcctcaccacctatggccgcagctcgggcttctgcatcgacccgatcgagaagaagccgctcaaccacttctatccgggatcgagcgtcctctccttcggcaccgccggctgcaacctggcctgcaagttctgccagaactgggacatctccaagtcgcgcgagatggacaccctgatggacgcagccagcccgcaagccatcgcgcaggcggcgcaacgccacggcgcgcaaagcgtcgccttcacctacaacgacccggcgatcttcgccgaatacgcgctggacaccgcggatgcctgccacgcactgggcatccggacggtcgccgtcaccgccggctacatgcatctcgagccggcgcgcgcgttctacgccaagatggacgcggccaacatcgacctcaaggccttcagcgacgacttctacttcaagctctgcgccggccacctccagccggttctcgacgtcatcgccatggtgcatcacgagaccgactgctggatggaactgaccaccctactgatccccggccacaacgactccgacgccgagctcaagcagctcgccgcctggtgctgcaaggaactcggcccggacgtgccactgcacttctccgcctatcaccccgactacaagctcgacgcccccgccacgccccccgccacgctgacgcgcgcgcgccggatcgccctggaggccggtctgcgctacgtctacacgggcaatgtgcatgacaggagcggcgacgccacctactgccccggctgcggcatgaaggtcatcgagcgcgactggtatgaaatcctcggctatgccctcgacgacagcggccgctgcaagcagtgcggcacggccatcgccggccgcttcggccatttcgccaaacccttcggcgcacggcgcattcctgtcgcgctgcatgccgcgtaggcgcggggcgcagcgaccgcgcacaacgccggaacggccccggccggaatcaccaaggcataaaatgcgaaggcccgacgggttcgccgtcgggccggatacaggttattcaccttcaacctttattgtagcaacggctctcaccccggatagccacaacgagacggatcataagggaggacggcatggacggcaagacccccgaagccttgaccttcggtttcgacatcggcatcgcctcggtcggctggtgcgtgctcggcgagaaccgcatcgtcgatctcggcgtgcgctgcttcgacaaggcggaaaccgccaaggaaggcgatccgctcaacctcgcgcgccgcaccgcacgcctgatgcgccgccgtctgcgccgccgcgcctggcggctcgtcaagttggcgcgtctgctcaaacgttccgggctgattggcgacccgcgccaaccatcgagcacctcgccctggaaactgcgcgtcgaaggcctcgaccgccgcctttccgacgacgaatgggcgcgcgtcatctaccatctgtgcaagcatcgcggcttccactggatcagccgcgccgaggaaaagaaggccgagggcgacaagaaggaaggcggcaaagtcaaacaaggcttgtccgacaccctgcgccgcatgaccgagaagggctaccgcagcgccgccgagatggtcctgaccgaatttcccgacgcccagaggaacaaagccggcgactacggcaaggcgctttcgcgcatcctgctggccgacgaactggcactgctgttccgccgtcagcgcgaactcggcaacccgcatgccgacgacaatctggaagcgaagattctcggcaacggcgaccggaaaagcgggttgttctgggaacagaagccgccgctggccggcgtcgacctgctcaagatgctcggcaaatgcaccttcgagcgcgacgaataccgcgccccgaaagccagcttcacagccgagcgccatgtctggcttacgcgcctcaacaatctgcgcatcgtcgtcgacggcgtcacgcgcccgttgaacgaaaacgaacggcggatcgccctgcccttgccctatggctacgcgaatgccaagctcgactacaagcaattgcgcactgcattgaccaaggccgggttgagcaacttcagcttcgccggcatcaccgaggacaaggaaaaggacgcgctcatcaagctccccgcatgggaaaccatgagcaaggcactcaaggcgaagggcctcgaaaccgaatgggaagggatggccggcgccgcgaccggcggcgacccgacgctgctcgacgaaatcgcccgcgtgttgtccgttttcaaggatggcgccgaagtcgaggccgaactgcgcaagctgaacctgcccggcggcaagaagatgatcgacgccctgtcggaaatcggcttcgacaaattccacgcgctctcgctcaaggccttgcgcaagatcgtgccgcacatggaagcgggcctgcgctacgacgaagcctgccaggccgccggctatcaccacagccagttgcacgcagccggcgcgggtgagcacaagtatctgccgccgttctacgcccggcgcgacaaggacggccgcatggtgttcgacgaagacatggacgtgccgcgaaaccccgtcgtcctgcgcgcgctcaaccaggcgcgcaaggtcttgaacgctctcgtgcgtacccatgggtcgccagcagccgtgcacatcgaaatggcccgcgacctgtcccgcccgctcgacgaacgcaacaaggtcaaaaaggcgcagaacgaataccgcgagcgcaatgaaaaggacaaagccgccttcgccgccgaatacggcatcgccgcgaagagccgtgagttcgagaagttccagctctaccgcgagcagcagggcaagtgcgcctactcgctcaaacccctcgacctgcaccgcgtgctgcacgacatcggttacgccgaggtcgaccacgccctgccctattcgcgcagctacgacgacggcaagaacaacaaggtgctggtgctggcggaagaaaatcgcaacaagggcaaccgcacgccctacgaatatctcaccgccctcggcggcgaaaccggcgaacgctggcgcaattacgtcgccttcgtcgaatcgaacaagagcttccgcctcgccaagcgccagcgcctgctgcgcaaggatttttcgggcaaggccgccgacgagttccgcgagcgcaacctcaacgacacgcgctacatctgcaagttcttcaagaactacgtcgagcgtcacctaaagctggccccgaaagtcggcgctggcgggacggcagatgcgacgacgaacaagcgctgcgtggtgctcaacggccagaccaccgccttcctgcgcgcccgctgggggctgctcaaggtgcgcggcgacagcgaccgccaccacgcactcgacgccgccgtggttgcggcatgcagccacggcatggtcaaacggctggcggactacgcgcgcaccaaggaactggcgaaagcgcgcgacggcttccccgatccggaaaccggcgagatcgtcgatccggcgatgttccagcaactgcacgcacatttccccgatccctggccgcatttccgccaggaactcgaagcgcggctcaatctggacaatgccgacgaattgcgcgcccaactggaaatgttcggcacctatccgccggaagcgataaccgccgcaaaaccgctgttcgtctcgcgcgcgccgcagcgacgcaacggtggcgcggcgcacaaggacaccatctacgcccagccggcacggctcaaggcgcagggtggcgtcacgcagaaggtggcgctctcaagcctgaaactcgccgatctcgacaaactgatcgacccgcaccgcaacgaaaaactctacgccgccatccgcgcgcgactggaagcgcacggcggcaagggcgacaaggctttcctgcccgacaacccgctgcgcaagcccgaccgcgacggcaacccgaccggccccatcgtgcgcaccgtgacgatggtcatcgacaagctgtcgggcatccccgtgcgcggcggtatcgccaagaacgacaccatgctgcgcgtcgatgtcttccgccacaagaaggacagcaagttccatctggtgccggtgtatgtgcatcacgcggtgacgaaggaactgccgaaccgggcgattgtggcgttcaaggatgaagaggaatggacgcaggtagatgacaatttcgacttctgctactcagttcatccaaacgacttgctacggatcacgctcaagaaggaaaagcacgtcggttactttgcgagctgcaaccgatctacgggtgcgttcaacctctggtcgcatgaccgcaaccggcaatctggcaaagacggcatgatcgaaagcatcggcgttaaaaccgccgttgctctggaaaaattccacgtcgacgtcctcggcaacatctaccccgcgccgccggagcagcgccgtggtctggcgtagcgtgatgatctcccgccccgcccggttgcggcgggagcatttttccctcgccatcgaccaggaggaaacggccttcgtccccttcgaggacatcgccgtcatcgtcctcaaccatcgcgagatcacgctcacccatccggtgctctcggcctgcgccgaatacggcatcggcctttacgccaccggcagcaaccaccagccggccggcgtgttcctgcccttcctgccgcattcgcgcaccacgcgcatgatgcggctgcagttgaacatcgcccgaccgacggccaagcaggcctgggcgagcatcgtgcgccgcaagatcgagaaccaggccgcctgcctgaaactctgcggcgcgaagggcgtcgaccgtctcgaatcgtatgcgcgccgcgtgcgctcgggcgacccggacaatctggaagcgcaggccgccgccttctacttcgcgcagctttacggcgcggacttcacgcgcgccgacgcgcgctggacgaacgccgcgctcgattacggttatgccgtgctgcgcggcgccatcgcgcgcggtctggtcgcgcacgggctgcatccgaccgtcggcctgttccacgacagcgaacagaacgccttcaacttggccgacgacctgatcgagccttttcgccccctcgtcgacctgcacgtcacgaaacatgcggcgctgaccgagggcgagctgattccggccgacaagcaggcgctggtggcgctgctcaatgtggatgtcggcatgccgcaaggaaaaatgtcggtgctctcggccatcgaatacgccgtcgaaagcctggtgcgagtttacgaggaagacgcgaaagaactagatttgcccgtcctcgtcggcttgcaggcgcatcggttggaatactgatgggcgtcgagacgaggcgatacatgcgcttgctcgtcttcttcgacctgccgatggtcaccaaggccgaaaagcgcgcctacgtgcaatttcgcaagttcctgctcaacgacggctacgacatgatccagtggtcggtctatggccgcatcctcaacggcatcgacgccgagaaaaaacatctcgcgcggctggccgagaacctgccgcccgaaggttcggtgcgcagcatgaccgtgacggagaagcaatacgccggcatgcgcctgctggtcggcatgccgctgtttcaggaaaaaaaggtcgcggcggcgcagatgttgttgttctgaggcgggcagcgctgcgtcagatcgcatccagatcgtcgtaatagaccagcgccggcagatggcgcttttgatgaacgatgcgcaacacgaccggcgcgcccttcgctgcgtccagccgctggtagaaaatcacatgcttctcgcaattcaaggagcgcatgcccggcacgaacaaactgcggtcgcggccggcatccgggttcttcgcgatgttctcgaagccccgcacgagcttgcggtagtaggccagccattgcgcccgcccccaggtttcgaccgtgtagcggcgaatgtcttcaaggtccgcgcgcgccaggcgcgagagcaggatgcgcacgtcagccttgcttcggccaggcatccggttcgaaagcgtgcggatcgaatgcctcgaacgcaccgccctcgacctccgcgcgggccgcttccagcccggccttgagcgcatagaactgtcgtgcgccgtccttttccatcagaaggcgaatgccggcacgcacgacttcgctgagattggcgtaggcgcccgatgcaatttgcccctgcacatactcttgcatcggggtggtcaagtgaatgttgggcatgatggcctcctttccttcatgtcggattatggcagatgctgacagatggaagaccgaaagaattttcggaaaaaatgcttactaccgcctaatccgacaaccccgagcgagaacggaaaatggaaacccacgtcaagccaaggcctgacggggatgcctacgaggtcaattgtagctatccggggtgagagagggagctacaacgccggtattgctggcccttcgcgccctgtcattgtagctatccggggtgagagagggagctacaaccacgatggccgcgta

SEQ ID NO: 2940 - DNA, 6181 bp, synthetic construct
  source 1..6181: mol_type = other DNA
  misc_feature 1..6181: note = Synthetic
gacaccacccttcatagttcggaaatccgcatcagtcatggctttcagagattcgggccttcatttaaccggacagcgtgtgtgcggaaatagaaagacccgaggcaagcctcgggtcttggattcggttcatccccgaagggataaccttattgcagcaacggctctcaccccggaaagctacaactaattgaagtctacaccaaaggagacgcgacacgccatggctttgaatacctttctgccctacacccttggcctcgacattggcatggcctcagtcggcgcagccttgctcaccgagcagcgcattcttggcctccacgtgcgcaccttcgacaaggccgaaaccgccaaggaaggcgacccgcttaacaaaacacggcgtgaagcacggctgacacgccgccgcattcgccggcgcgcacacagattgttgcgactggtgcggctcttcaaacgaattgggctcatcgccgaggctcgcccggaggccttcgccttacccggcgtaagcccttgggatttacgtgcggaaggacttgatcgactactcgcccctaccgaatgggctgcaacgctctatcacatcgtcaaacatcgcggctttcagtccacacgcaaaagcgaggcaaaggacgacgaaaaagccggacagatgctgtccggcgtcgcgagcaaccaaaaacgttgtcaggaaaaaggctggcgtacagtgggcgaaatggccgcgcgcgacgaggagtttgccgcagccaagcgcaacaagggcggcgcatacacccacaccttcgcgcgggctgatctggtggccgaactcaagctgcttttcaaacagcaagcaagctttggaaatccatacgtcaacgccgaattcgaaaatgggattgaacaactgctgctggcccggcgtccagcgctgtcgggcgattccctcttaaagctggtcggcaaatgcccattcgagacgagcgaataccgcgcccctaaagccagctacagcgccgagcgtttcgtctggctgaccaagctcaacaacctgcgcatttcagaagtcggcgagcaacgggtgctttctgcgggtgagcggcagaccctgctcggcctcccatacacactcgccaagctcacctacagacaggtgcggcaaaaactcggactggccgaaaccaccaaattcaacacgctgacataccggagcgacaaagacccggaaggtgcgacatttttcgaggccaaggcctatcatgccctcaaaaaagcatacaaggaagccggtctggaaagcctctggcagcgcgatgcgatcgatcccaagcggctcgatcgtttggcctgggcgctgacctgctacaagaccgacgacgacattcgcacccatctcatcgaacacaatgtagaacccgatatcgccgagactgtgctgggcgagtccttcgacaaattcgtcgggctctccttgaaagcgctcggcaaaatcctgcccttcatggaacagggccaacgctacgacgaagccgtgcaaagcgcaggctacgcgcatcacagccagttgcatcaggacagtaccagagcccgctatttgccgccgcccgacaaagatcaaatccgcaatcccgttgtctaccgtgcgctcaatcaggcccgcaagctggtcaacgccatcgtccgcgaatacggaccgcctgcagccatccatattgagctggcgcgggatttgtccaaacccatggacgaacgccgcaagatcgaacgcgaacaaaaggaatttcaggaacgcaaagccaaagaccgcgaagccttcattgaccagttcggtttcgaacccaagggactggacttacagaagtaccgcctctaccgcgagcagatgagccagtgcgcctacagccagaaagcaatcgacgtggcgcgcctgttcgagtcaggctacgctgaaatcgaccacgcccttccctattcgcgcagcttcgacgacggccagaacaacaaggtgctggtgctgatcgccgagaaccgcaacaagggcaaccgcacgccttatgaatatctggacggcgaaagcaacagcccgcagtggcagcaattcgaggcttgggtgctgtcgaacaagggctatcgccgcgccaagcgtgaccggctgctgcgtaagcattttggtggtgaagaggccgaaggcttccgcgagcgcaacctcaacgacacacgctacatctgccgcgccttcaagcagatggtcgaaaccaacctgcaatggcacccaaacagtgatgaaaaaaaccgctgcgtggtggtggctggtcaactcaccagtctgcttcgtgcacgctggggacttatcaagatgcgcgaaaacggcgatctgcaccacgcgctcgacgccgccgtgatagccactgccaaccgcagcctagtcaagcgcatggcggactactcaaaacgcaaagaactagcacaagtgcgtgaccactacatcgaccccgcaactggcgaagtccttgacgatacggcactgcggcaaattgaggaacacttcccaaccccatggccgcatttttatcgcgagttaaacgcttggctttcacccaatccagaacatgggctaaatggcttggagcactacccacccagagaactggaatgcctacgcccggtacgtgtatcgcgtgcgccgacgcgccggggtctgggtgcagcacatcaggaaaccattcgctccgtggggcgcgaagggcggttgctggcggacgggcaatcggcggtcaaaacgccgcttacttcgctcaagttgaaagacttagaaaacatcgttggttacagccattcgcataaccacgccatggtcgaagcgatcagaaagcgcctggaagcaaacggaaacgacggcgccaaggcattcaaagcgccgttattcaaacccagcgcagccaacggttacgacgccgacaaaagccatgtcgacgaaaccgatcagcgcgccccacaaatccgcagtgtcaaattgctagccacacaaaaaagtggcatccccatccgcaaaggcatcgctaacaacggcagcatgttgcgggtggatgtgttcggaaagggcggcaagttctacgcagtaccgatttacgttgctgacgctgcgcgggcggaattaccgaatcgtgcggtagttcagagcaaacctgaaaacgagtggccggagatggacgagacgtacactttcctgttcagcctctatccgaatgactgggtatgcttgcgttacaaaaatgcacctaaccgggaaggctatttttcaggcttgaatcgggcgacaggcgcaatcgacatctgggtgcatgaccgcaacccatcaatggtaaaaaatggcctctttgagggcaacggtatgaaaaccgccctcgccgtcgagaaataccacgttgatctgctcggcaatctccatcgcgtccatgccgaggcgcgtcaaccaatccatcgcaaagggcgctgaacatgggctggcgcagcgtggtcattggcaacccggcgcaactcgattttcaccagcgcgcgctgcgagtgcagcaggagggcaacactgcccacgtgccgctggaggacatcagcattctgctgatcgaacacgctcaggtcacgctgacctcggcgctgttgtccgcgctggcggacgcgcagatcgccgtactgactgtcggcgccgaccatcaccccaacggcgtgctgctgccctacctcccgcacagccgcgcactcaaagtcatgcgcgcccaactcgacacgagcctgcccacgcaaaagcggctgtggcaagccattgtccaacagaaaatccgcaaccaatccgcagtgctggcgcggcatatcgatgccgaccgcgaccgccgggcgttgttggcgattgccgacgacgtccgctccggcgaccctgacaacctcgaaggccaggctgcgcagcgctattttcgcgccctgtggggcgacgattacacacgcaatcagccccgctttgtgaatgccgcgctgaactatggctacgccgtcgtccgtgcggcgattgcccggagtctcgtcgcttacgggttcctgcccgccttcggcatccaccatcgcagcgaacagaacgccttcaacctggccgacgatttgattgaaccctaccgcccgctggtcgatacccacgtgttgaagagttggccgcttgaaccccaacgtgagctctcgcccaaggataaacagcaactggtcggcctgctgcaccgcgacatcaccacgaccgtgacgaagcagactctgctcgccgccgtcgaggcgacagttgtcagtctcagccagtggctggaatacgccagccccgccgtctttgtcatgcctgtgttgaccaaccagccaacttgccgggaggacgcggatggctaaagccacccgccgctacatgcgtctgatcgtcttcttcgacttgcccaccgtcaccaaggcggaaaagcgcgcctacaccgtgtttcgccgcttcctgctgcaagacggctacgacatgattcagtggtcggtctacgggcgcatggtcaacggctttgacgatgccgaaaaacacctcaaacgcctgtccgccaacctgcccaaggaaggctcggtgcgctgcctgcaagtcagcgaaaagcagttcgccagcatgaaactcctcgtcggccagcgcagcttccaagaaaaaaccgtcaacgcccagcagattttgctgttttgagaggtgaaaaaagaaagctgctatcccgcatgaagccaagcgtcatgcgggatagcagcgaggtgattgtagctttccggggtgagagagggagctacaacccagagcacgcgcaacttcgaccgcttcggattgtagctttccggggtgagagagggagctacaacttaaatggacagacggttggctcgagccaaattgtagctttccggggtgagagagggagctacaactgcgcgcggatcatcaccgccatgctgtggattgtagctttccggggtgagagagggagctacaacaataccgtcgtatgctacgacatcacgaatattgtagctttccggggtgagagagggagctacaacaatgcagtggtgctggtatttttcagccagattgtagctttccggggtgagagagggagctacaaccactcataccacgcagactgcggcggacgcattgtagctttccggggtgagagagggagctacaactgctgggcacgacccagctcaacgacaaggattgtagctttccggggtgagagagggagctacaacatgcccgcgtctacgccttcgccaccacctattgtagctttccggggtgagagagggagctacaacctgccacgcgagatgccgcgatcattgagtattgtagctttccggggtgagagagggagctacaactccgtcagcgcgggcatggcttcatcgagaattgtagctttccggggtgagagagggagctacaactctgagaccactgatgacgcgtccgatgccattgtagctttccggggtgagagagggagctacaacagatttgcgggggctgaagccccgcaaatctgttgagccgccttcggcggtctgtctataagaaatggggggctggccataggcaaacgcgtatgatctcattgaccagcgccttttcagacgttgacagtcattgcccgcagtctagccatgaattcgtcagacggaatccatgctgttcgtccagcatccatatccgccacgcgccgggcaatttcctcatcccaggcttggacaatagcctcaggcgtatcttgcggtgtgccttccaggctcaggatcaggctacggaccaattcaccgcgctctcgcggggaaagccgcaaggcttggtcttcaagctcgttcaataatgctgccatagcgttactccagaaattatttcttgttggaatggtcgcactcgcatcatcccccgcgcagatccggttcggagttccatcagcacaagtgtagaagaagatcaactcaatattgaaacaatacccctgtccgcaatagcttgaatcgcatgccctccgcggcggataatgtggcattgcgccggatcagcccattttggaaacctacatcctcatcctcatttccacggtgttcgtgaacaacatcgtgatggcca

SEQ ID NO: 2941 - DNA, 6091 bp, synthetic construct
  source 1..6091: mol_type = other DNA
  misc_feature 1..6091: note = Synthetic
cggtagcgctggaagactggcacaccatgatcgataccaacatcacgggcctggtcaacgtcacgcacgccctgctgcccgccctcctcgccaccgggcgcggagccagcatcatcaacatcggctcggtagccggacaatggccctaccccggcggccacgtctatggcgcgagtaaagctttcgtcaaacagttcagccacaacctgcgttgcgacttgctcggcaccggcgtgcgcgtcaccgacatcgcccctggcatggctgagaccgaattcatgctcgtacgcacaaaaggcgaccaggccgcctcagaccgcctgtactgcggagctgaaccgctgacggcagaagacatcgccgaacagattttctacgtcgccaaccagcccggccacatcaacatcaaccggctggaaatcatgcccacgcgacaagcgtggtccgcgtttgcggtggaacgggagtaagtggatgtcataaaaactcatgagcgtggcaatatttgcgacaaacacgccatttaatgcgacaatgatgcatcaaacccttcctgcgagacacccccatgtccgagcgcatcaatgcccgcctgtcccagcccctagccgaatttgtgaaccgcatggtaggcgagacggggctttacgaaaccccaagtgaatatgtacgcgatttgattcgccgcgacatggaacggcgcgaggcaggactggtgcaagaagccattcttgccggctaccgtgacctggctactggtcgtgtgtttgaatcggagggcaatttcaaggccgatatggcgacgctggctcgcaaagaaaccaatggttggtaatcctgatgatcccttcgaggcagcacttcatcatctacagcatctcccaaaaggtatcgccttgttgacgattcagcatcaggcgcgtgacatcgaatccctgatcgtcaagctgaccctggcatttcatgccaagattgagcggttgaaacggaaaatctgatccgggcagcagaggtgaatgtggaaaagggcatagacacacgaccataacaacataataatccgatgcaaaatgaaacagcccgacaggtttccctgccgggctgctggatacagattgcgttaaaaacgcatctttattgtagcaacggctctcaccccggctagccacaacacagaaattatgaaggagggagacatggttgacaagcccagtgaaccacttatttttggttttgacatcggtattgcctcggtcggctggtgcgtactcggtgaaaaacgcattgttgatcttggggtgcgttgctttgacaaagcagaaaccgccaaggaaggcaaatcgctcaatctcgcccgccgtaccgcccgcctcatgcggcggcgtctgcgtcgacgcgcgtggcggttgaccaaactggcacgcttgctgaaacacgagcggctgatcaacagcatccaagtcttacgccaacctgccacaaaatcgctgtggcagcttcgtattgatgggttggatcggaaactctctgcagaagaatgggcgcgtgttctcttccacctctgcaagcatcgcggcttctactgggtcagccgtgcagaagagaaaaaagccgaagaagacggagaaggaggcaaggtcaagaaagggttgcaggacaccaaacggcgcatgagtgagaaaaaataccgaagtgcggctgaaatggtattgaaggaatttcccgatgcgcagcgcaacaagcggggtgaatacaacaaggcactctcccgcatactgctcgccgaagagcttgccttactattcgagaagcaacgtgaatacggcaacctctatgcaacgcccgaactcgaaacgcacattgctggcagtggcgaccgcaaaagcggtctgttttgggaacaaaaaccgcctctgtccgggaaagatttgctaaaaatgttgggacgctgcactttcgagaaaaacgaatatcgcgctcccaaagccagttttactgcggaacgccatgtctggctgacgcgcctcaacaatttgcgcattgtcgttgatggaaatcctcgtcccctcaacgaagccgaacgccgtgttgccctgcccctaccctatcaacaggccagtgatcttacctacaagcaattgaaaaacgctctgactaaggccggtttgttgcccgaaaatattaaattttccgcgctggcttatccaacacagcaaaccgaggataaacccaaagacccggaatccgaacggttggttaaacttccggcctggcaggaattacgcaaaactctcaaggaaaatgggcttgaaaccgaatggcaaagcatcgccggagccgcagtcggaggaaaccctgaactgctcgaccaaatcgcctggacgctcagcgtattcaaggatggcaatgaaatcgaacaggaattacgcaaacttcccctgccgggcggagaaaaaataatcgaagcactcagcgaaatcagcttcgacaagtttcacaacctgtctctcaaagcgctccgcaaaatcgttccccacatggagaccgggttgcgctatgacgaggcatgcgaaaaagccggttatcaccacagccagctattcaaaggtggagaaggtcagcacaaatatctgccgcctttttactctggtcgggacaaagatggccgtatggtattcgacggcaaggaagacatcccacgcaacccggtggtgctccgttcactcaatcaggcacgcaaagtgctgaatgcgctggtgagtcgttacggctcgccctccgccgtacatattgaaatggcgcgggatttgtcgcggccaatggatgagcgcaataaaatcaaaaaagctcaggaagagtttcgcgacaagaacgaaaaagccaaagccgatttcgaggccgaatactctatgcccgccaaaagccgggagttcgagaaattcatgctctaccgcgaacaacacggcaaatgcgcctactcactgaagccgcttgaccttgacagggtattacgcgagtcggattcgaaatatgctgaagtcgatcatatccttccctaccgtaggagttacgacaacagtaaaaataacaaggtactagttcttataaaagaaaatcaggacaaaggcaatcgcacgccttatgagtacctgacttcgtttacagggggtgaaaacggagaacgctggcggaatttcgtcgcttacgttgaaggtaacaagtcttaccggcttgccaagaaaaaccatttgttgcgaaaaaattttggcgaggatgaagcaaaggattttcgggctcgtaacctgaatgacacacgttatatctgccgtttcttcaagaattacgtcgaacagcatctgaaactatccaacggccacagacgatgtgtggtaatcagcggtggactaacttcattgctgcgtgcccgatggggattacctaccagtacgaaaaagcgagaagagagcgacagacatcacgcaatggatgccgcagtcatcgccgcctgtggtcattttgtcgttcaacgtacttcagaaatgcttaacacggacggatggtcacataaacctgatttaggggaatatgtgaatgctgaaactggagaatttctgaccactcaagaatttgtacgcaaagatgaaatctacaagctaatgcctcgcccatggaaatacttccgtgaagaacttctccttcgcctgaatacagacgatcccaccttgctcataagcgaagcgcaacgctatgggtatccgccggaagctttggaaaacctgcgccccctgttcgtctcccgcgcaccgcaacggcgcaatagtggtgccgcacacaaggagactatctattcccagccagaatgcttgaagaacacaggaagcgttacccagaaaatgcctttgacagatttggcactcaaggacatggataacctgattgatccacaccgtaacgaaaaactttatgcagcaatacgtaaccgtctggaagcgaatggcggaaaaggcgataaagccttcccaccagacaacccgctgcgcaaacccgaccgtgacggcaatccgaccggcccaatcgtccgcaccgttacgatggtgatcgacaagctctccggcatcccggttcgcggtggcattgccaaaaacgataccatgttgcgtgcggatgtgttcagacataaaaaagacaggaaatatcatcttgttcctgtgtatgtgcatcatgcggtaacaaaggaattgccgacccgagcaattgtgcaatccaaagatgaagacggctggacactcatcgatgaagtaaacttcgatttttgtttttccctttaccccaacgatctggttaaggtcaccttgaaaaaagaagttcgttttgggtattactccggttgtaatcgttctacaggcgcaatcgatctctgggttcacgatagaaaccaagcgatcggaaaagacggattgattcagagtatcggtgtcaaaatggccttgtacgtggaaaaattccacgtcgataccttgggcaacatctaccctgccccgccggaggagcgtcgtggcttggcgtagcgtaatgatttcccgcccggcgcgtctgcggcgggagcattactcgctggctatcgaccaggaagaaactgcctttgtaccttttgaggacatcgccgtgattgttctcaatcaccgggaaatcacattgactcattcggttctttcagcctgtgccgaatacggcatcggcctttatgccactggcagcaatcaccagcctgccggtgtttttcttccgtttctttcccactcgcgcactacgcgcatgatgcgcaagcagttgaacattgcacgaccagcggccaagcgcgtctgggctgacatcgtccgccgcaagatcgaaaatcaggctacctgcctgcgtctgtgcagcaaaaaaggcgtggagaggctagaagcctgtgcgcggcgcgtccgttccggcgacccggacaatatggagggacaggccgccgcgatctatttcgcgcagttgtacggtacaggttttcatcgcgatgacgaaacgcgctggacgaacgctgcgctcaactatggctatgctgttttgcgaggcgccatcgcacgcggtttggtggcacatggcctgcatccctctgtcggtttgtttcatgacagtgagcagaatgcatttaatctggccgacgatttgatcgagcctttccgctcactggttgacctgcatgtcgccaaacgccctgccctgacggaaggcgatctgatgccggaggacaaacaagcattgattgccctgctgaatgtggatgttggtatgtcgcagggaaaaatgtcggtgctgtctgccattgagtacgctgtcgagagtctggtgcgcacctatgagtccggtcacgctgaacttgacctcccccgtctgatcggcctgcaagcgcacaagctggaatattgacgtgggtacggagacgaggcgctatatgcggttgatcgtcttttttgacctgcccatggtgaccaaagcagaaaagcgtacctacgtgcagtttcgccgctttctgttgaacgatggttacgacatgatacaatggtcagtctacgggcgcatcctgaacggtaaggatgccgaaaccaagcatctcgcccgtttggcgggcaacctcccccccgcaggttccgtgcgctgcatgaccgtcacggaaaaacaatacgcaggcatcaggttgctggtcggcatgcccctttttcaggaaaaaaaggtatcagcatcccagatgctgctcttttgagctgcaaaattccataaaaaatccccaccaagctaggcttggtggggacttggagcgagtagattgtagctaaccggggtgagagagggagctacaacaaggcggtagagcgggcgcacgtccggccaattgtagctaaccggggtgagagagggagctacaacgcctttggagccatgagggcgttctcctggattgtagctaaccggggtgagagagggagctacaacctggccagcaaggtatcctacagcggaacaattgtagctaaccggggtgagagagggagctacaacc

SEQ ID NO: 2942 - DNA, 6053 bp, synthetic construct
  misc_feature 1..6053: note = Synthetic
  source 1..6053: mol_type = other DNA
tcaatgatccatctggaaatgatgaatgcgctgctcgctgcgctgccgcccgctgcgcggctgatcctgctcggcgacaaggaccagctcgcatcggtcgaagccggcgcagtgctcggcgacctgtgccgcacggccgaggccggctgctacctgccggcgacgcacgattacgttgtccacagctgcggcgaaacgattcccggcgattatctggacccagccggcccggcgctcgcacagcagaccgtgatgctgcgccagagccgccgcttcggtgggccgatcggcgaactcgcgctcgcggtgaatcgcggcgatgcggccacggccggagaatgcctgcgcgccggaatcggcgccaccctgcactggagcacgaaagacacgccggctgccgccgtgcggctcgcgctgaccggaagagcaggcgcgaaaggcggctaccgcggctatctggaaaaactgcgcgaacgaccgaaaagcggcgatgcagaggattatcagcaatggatccggtcggtgctggtcgagttcgaccgcttccgcatcctgtgcgcgctgcgcgacggcgaatggggcgtagccggactgaaccagaccatcgagtccgcgctgcagcaggaaaaactgatctcgaaacgcagcgaatggtacgcgggacgcccggtcatggtcacgcgcaatgactatggcgcgaacgtgttcaacggcgacatcggcatcgtgctgccggctgccgacggcgaatccatgcgcgtgtactttctcgacggcgacgcgatcaggtcggtgctggcaagccggctggccgaggtcgaaaccgcctatgcgatgaccgtgcacaaatcgcaaggatcagaattcgaacatacgacgctggtgctgccgccgcaaagcaatccggtgctgacgcgcgaactgatctacaccggcatcacgcgcgcgcgcaaacagttcacgctggtcgccgcaaatccggccgtgctcgacgacgcgatctcgcgcaaaacccgccgcgctagcgggttggccgaacgtatgtaaaatattatataaatcaacaagttacaaaaaacttaatggataattctgctcaagtggatttgtttccgcatatgtgtcgaataccagccaagcatttgactggaatcgctgttttttgccagcttgataaactgacattgcatagaaaagcccgccttgcggcgggcttgggtacagaatcattcgattctttattgtagcaacggctctcaccccggaaaactacaatggggctaatctaacacgggatagaaacatgcgccaagaacaaaaatacgatctgggcctggatatcggcatcgcctcggtgggctggtgcgtgctgggtaaaaaacgcatcattgatctgggtgttcgctgcttcgacaaggccgaaacccccgatggcgaatcgctgaatctggcccggcgcagcgcccggctgctgcgccgccgcctgcgccgccgcgcttggcgtttaaccaaactggcccgccttttgaagcgtgaagggctgattgccgatgcctccctgttccagcagcaaaccccgatcacccaatcgttgtggcaactgcgtgtagatgcgttggatcgcaaactgactggcgaagaatgggcgcgggtgatttaccatctgtgcaagcatcgcggtttctggtttgcccgcaaagccgaagcggattcatccgagggaggcaaagtcaagcaagggctggagcgcaccaaagccctgatgcacgaaaaaaactaccgcaccgctgccgaaatgatgctggccgaattcccggaacaccagcgcaacaagcgcggcgattacagccaggcactctcgcgtgaactgctgggtgaagaacttgccaccctgtttacccgccagcgcgaattaggcaacccacacgccagccaggaactcgaaacccgcattctcgaccgcaaggaaggtttgttttggcaacaaaaaccggcgctctccggcgaagccatgctcaatctcatgggcaaatgcacctttgagccgaccgaataccgtgccgccaagcgcacctggtcagcggagcgttttgtctggctgacccggctcaacaatctgcgcatcagcatcgacggcgaaagccgcccgctcaccgatgctgaacggcaagcaacgctagatttgccctacaagctcgccagcgttaaatacaagcaactcaaggcggagttggttaaacacggtttactgcccgaatccgcccgctttggtggcttgaattaccgccccgacaaagacccggaagacgccaaactgatcgagctttccggctaccacgatcttcgcaaggcgctggaaggcaaagggctgaaaaccgaatggcaggggcttgccacccagcccaatctgctcgacagcattgctagcatcctcaccatttacaagacggacgaagaaatccacgcccaactggctgcgctggatttggccgcgccggtgattgccgcactggaaaccgtgagcttcaccgactttatccgcctctcgctcaaggcgcttagcaagattctgcctggcatggaaacagggaaacgctacgacgaggcttgcacggcagctggctaccatcacagtcagttgatcgaaaataccggcagccgttatctgcccaagctggacgacgatgccccgaataacccggtggtgctgcgcgcgctcaatcaggcgcgcaaggtggtcaatgcaatcatccgagaatatggcccgccgcagcaggtacatatcgaaatggcccgtgatctgtcgcgtccattggatgagcgctacaagatcgaaaaagaacaaaagacttatcaggaaacccgccagaaggcccgcgagcattttgccgagactttcggccaagccccgcgtgccaaagattttgaaaaatggctgctgtacaaagagcaagacggcaaatgtgcctactccctgcaagcgctcgacctcaaccgtctttttgaagatggctacaccgaagtcgaccacgccctaccctactcgcgcagttttgacgacagcaaaaacaacaaggtgctggtgctgaccagcgaaaaccgcgacaagggcaaccgcacgccgtttgaatatctggatggcgcaagcaacagcccgcgctggcaattatttgaaactttcgtcaaaaccaacaagcaataccggcaggccaagcgcgaccggctgttgcgtaaaaacttcggcaaggacgaggctgctagcttcaaggaacgcaacctcaacgacacgcgctatatctgccgttatttcaagagttttgtcgaacacaatctggtcctgcacccggaaagcagctatcagcgctgcgtagtcttgagcggccagctcaccagctttctgcgcgcccgctggggcttggccaaagtgcgcgaagccagcgaccgccaccatgccctcgatgccaccgtggtcgcagcctgttcgcatggcatggtcaagcgcttggccgactacgcccgccgcaaggagctggaagaagcccgaggccgctacatcgacgaggaaaccggcgaaatcatcgatatcgccaagctgcgccagctggaaatccatttcccgcgcccgtgggcacacttcgaagacgagctttgcctgcgcctggggattgatcgcagcagcggcgcggtcttgcccgccgaaacgctggctgcgcaacgcgatcacctgcaactgcgtcatggctacagcgcggaagaaatcgccgccgccaagccgctgtttgtctcgcgcgcacccaagcgccgcaacggtggggcggcgcacaaggatacggtttacgcccagccagaacggctgaaagcgcaaggcggcgtgacgcaaaaagtggctctctccagcctgaagctcaccgacctcggcaagctgatcgacccgcaccgcaacgaaaaactctactccgccatcaaggcccggctggagcaattcggcggcaaaggcgacaaggctttcccgcctggctacgaattccgcaagccagacaaggacggcaatccgactggcccgattgtgcgcaccgtgaccgcgctcatcgacaagctatctggtatcccgctgcgcggcggcatcgccaaaaacgacagcatgatccgcgtggatgttttcaccaaggcgggcaagttccatctggttccggtgtatgtgcatcaccgcgtagctaaggcgttgccgacccgggccatcgtggccctcaaggatgaaaacgaatggacgccgattgacgaaagttttgggttttgcttttcgttgtatccaaatgatttggtttctgtttctctgaaaggcaaatccattgtcactggttattacgctgggcttgatcgctcaacaggggcaataagcttatgggcacacgaccgcaatcaagcagaaggtaaagacggcttaattcgtggaatcggcgtcaaaaccgcactgaaagtcgaaaaattccacgtcgatgtgctgggccgcatctacccggctaagccggagctgcgccgtgggctggcgtagcgtcattgtcagccagcccgccaggctcagcctgcacaaccggcagttgcggctggagcaggacggcgggctggaggtggaagtgccattggaagatatcagcatcgtggtgctggaaacgccgcaggcactgatcaccaccgccttgttaaccgccttcgccgagcaggccattgccgtgctcacttgcgatgccacgcatcaccccaacggcgtactgctaccttatctgccgcacagccggcaaacccgtgtactgcacaagcagatcatgctgaccgaaccacagaaaaaacgcgcctggcagcgcatcgtggcgcaaaagctgaccaatcaggcacaagtgctggccgagaatcaggcagagggggtgcaattgctgcgccgattagccagcaaggtgcgctctggcgacccggacaatctcgaaggccaaggtgcgcgctgctatttcgccaacctgtttggccagggctttacccgcacccgcgccagtgaagactggatcaacagcgcaatgaactacggctatgccattgcccgcgccgcgctggcgcgctcgctggtcagccatggcctgctgccgagcctgggactgttccaccacagtgaactcaacgcattcaacctagccgacgacctgatcgagccattccgggcgcaggtagatcgctgggtgctgaaaatcagccgcaacgagatcgcgactgcatgcagtcacgatctcgttgcggcccggctgctgcccgcgcacaaggctgccctggtcaatctgttgtacgaagacatggccatgcccaccggctacatgaacacgctcaccgccatcgaacaatgcgcgcaaagcatggggcaaatggtggaagtgggcgattacaaccagttggcactgccggcgcttattccagcctgatactgccataacttggccattcccgcgcaggcgggaatccagtgtttctggcacttgccattctggattcggggtcaagcccggaatgacacgacagggcttgccgtggagaagaaccatgagccaggagacccgccgatttatgcgcatgctggtgtttttcgatctacccaccgtcacccgcggcgacaagcgcgcctataccctgtttcgtcgttttctgttgcaagatggctacgatatgatccagtggtcagtgtacggccgcatcgtcaacggggcagacgacgaagaaaaacacctcaagcgccttgttgcaaacatgccacagaaaggctcggtacgttacctgaaaatcagcgagaaacagttcgccggcatccagattttgctcggcacccttaccgtacaagaagaaaaagtaggtatgcagcagcttttactgttctaaaaatcgcatttttataatgacaaaaagaaaaaacctccttgtaaaacaaggaggtaattcttaaagattgtagctttccggggtgagagagggagctacaaccttcttctcggcgttgagcaccacctctgcattgt

SEQ ID NO: 2943 - DNA, 5977 bp, synthetic construct
  source 1..5977: mol_type = other DNA
  misc_feature 1..5977: note = Synthetic
aacaatctgggtcgttagctcagctggtagagcagcggactcttaatccgtaggtcgacagttcgaatctgtcacggcccaccaatgtttaagcggctctcagagatgggagtcgttttccattttctgataagtaagcaagaagtaagcaattggattgaaacgaagtactaatttctgcagaaaacaattcaatacggtagctccttccgtacagatatctcctgtttctcgcaactatctaattgagtcagagagccaagtctagtcagtttctagtaaatcccagaaaagagtaaaaactcagagtctggtgagggtacggtaggggtatcaccccaaagcaaagaatggagtgagcttaatgggtacatattattccacctaaacaatcctcccaaatatcagccagatactcatcctacggaatctctacaggaacaccccccttgttgtttctaaaagggaggggataggggggtatatatttttatatctgcctatttttaatacagtgacttgtaattgcaagtcactacctaaatttcccaatgtaatcaatggcgcgataaagtgagaagggtaattaatgcaaattaagtatggaagataggtacgggttgggcttgtatcaaggccgagtaagcatcaaactctccaatgacatatagatgataagagtcgaatatgtagctagtttgtaatatcagaaactctagatgtctatcggttaataactaacatcgttttgatagaaattctatgagtagatgctgaagaatttaataagacagatttactgggtttgggtctgaaaggtttggaagtcatttagacttttaggcgagtttttgggacggccgcggtccagaataaagaaagcctaatgggtaaacccactaggctttcggatacagaatctttcgattctttattgtagcaacggctctcaccccggatgaactactacaacgactcaattatcagggagaattaaatgataagcaagcacgaaaatctaggggcactaacttttgggctagatattggcatagcttctgttggatgggcggtattgggtgaaagccgcattatcaacctcggtgtgcgatgttttgacaaagctgaaaccgccaaagaaggcgaatcattaaatcttgtcagaaggtctgcgcgtctcttgcgtcgcagattgagacgtagagcatggcgactgacaaagttagcacggttgctgaaacacgaaggagtgatatcggatgggaatctattcaaaaggaaaatagaaaaaaaagatcaaatacctaaatcatcttggcaattacgagttgacgcgcttgaccgtcaactgactgctgaagaatgggcacgcgttatctatcacttgtgtaagcatcgtggattccactggattagccgtgcagaagagaatgccgcagaaggagatagtaaaagtgaaagtggtagggtcaagcaaggtttagcggggacaaaaaaactgatggcagaaaaaaactaccgaactgctgctgaaatggtactaacagaatttccagaggctcaacgaaataagcaaggtgactatagtaaagctctatcgcgcatcctgcttggagacgaatttaagatattgtttgaaatgcaacgcagactcaaaaatccctttgcaacaaaggtgctagaagcagccatcctaggtactgacgaccataagagtggattattctgggcacagaatccagcactggctggcagcgatttattgaaaatgctggggcattgtacttttgagaaaatggaataccgcgcgccaaaagctagcttcactgcggaacggcatgtttggctcacccggctcaacaatttacgcatcgttgtagacggcacaacccgtccgttgaatgaggtagagcgacgcatagcactatctatgccttatcaacaagtaggggatctaacctataaacaattacgcgctgcgctaaccaaagcggattatttacctgacgtatttcgttatacgggactttcttatgcaagcggtaataaagttgatgagaaagccaaggatccggaaagtgctgtattagtaaagttgcctgcttggcagaagatacgtaaaactttggagaggaaaaatctaaatgctgattggcagaaaatatcgactgcagcattgaatgacaagtcacgattattcgatcagattgcttgggtattgagcgtatataaggacgatgacgaagtaagaatagagttgagtaagcttaatttgcccaatgctgaagagttgattgaagcactactagatattcgctttgacaagttcagcagtctgtctctcaaagccttgtatcagattgtacctttgatggaacaaggccatcggtacgatgaggccatcgcaaaaattgctgaatatggtcatcatagccagttacaaaaggccggagaaggggaatacaaatatctcccgccgttctacatgcagcgcgatgaaaaggggacgatggttttcaatgacgacatgaatatcccacgcaacccggtggtgctgcgcgcactcaatcaagcgcgaaaggtagtgaatgcactcatcaaggaatacggtccgccgcatgaagtgcatattgaaatggcgcgcgatttatcacgcccactggatgagcggcgagatatagagaaactgcaaaaggaatttcgcgacaataatgaaaaaaacaaaactcagtttgcgcaggatttcaacatcgtaggtgaagtcaaaggcaaagaatttgagaagtaccagctttatcgtgaacagcaagggaagtgtgggtactcaattgaaccgatagatattcaccgtctatttgagccaggttatgtcgaaatagatcacgcgttaccctattcacgcagtttcgatgacagcaagaacaatcgtgtattagtcctcgcaaaggaaaatcgtgataaaggtaatagcacgccatttgaatatctcggtggtaaagataatagtgagcgttggcgccggttttccgcattcgtagaaggtaacaaagcatatcgactcgccaagcgcagtcgcttattacgtaaggattacggtgaaaaggaagctcgtgaatttcgtgaacgaaatctaaatgatacccgttacatctgtaaattctttaaaaattacgtagagcaatatctgcaacttcatgaagacagcgatactaaacgctgtgttgtactcagtgggcagatgacatctttccttagagcccgatggggattagtcaaagtgcgagctgacagcgaccgccatcatgctctggatgccgctgttgttgcagcatgcagtcacggcatggtgaaacgtttatcagattattctcggcgtaaagaattggaaaaggtaagaacaggttttgtagatgtggatacgggtgagattattaacccagcaatgttccagcaagtacaacagcgcttccccaacccgtggccgcattttcgcgatgaagtgaaattacgtttgagtgtagatgaccccagcctgcttcaaagtgaaatagggaaatttggaacatatccttcagaagcattaaaaatattgcatccactgtttgtctcgcgcgccccgcaacggcgaaacaaaggatcagcacataaagacactatctacgctcaaccagagcggcttaaagcccaagggggggttacgcaaaaagtagctctatccaatctgtcactaaaagatcttgctatgttggtagacccgcaccgaaatgaaaaactttacactgctatacgcacccgattggaacaacatgggggtaagggcgacaaggcttttcctgctaataatccgctgcgtaaacctgatagcagcggtaatcctactgatccgatcgtgcgctctgtcacgctagtaattgataaactttctggtatacctattcgtggaggtatagcaaagaacgacagtatgttgcgggtggacgtattctcgaagaaaggtcagttccatctcgtacctgtgtatgtccatcacgctgtggggaaggcgctcccaaatcgtgccattgtgcagagtaaggacgaggctgaatggactcttgttgatgatagcttccagtttttattttcgttgtattcaaatgatttcgtacgaatacaacagaaaggtaaagcacccatccttggttactactccagttgccatcgaggcacaggaaatctgaacctttgggcacatgatcgcagtctacacgttggtaaaggtggaatggttgaaggcattggcgttaaaaccgccttgactatcgaaaaattcaacgtcgatgtcctaggtaaccgttatccagctccgatggagacacgtcgtggcctggcgtagcgtcattatctcgcacccagcaaagcttaaacgggatcaccactcgcttgctatcgagcaagagcaaactgcttgtgtgccctttgaagacatagcggtaatagtgcttaatcaccgagaaattacactgacccatccggtgttgtcagcctgtggtgagtatggtatcagcctgtttgctacgagcgatacacatcatcctagtggcgtatttcttccgttcctcacacactcacgagccacccgctggatgcggctacaacttaattttgcgcggccagtagccaagcagacgtgggcacgtatcgtacgccagaagatctccaatcaagcaatttgtttacgtctagtggggcgtgatggtgcggatcaactcgaatcttatgcacgtcgtgtccgctctggcgatgtcggtaatctggaggggcaagctgcagcattctattttgtacaactttttggcaagggattccaccgagagcaagtccgctttgttaatgccgcgctgaattatggttatgcggtgttacgcggcgccatagctcgcggactagtagcgcatggactattaccgtcgcttggattgttccatgctagtgaacagaatgccttcaacctcgctgatgacgtgattgaaccgttccgtccaattgttgacttatttgtctctaagcacattacggcggatattgatgaactgcgctcagaggataaagtgcaactggtaggtttgctcaatgtagatatgggtatgccgcgcggaaaaatgtctgtgctctctgccatcgaacagacaatagagagcttggttcgtgtttatgacggtggtagtgagacatttatagagttacctgttttgcttggattggagcagcactacttagagtgttgagacatgagtacggagacaagacggtttatgcgcttgcttgtattctttgaccttccggttgtcaccaaagctgaacgtcgcgcctataccatatttcgacgcttcctcatcaacgatggttacgacatgatccagttctcggtctatggtcgcattctaaatggcaatgatgctcttgaaaaacacatgaagcggctggtgaacagtctgccaccagaagggtcggttcggtgcctgaatgtaacggagaagcaattttccagtatgaagatgctcgttggtttgcctccttttcaggaaaaagccattaaggcaggtcaaatgttgctattctgattcggatttttaaagcagaacgccctctcagactaaactgagtgggcgtttgcgaaggacctattgtagtgcatccggggtgagagagggagctacaaccgtccagacttcctgatacatggcagccaaattgtagtgcatccggggtgagagagggagctacaacacagaatatgggctttacagaagaggccagattgtagtgcatccggggtgagagagggagctacaacccatatcatggcttaaaggttcttttaccaattgtagtgcatccggggtgagagagggagctacaacttccatgatgctggcgctctttgccatactattgtagtgcatccggggtgagagagtgagctacaactgcttac

SEQ ID NO: 2944 - DNA, 5875 bp, synthetic construct
  misc_feature 1..5875: note = Synthetic
  source 1..5875: mol_type = other DNA
ccggccgcgccatcgaccgcgccgcgccgcacgcggccggcatctggaccttcgaggacctgagcgcgcagcgccccatcggcgccgtgctgaccccgcgcgagcgcgaagtcgccgcccagctcacgcgcgggctgaccagcaaggaaatcggccgcgccctgggcctgagccaccgcacggtggaggtgcaccgcgccaagctgatgcgcaagtaccgcgccagcaccacggccgatctggtgcaaaagctcatgggcgggccatgaggcgccaccggccgccgtagaaactacaaatttcatagctgtcggcgcttgccagacgggcgccaggcgctatttcttttcagaaccagcaggagggccgtcgaccacctcggcggcgctgcgaaaggcctccaccgcgcacggcacgccgcagtaaatgctggcgtgcagcagcacctcctggatctcggccgtggtcgcgccgttgttcagcgcgccgcgcacatggcccttcagctcgtgctggcgacccagcgcggtcagcatggccaccgtcaccaggctgcgcgtcttcaggtccagtccgggccgctgccacacgtcgccccaggcgttgcgcgtgatgtagtgctgcatcggctcggtgaacggcgtggcgccggccagcgcgcggtcgacgaaatcgtcgcccatcacctggcggcgcgtcttcaggccatcctggaaggccgggtcttggggcagtcgcatgcgggtcactcctgaggacaaaggcagtcagcataatgaccctgacccacccacgcgaggagcccccatgagccgctaccccctgcccgacctgaacagcctgcccgaggacattcgcgccaaaattcttgaagtgcaggccaaggccggcttcatccccaacgtgttcctggcgctggcacgccggccggccgaatggcgcgccttcttcgcctaccacgacgcgctgatggagcccgaagccagcggccgcaccagcggcctgagcaagggcgaccgcgaaatgatcatcaccgccaccagcgccgccaacggctgcctgtactgcgtggtggcgcacggcgcactgctgcgcatctacgagaaaaagcccctcgtcgccgaccaagtggccaccaaccaccacaaggccgacatcaccccgcgccagcgcgccatgctcgacttcgcgatgaaagtcagccagcgcccgcgcgagctgggcgagcaagactttgccccgctgcacgcccacggcctggacgacgaggacatctgggacatcaccgccatcaccgccttcttcggcctgtccaaccgcatggcctccttcagcaacatgatgccgaacgcggagttctacctgatggggcgggtgccgagggagaagaaggcgggctgagccgaccaggccgacctgcttggcgatgcgctttggcgcgcaacccaagaggtcaaggaaaaggcctgacaggttgccccgtcaggcctttgggtacggacggggtcttgcgacccctccttattgcagcaacggctctcaccccggataaccacaatcgggagcgagtatagcaagggaggtttcatggcgcagtacgtctttggattggatatcggcattgcctcggtcggctgggcggtgctgggtgatcagcgcatcatcgacctgggtgtgcgctgcttcgacaaggccgagaccgccaaagaaggcgatccgctcaatctcacccgccgccaagcccggctgctgcgccggcgcctgtatcgccgggcctggcgcctcacacaactcgctcgcgtgctcaagcgtgaaggcttgattgcggatgccaagctcttcgcgaaagcgcccacctacgcagacagtgcctggcgactgcgggtggaagggctggatcgcctgctcacgccactggaatgggcgcgcgtgctgtatcacctgtgcaagcaccgcggctttcactggatcagcaaggccgaggaagccaaggccgacagcaacaaggaaggcgggcgcgtcaagcagggcctgaaagacaccgccgcccgcatgaaggacaagggctaccgcagcgctgccgaaatggtgctggccgaatttccggacgcccagcgcaacaagcgtgggcaatacgacaaggcgctctcgcgcgtgctgctgggcgaggaactggcgctgctgttcgagcgccagcgcgcgcggggcaccccgcacgccagcgagcgccttcagacactgattttgggcaacggcgaccgccgcagcggcctgttctggcggcaaaaacccgcgctggcaggcgccgacctgctcaagatgctgggcaagtgcaccttcgagaaaggcgaataccgcgcgcccaaggccagcttcagcgccgagcgccatgtgtggctcacgcgcctgaacaatttgcgcgtggtgatcgacggccgctcgcgccccttgaacgaagccgagcgtgccatcgccctgccgctgccctaccagaccgaggcgttcaagtacaaaaccctgaaggccgccctcgtcaaggccggactctgggacgatagcgtgcgctttggcggcctgtcctatcccagccaggcgcaggcggaaggcgagaaagccaaagacccggaagatcagccgctggtcaagatgccggcttggcacgagttgcgcaaggcgttcaaatccgcaggactcgaatcgctgtggcagcgcatcagcacccccgcgctggagggcaaccccacgctgctcgaccagatcgccaccgtgctcagcgtgtacaaggacggggacgaaatcacccgcgaactgcgcgcgcttgcgctgcccgagcctgatgcctgcatcccggtgctggagcgcatcagcttcgacaagttttccagtctgtcgctcaaggcgctgcgacgcatcgtgccgccaatggaaaccggcctgcgctacgacgaagccgtggcgaagattcccgagtacggccaccacagccagcgcgtcaagcccgatgcgggcaagcacctgtacctgccgccgttctacgaggcccagcgcgaataccgtggcaagaacgaccgcgtgggatcgatgaaattccgcgaagacgccgacgtcccgcgcaaccccgtggtgctgcgcgcgctcaaccaggcgcgcaaggtggtcaacgcgctgatccgcgaatacggcagccccatggccgtgcacatcgagatggcacgcgacctgtcgcgccccctcgatgagcgtcgtgaagtacaaaaactccaggacgagttccgcgatcgcaacgaccgggcccgcgctcaattcgccgagcagttcggctatcaccccaaggggcgcgaatttgaaaaatggatgctctaccgcgagcagttgggccagtgcgcttacagccagcaagcgcttgacatccagcgcgtgctggacgacccgaactatgctcaggtcgatcacgccctgccctactcgcgcagctatgacgacagcaagaacaacaaggtgctggtgctgacacgcgagaaccaggacaagggcaaccgcacgccctatgaatacctgactgcgctcgacggtgggcaggagggtgaacgctggcgcgccttcacagcctgggtacagggcaacaagaattaccgcctggccaagcgcaaccgcctgctacgcaagaactacagcgcagacgaacaacgtggcttcatcgaccgcaacctcaacgacacgcgctacatctgccggttcttcaagaactacatcgagcagcacctgcaactggccgcccgccccgacggcgacctgaaccgccgctgcgtggtggcgagcggccagttgactgggttcctgcgcgcgcggtggggccttgccaagctgcgctcggacagcgatcgccaccacgcgctcgatgccgccgtcgtggccgcctgcacacacagcatggtcaaggcactggccgaccacgcgcgccgcaaggaaatcgaattcctgaagcaaggcttccccgacccggagactggcgaaatcctcgacccctgcgcgttcgatcacggcaagcactacttccctgaaccctggccgcacttccgccacgaactgcaggcgcgcctgacggggctgccggatcgggcgatcgtggcgttcaaggatgagaccgagtggacgctgatcgacgaaagctttgcgtttctgttctctatttaccctaatgatctggtgcgagttgcactcaaaaaagactcagcgcttgggtattactcgggcgctgatcgatcaacgggagcaatcaacctgtgggcgcacgacagatcagcagcgatcggtaaagacggtttgatccgtggcatcggcgtcaaaaccgccgtttccctggagaagttcaacatcgacgtgctgggccgcgtctaccccgccccgccagaggtgcgccgtggtctggcgtagcgtggtcatcaaccagccggccaagctcaagcgcgagcacttcgcgctggtcgtcgagcaggcgcaaagcgcgcgcgtgccgttcgaggacattgccgtcatcgtgctcaaccaccgcgagatcacgctgacacacccggtgctctcggcctgcgccgactacgggatcggcctgtacagcacgggcgacaaccaccagcccaacggcatcttcatgccgtttctgccgcacagccgcgccacgcgcatgcagcggctgcaactgcaactggacaaacccaccaccaaacgggcctgggccgccatcgtgcgcgccaagatcggcaaccaggcgcgctgcatggagctgctgggccggggcgacgccgagcgcctgcactcctacgtgcggcgcgtgcgctcgggcgatgctggcaacctggaggggcaggccagcagctacttctttccacaggtgtttggccgcggcttccaccgcagccaggcaggctgggtcaacgccgcgctggactatggctacgccgtcatgcgcggcgcctgcgcccgcgcgctggtgcagcacggcatgctgcccagcctgggcctgttccacagcagcgaacagaacgccttcaacctcgcggacgatctgatcgagccctatcgcccggtggtcgatctgcatgtggcgcagcaacccatcaagcccgacgatgccgacttgcagccggccgacaaggtggcgctgatcggcctgctcaacgtcgatgtggccatgccgcgcggccgcatgagcgtgctggcctcgatcgaacaagccgccgaggcactggcgcgcctgtatgacggcggcaacgaacagatgctggaacttcccggtctgatcggtctggcgcaacatcaattcgagatgtagcggcgcacgccatgggccaggacacgaggcggttcatgcgcatgctggtgttcttcgatctgcctgtggtcaccaaagccgatcggcgcgcctacacggtgtttcggcgcttcctgatcaacgacggctacgacatgatccagttctcggtctatggccgcatattgaatggtggcgatgcggcagacaagcacatgaagcgcctgctggccaacctgccgcccgaaggctcggtgcgcgtgctgacagtgaccgaaaagcagttcgccagcatgaaactgctggtcgggctgccgctgtttcaggaaaaaaaggtcaacgcagcccagatcgcgctgttctgagacctattttggaagaacgaaaacccgcgctccgccaagcggggcgcgggtttcgcagaggtctgagtgtagctatccggggtgagagagggagctacaacgctacgtgtggcttggctggcgcaaccgaggagtgtagctatccggggggagagagggagctacaaccttggtggacgccggttgtggcttgggatagaat

SEQ ID NO: 2945 - DNA, 5739 bp, synthetic construct
  source 1..5739: mol_type = other DNA
  misc_feature 1..5739: note = Synthetic
ggcgacatcatcggcttcaccacccacggcggcgtgcaactgggcgacaccatcaccgatggtgccgcactgcaattcaccggcttgccgttcttcgccccggaattgttcatgacggtgattttgaaaaaccccttgcgcaccaagcaactgcaacaaggcttggaccaactgggtgaagaaggcgcgattcaagtgttcaagcccgaagccggcggcgccatgctgctaggcgcggtgggtcaactgcaatttgaagtggtgcaacaccgcttgaaagccgagtacgactgcgacgtgaagctagagagctgccaatacaccggtgcacgttggatcacagctgacacaccggcggagctgcgtgagttcacgtatgcctaccctcagcgcatggctttggatgcggccaacactttggcttatttgtgtacttcgccttatgacgtgcgcttggcgcaagagcggtttccgaagattcatttccatccgctgcgggagcatgcggggttggcgttgtcgacggcggggtaggccacgctccgaaggcaatgcccttccacgcggaaattaaaaattttcctacgctggctatgcggcggcgaaaaccgccttgatgcaagtccgcttcggcttgccgcgactagagaactcaaccatgtgaaaaaagtaaagcctagacagtttcctgtctaggctttgggtacggacagagtctttcgactcaatccttattgcagcaacggctctcaccccggatagcaacaatcggccttaagattaacacatttatacccattgaaaggtgtttttgtggaaaaattaaatctaaggtttggttttgatatcggaatcgcttcggttggctgggccgttcttagccccacacacatcgttgatctgggtgttcactgttttgacaaagctgaaaccccaaaagaaggcgaatcactcaatttggctcgcagacaagcgcgattactccgacgacgtttctatcgaagggcttggcggttgacacaagtcgctcgcttactcaagcgcgaaggcttgattgattcggccaacctcttcaagcaacaaccaagtttttcacagccagaccctgaagacactggcggaaaaaaacaagtttttgtcagcacttgggtgctgcgcaaagaaggcttagaccgtttactgaccccaattgagtgggcacgtgttatttaccacttatgcaagcatcgaggttttcattgggtcagcaaagctgaagaagcagccgcagaaggcgatgcaaaaagcgaagggggactagtaaaaaaaagtttagccaatacagcagcacgcatggccgaaaaaggctatcgcacagctgcggaaatggtgctggccgagttcccagatgcccagcgcaacaagcagggcgactacagcaaagcgttgtcgcgaaaacttcttgatcaagagtttgaacatttatttgaagcacagcgacgcttaggcaacccgcacaccagcgatgctttagaagtcttgatacgtggaaatggagaccgtaaaagtgggctgttttggagacaaaagcctgcgctctcgggtgctgacttactgaaaatgctaggccgctgcacctttgaacgtactggcggagctgacggaaaaggtgaatttcgcgcccccaaagcaagcttcactgcggagcgccatgtatggctcacgcgtctaaacaacctgcgagtaatgatagacggcatatcgcgccccttgaacaaggcagaacaccaagttgcgctgaacttgccttacctaaatagcgaaaaattcacttataaaaatctgcgtacagctctgctcaacacggggcttcccgaaagctttcgatttgctggcttagcctaccccagcgacaaacaaaaagaagaagaaaaagcaaagcacccagaggatcaaattttgatcaagctcatagcttggcacacgttgcgtcaagccatgaagaaagcaggcctagaagatgtttggcaacaaatcagcatggccgcactagacggccagcccgacacgctagatcagatcggatggatattgagtgtttacaaagacgatgatgaggtaagcgcgcaattaagcaagttgcccttgccacaagcccaaaaaaccatctctgttttgctgagcattcgttttgacaagtttcatgcgctgtcgctcaaagccttacgccagatcgtgccgcacatggagggtggtttgcgctacgacgaagcggtagcaaatatcccggaatacggccaccatagccaccgcaaacaaccagaggaaggcaaggcactgtacctccccccgttctacgaagagcagcgcacatacaaaggcaagagtgatcgcattggctcaatggtgttcagacaagacattaacttaccgcgcaacccggtggtgctgcgcgcacttaaccaagcgcgtaaagtggtcaatgcgctcatcaaacaatacggtagcccaaccgcagttcacattgaaatggcgcgagatttatcaagacctcttgatgaacgacgcgagatacaaaaactgcaagacgaattcaaagagcgtaaccaaaaagcacgcgaggactttgaagcacaatttcaccgcaaccccagcggcaaagactttgaaaaatggatgctttaccgtgagcagggcgggcaatgcgcctactcattactaccccttgcacccagtggcgactgcaacgagatatttctagaaggtaaaacccaaatcgatcacgcgctcccctactcgcgcagttttgataacagcaaaaacaacaaggtattggtgctcacgcgcgaaaaccaaaacaaaggtaaccgcacagcctttgaatacctcaccagcttcactggcggcgaaaacggcgaacgctggcgtaactttgtcgcttgggtgaatcaaaacaaagcctatcgcactgccaaacgaaatcgtttgttgcgtaagaactatggcgctgaagaagccaaaggcttcaaagaccgaaacctcaacgacacgcgctacatctgcaagtttttcaaaaattacattgaagaaaatttgcacctagcaagcaaagtagatggcgaaaccaaccagcgttgcgtagtggtcagtggccagctcacggcatttttgcgcgcacgctgggggctgctaaaagtacgagaagaaagtgaccgccaccatgcactggatgctgccgtggtggctgcgtgcagccatggcatggttaaagcgctggccgactactcacgcttcaaagaagtggagtttttgaaagagggcttccctgatccagaaaccggtgaaattattaacccagccgcatttgaccgtggtcgtcgacatttcccagaaccttgggcacatttccgtcatgaattagaagcacgccttaaaaccgacgactcagcggcattgcgtaaagacatgcaacgcctaggcacctatagtgaaggcgatttgcaacaactgcgtaccctgtttgtgtcgcgcgcaccacaacgacgcaatagtggtgctgtccacaaagaaaccatctactcaaaacccaaacttggccacagattaatggtggaagaaaaatctacaaacggaaaaatatttagatgttcaacacccaaagaattaaagagtattgctattgaacgtattggtctttttgaaacaacagacaaaggtagaaaatttcgatttaacgaggcgcaactaagtgaagttgttggcggcgcccggaatgcatggatgatccaagcattacgcttttggcttgctaaacgaggcacaaaccccaaacagccgggtacgacgagttacccaaacaaaccacagaagggaaacccccttgatggcccatttactggccccacaatcaagtcagtaaaactcaatggagggaagacttccgggttcgaagttcgtggcggcatagccaagaacgacagcatgattcgcgtagatgtttttaccaaagcaggaaagtttcatctcgtgcccatctatgtgcatcaccgcgtgacagggttaccaaatcgggcgatcgttcaatcaaaggacgaaaacgagtggacattgattgacgagagttttgcttttttgttttcggtgtatccaaatgacttggtgcgagtgacactaaagaaagagattcgatttggctactactcaagctgcaatcgggcgacaggcagtattgacttgtgggttcatgaccgtgcgaaatcaatagggaaagacggattgattcaaagtgttggtgtgaagttggcactctcacttgaaaaattcaacgtcgatcttctaggccacatctaccctgccctaccggagcaacgccgtggtctggcgtagcgtggtcatcagccaacccgccaagctcaagcgcgagcatttcgcgctggtggtggagcaaaaagagtcggcccgtgtgcccttcgaggatattgcagtgatcgtgctcaaccaccgcgaaatcacaatcacccaccctgtgctctcggcttgtgccgaatatggaattagcctcttcagcatgggcagcaaccaccaaccgaatggcgtgtttttgccttttttgcagcacagccgcgccacgcgaatgcagcggctgcaacttgatttagacaagcctacggccaaacgcgcttgggctgccatcgtgcaaagcaaaattcgcaatcaagcgcaatgcatgagactgcgcatcgtgagtgaccctgatcgtttggactcttacgcgcgtcgtgtgcgctctggcgacacggggaatatggaagcgcaagccagcgcgtattacttcccgcaactgtttggccgtagctttcaccgcagccagccggtttgggtcaacgccgcattggactacggctatgccgtcatgcgaggcgcttgcgcccgcgcactggtagcccacggcatgttgcccagcattggactcttccacagcagcgaacaaaacgcgttcaatttggcggatgatttgattgaaccctaccgtcccgtcgtggacttattcgtcgctgaacaaacaccgccaatagacagcgacgacctacgcccagccgacaaactaggtttgatcgctctgctcaatgtggacgtggttatgccgcgcggcactatgagtgtgttggcctcaatagagcaagccgccgaatcactggcgcgtttgtttgacggtggtagcgaacaggtgctggagttgccaaggctgttgcgtttgaaccagcatcggttcgagatgtaacgtttgcccatgccgtacagccatgagtcaagacacaaggcggtttatgcggatgttggtgttctttgatttgccagttgtcagcaaggccgataggcgggcctataccgtgtttcgccgctttttactcaacgatggctacgacatgattcagttttcggtttacgggcgcatcctcaacggcaacgatgccgtggacaagcacatgaaacgattggtaaacaacctaccacctgccgggtcggtacgcatgttgaccgtcacagagaaacaatttgccagcatgaagctactggtcggcctgccgctttttcaagaaaccaaggttaccgccgcccaaatcgccttgttttaagtgttttttcagaacgagaacccgcgccaagctaagcttgacgcgggtttcgaaagggcctagtgtagctatccggggtgagagagggagctacaacccaaaatataataataataaaaggaca

SEQ ID NO: 2946 - DNA, 5637 bp, synthetic construct
  misc_feature 1..5637: note = Synthetic
  source 1..5637: mol_type = other DNA
cccgccacgcctgactttcgcggacgactaccaggcttcgaggaattcgcgccagcgcggcgcaaccggacagcgcccaccacccaggcggatggcactggaattctgtgcgcatatcggtaagatgccgatgtcacgaaaaggaaagcccggcggcttgatgcaatcgccccgccgggcctggatacagaatctttcgattctttattgtagcaacggctctcaccccggatagccacaacggggtcgattatgcgggaggacaagatggctggcaacacccctgaagcgctcacgttcggcttcgacatcggcatcgcctcggtcggctggtgcgtgcttggcgagaaccgcatcgtcgatctcggcgtgcgctgcttcgacaaggcggaaaccgccaaggaaggcgaatcgctgaacctcgccaggcgcacggcgcgcctgatgcgccgccgcctgcgccgccgtgcctggcggctgaccaagctggcgcgactactcaagcgcgaagggctgatcgccgacttacggagtcccgccacagtttcgccgtggcaactacgcgtcgacggtctcgaccgccgcctgaccggtgaggaatgggcacgcgtcatataccacctgtgcaagcatcgcggcttccactggatcagccgtgccgaggaaaagaaggccgagggcgatgccaagggcgaaggcgggcgggtcaaaaaaggactgtccgacacccagcgccgcatggccgagaagagctaccgcagcgccgccgagatggtgctggccgaatttcccgacgcacagaggaacaaggccggcgactacggcaaggcgctttcgcgcgtgttgctggccgatgagttggctttgctgttcaaacgccaacgcgaactgagcaacccgcaggccgatgccgatctggaaacgaagatactcggcagcggcgaccgcaagagcggcctgttttgggaacagaaaccaccactcgccggcaccgacctgctcaagatgctcggcaaatgcaccttcgagaaggacgaataccgcgcccccaaggccagtttcaccgccgagcgtcatgtctggctcacgaagctcgtgaacctaaaaatcgtcgtcgatggcgtaacgcgaagactgacgccagaggaggttaatgcggttgtgtctttaccctacgggtacaaatccgcgctgaaatggaagcagcttcacaatgcgctgatcgcgcatggcctgccgcaatcattggttttctccggcttgaccggcaagaaagacaaagacctccttgaccagacactcatcaatctgcccgcgtggcaagaactcagggaaacattcgagaaagccgagctaaaaaccgagtggcaaggcatcgccagcaggccggaattgctcgaccaaattgcatgggtgctatcggtttacaaggatggcaatgaagtcgaggcggaactacgtaaacttcccctacccggcggcgataaaacagtctgtgccctttccgtcgtcagcttcgacaaatttcacaacctatcgcttaaagcgctgcgaaagatcgtaccgcacatggaagccggcctgcgctacgacgaagcctgccaggccgtaggctatcaccacagccagttgcatgaagccggtgcgtgtgaacacaaatatctgccaccgttctatgcccgccgcgacaaggacgggcgcatggtattcaccgaagacatggacgtgccaagaaatcccgtcgtcctgcgcgcgcttaatcaggcgcgcaaggtgctgaacgccttggtgcgcgtctatcgttctccgtccgccgtacatatcgaaatggcgcgcgacctttcccgcccgctgacgggccattgggcagataacggtaagtacattgaaggccgcagggatatcgagaagttgcaggaggaataccgaaaacgcaatgaggacgacaaaactgcgttttcgcaggagcatggtgtggctcgcaacggcaagggctttgggcgggacttcgagaaattccaactctaccgcgagcagaacagccaatgcccatactgccagagtgcgctcgatctcaacagtgtgttgagcgataccaactatgctcaagtcgaccatgcccttccatactcgcgcagtttcgatgacagcaagaacaacaaggtgctggtgcatacgacctgcaaccagaacaagggcaatcgcacgccctacgaatacctgacaaccctctacggtgaggacggtgaacactggattaggtacaaggtgtgggttgaggctacttatcctggtaagactaggcaggccaagcgcacgcgtctattgcgcaaggatttcgcgggcaaggctgccgaggaattccgcgagcgcaacctcaatgacacacgttacatctgccgcttcttcaagaactatgtcgagcgttacctgcaactcacaccgaaagtcagccgtggcgatacgccggacgaggcagtcaacaagcgctgcgtggtgctcagcggccagaccaccgccttcttgcgcgcccgctggggactgctaaagattcgcggcgacagcgaccgccaccatgcactcgacgccgccgtggtggccgcgtgcagccacggcatggtcaagcgcctgggcgactacgcccgcaccagggaacttgaaaaggtacgcgccggcttccccgatcccgaaacgggcgagattctcgacccggcgaaattccagcagttgcatgcgcattttcccgacccttggccgcatttccgaaccgaactctactcacgcttatgcgctgaagtcgtaacgaatccagtaacgggcaaacgagaactcgcatttcacgatgatcccgtccgtctaagcgaggaaatcgagcgcctgggcacctatccttctgatgcgctggctgccgtaagcccgctaatcgtctcgcgcgcaccgcagcgacgcaacggcggcgcggcgcacaaggacaccatctacgcccagcccgaaaaactaaagctaaccaaccaagtggttcagcacattgacttggaatcattgaaccgcaatcactttggatttctcgaagactatttcgccgagagaaagcgattgtctaagggcaccctcacgaggaaggctgccgcagcgctattcaagacattttccgatcaaggggctgacatctggagcatcgacagaaaatggcgagaatgccaattgattgaccccgagcgtaacaaggagttttacgaagctctctacgaccaacttgcagaacacgactggaacggaaaaaaagcattcacaagtggctttaataagccaaccagaagaaagaatgcggttgcttcacctcccgttcgcaaggtcgctaccgtcatttcgtcttccggcatccccgtgcgcggcggcatcgccaagaacgacagcatgctgcgtgtcgatgttttccgccacaagaaggatggcaagttccatctggtgccggtgtatgtgcatcacgcggtggcgaaggagttgccgaaccgagcgattgtggcgttcaaggatgaggatgagtggacgctgatcgacgatcgccttgacttctgcttttcagttcatcccaatgacttggtccgagtcacactcaagaaggaaaagcacttcggttactttgcaagttgcaaccgctccacaggtgctttcaacctctggtctcatgaccgtaaccggcagtccggcaaggacggaatgatcgaaagtattggcgtcaagaccgccgtcgcagtggagaaattccacgtcgacgtcctcggcaacatctactctgccccgaaggaagagcgctgtggtctggcgtagcgtgatgatctcccgccccgccaagctgcggcgggagcacttctccctcgccatcgagcaggaggaaaccgccttcgtccccttcgaggatatcgccgtcatcgtcctcaaccatcgcgaaatcacgctgacgcatccggtgctttcggcctgtgccgaatacggcatcggcctctacgccaccggacacaaccaccagccggccggcgtgttcctgcccttcctgccgcactcgcgcaccacgcgcatgatgcggctgcagctggcgatcgccaagcctgccgcgaagcaggcctgggcgagtatcgtgaaacgcaagatcgagaaccaggcccaatgcatgaaactggctggcgtggacgctgcggatcgcttggactcgtacgcccgccgcgtgcgctcgggcgatccggaaaacctggaggcgcaagccgccgctttctatttcgcacaattgttcggcaaggatttccatcgtgccgagctatgctggaacaacgcggcgctcgactacggctattccgtactgcgcggcgccatcgcgcgcggcttggtggcacacggtctgcatcctaccgtcgggctgtttcacgatagcgagaagaacgccttcaacctcgccgacgacatgatcgagccattccggccgctggtcgaccttcacgtcgccaagcatccggccaccacggaaggcgaactgctgcccgccgacaaatcggcgctgattgccctgctcaatgtcgatgtcgccatgccgcaaggccgcatgtcggtgctctcggctatcgagtacgcggtcgagagcctggcgcgggtgtacgaaggagacacgcacgagatggaccttccccgcctgatcggtttgcagccgcatgccctggagcattgagtgggcatcgagacgaggcgatacatgcgcttgctcgtcttcttcgatctgccgatggtcaccaagaccgagaagcgcgcctacgtgcagttccgccgctttctgctcaacgacggctacgacatgatccagttctcggtctatggccgcattctcaacggtcgcgacgctgaaacaaaacacttggcgcgcctgacgcagaacctgccgcccgatggctcgatacgcagcatgaccgtcaccgagaagcagtatgccggcatgcgccttctcgtcggcatgccgctgtttcaagagaagaaggtcgcggcctcccaaatgctgctgttttgagcgtgtggcgtccggcgacttcggctggtcaggctaccttcagttcctcgcgtagcacgcgacgcaggacatccaccgtcaccggtgcctgctccggcaaggctgaggcccgcaatgcgtcgttgatgagcgtctgataacccttgccctgccgctcggccatggcgcgaaaagccgccagcacctcagcatcgacatacatggtgatgcgcgtcttgccggcatttgcctccgcctgaagctttgccaccgccggcacatcctgcgcgcgcttcgctttcgagaaatcgtattccttacgcataacctttcgcctccttccgggtggctttccgagccgatattggtcgaaccgtgtcgccgcgcattgtccagacaacaaccagcaggcggccctgatcactcatgccaagaccgaggtagcgccgctcgccttcggcgtccggatcttcacgtatcaatgccagcgggtcgagaagaaccgtcgcaccttcctcgaggctgacgccatgcttcttgaggttggcagccagggcagagacgttgttcttggcctgggtcatcaggtgcatggcgatgaacca

SEQ ID NO: 2947 - DNA, 5618 bp, synthetic construct
  source 1..5618: mol_type = other DNA
  misc_feature 1..5618: note = Synthetic
gaaccctggaacatgcattccagcctgctgagcaaattcctcggtctgatggcagccctttgctgggccatcggcaccgttctggtcaagcgcctgcgcgctcgtcagcaggtcgatctgctgtctctgaccacctggcagatgctgatgggcgctgtgccgcttgtgctgctggcgctgattgtcccggaacatgcaacaaactggtccatgtcatacatctggattctggtcttcatggcagtcatcagcacggccatgtgctggtggctgtggatcaccattctggatcgcgtacccgcatgggaagccagcctgtctgtactcggcacgccagtggtggcgatcatctcatcacgcctgttgctgaatgaagaattcaaactcagcgagctaaccggcattctgctcatcgggtgcggtctggcactgctgtcactgataggctgggctgccagccgccgcaattcgataaaatgatttctcacgcagagccgcggaggaatataaagcatcagatgtagcagttaaaatttgatcagacacaaattatcaaactactgctttgccttcatgtactacaccccgaaaaccggatactcgcgactaatcagttgggtcaattcttaacgatccaaacctggctttcgcacgcataaaatatagggcgcggcctaagtactctgcttccgcgcaattctccgcaagattgaaaacatcaattcttacagccaactggttgctgcaattgcgcatgagcgttattctgctatcaggatgaaataaatatccaaagagaaagcccggcaagtttccccgccgggctttcggatacagattcaacctttcggttgattctttattgtagcaacggctctcaccccggatgaactacaacggtttcattatcacggagaatgcgcatgacaagcaagcagaataatcccggaatactcactttcgggctggacatcggcattgcctcagtgggctgggcggtactgggagagaatcgcatcgttaatcttggcgtgcgctgctttgacaaagcagaaaccgccaaagaaggtgaatcactaaatcttgcaaggcgctcagcgcgcttgctgcgccgccgcctgcgccgccgtgcctggcgactgaccaagttatccagacttttcaaacacgaaggattaatctcgcacgcctcggcactcaaaattccctttacccattcactctggctactacgcgtcgaagcactcgaccgccgtctgaacgccgatgaatgggcacgtgtgatctatcacatttgcaaacaccgtggcttccactggatcagccgtgccgaagaaaaggcagcagaaggtgatagtaagagtgagggcggcaaagtcaaacaaggattggctggcacaaagaaattgatggctgaaaaaaactatcgctctgtagccgaaatggtactggcagaatttcctgccgcacagcgcaacaagcaaggcgactacagcaaggcgctttcccgtattttgctgggtgacgaactgaagaaactgttcaacctgcaacgtgaactgggcaacccacacaccagcccggagtttgaagccaaaattctcggcaatggcgaccgaaaaaccggactattctgggaacaaaacccagcattgtccggtgctgcactgctcaagatgctcggaaaatgcaccttcgagaaaaacgaataccgcgcccccaaagccagcttcaccgccgaacgccacgtctggctcacccgcctcaacaatctgcgcatcgtggtggatggcacaacccgtccgctgaatgaaatagagcgacgtgtcgcgttaccaatgccttacctgcaatcgggcgacttcagctacaagcaactgcgcgccgcgctgaccaaagcgggttatttgcctgaatcattccaatttacaggccttgcctatcccaacaagcaaatctccgtagaaaaagccaaagacccggaaagcgctgcactggcgaaacttcctgcctggcaaactttgcataaaacattgaaagatgccggactagaaaacgaatggcagaagatttccaccgatgcactggaaggcaggccacaactgcttgatgaccttgcctgggtgttgagcgtgtacaaagaagatgctgaagtcgaagctgaattaaacaagctggcattacctaataagaacaagctggtgctggctttgagctatatcagttttgataaattcagcaacctgtcgctcaaggcactgcgccaaattgtgccactcatggaacagggacagcgttacgacgaggccgtcgccaacatctcggaatacggccatcacagccagttgcaccaggttggcgagggtaaacataaatacctgccgccgttttactctgaacgagacaaaaccggacgcatggtattcaacgatgacatggacattccgcgcaacccggtggtattgagagcgctcaatcaggcgcgcaaggtggtgaacgcgctcatcaaggaatacggttcgccgcatgaagtgcatatcgaaatggcgcgggatttgtcccgaccactggatgaacggcgagatgtcgaaaaactacaaaaggaattccgcgaccgcaacgaaaaagataaagctctgttcgccagcgacttcaacatagcgggcgcagccaaaggcaaagaattcgagaaatatcagctttaccgcgagcaacaaggcaagtgtgcttactccatagagccaatggacattaatcgtttatttgaactgggctatgtcgaaatcgaccacgccctgccctactcgcgcagctttgatgacagcaaaaacaaccgcgtgctggtgctggcaaaggagaaccgcgacaaaggcaaccgcacgccttatgaatatctggacggtaaagacaacagcgaacgctggcggcagtttgtcgctttcgttgaaagcaacaaaacctatcgcactgccaaacgaagccgcttgttgcgcaaggactttggtggcgacgaagccaaaggttttcgtgagcgcaatctcaacgacacgcgctacatctgcaagtttttcaagaacttcgtcgagcaatatatgcaactgcatgacgaaagctccgcccatcgctgcgtcgtactcagcggtcagatgacctcattcctgcgcgcacgctggggcctggtcaaggtgcgctcggactcggatcgacatcacgcgctggatgccgccgtagtcgccgcgtgcagccacagcatggtgaagcgcttgtccgactattcgcgccgcaaagaactaaagcaagtgcgagcaggctttgtggatgtggacacgggcgagatcatcaatcccgccatgttcgatcaactggagcaacacttccccaacccgtggccgcatttccgcgatgaagttatcgcacgcatgaacatagacaacccgctcctgttgcgtgaagaaatgcaacgcctgggcacttactctgaagaagctctggaagctttgcatccactgttcgtctcacgcgcgccgcagcgacgcaacagcggtgcggcacataaggacacaatctatgcgcaacctgagcggcttgttgctcagggcggagtcacacaaaaagtagctctctccagcctgactttgaaagacctcgacaagctggtcgatccgcaccgcaacgaaaagctgtatggcgcaattcgcacccgcctggagcaacacggcggcaaaggcgacaaggccttccccgccagcaatccgctacgcaagcccgacagcgaaggcaacccgaccgggccgattgtgcgcggcgtgacgatggtgatcgacaaactttccggcattccaattcgcggcggcatcgccaagaacgacacgatgctgcgtgtggacgttttcaccaaggcgaacaagttccaccttgtgccggtgtatgtgtatcacgctgtggcgaaatcgctgcctgatcgggcggttgtggcattcaaagatgaagatgaatggacgctgattgatgacagctacgatttctgtttctcaatgtatccgaatgaccttataaatacgaagttaaaaaacgaatcgtactggggatatttctcaggttgcgatcgttcaacaggcgcaataggcctatgggctcaagaccgcaacaagctggtaggtaaagatgggcttaatcgtgtcggggtaaaaatggcgttaagcatcgaaaaattcaacgtcgatgtcctcggcaatcgctaccctgccccgccagagaaacgtcgtttgtaccccgcacaactcagtggagcggagcatgacctggcgtagcgtcgtcatctcgcgccctgccaggctcaagcgcgagcattactcgcttgccatcgaacaggacaaaaccgcattcgtgccgttcgaggacatcgcggtgatcgtgctcaaccaccgcgaaatcacgctcacccatccggtgctgtcggcttgcggagaatacggcatcagcctgttcgccactggagacacgcatcaccccagcggcgtattcctgcccttcctgcaacactcgcgcgccaccaaatggatgcgtctgcaactggatttgccgcgcccggttgtaaaacaaacttgggctgccatcgtgcgccagaagatcgccaaccagtctgcctgtttgcgtctggtgggacgcgaaggcgctgatcggctggactcctatgcaaggcgcgtgcgctccggcgatgtcggcaatctggaaggccaggccgccgcattttatttcgtgcaactgttcggcaaaggctttcaccgcgagcagccacgcttcgccaatgccgcgctggattacggttatgcggtgttgcgcggcaccattgcacgcggactggtggcacatgggctgctgccgtcgctggggctgtttcacgccagtgaacagaacgctttcaacctcgccgatgacgtgattgaacccttccgccctgtggtcgatttgtttgtggccagaaagatgtcgctggctgacgatgaattggattcacaggacaaggccgcgttagtcgggctgctcaatgtggatgtggaaatgccgcgcggcaaaatgtccgtgttatccgcaatcgagcagacgatagaaagtctggcgcgcatctacgacgggggcagcgaaacactgcttgagctgcccgtgctgcttggattggagcagcaccgcctggagtgctgagatgagcgaggagacacgacggtttatgcgcctgcttgtattcttcgatcttcccgttgtcagcaaggctgagcgccgcgcctatacgctgttccgccgcttcctgattaacgacggctacgacatgatccagttttcgatctatggtcgcatcctgaatggcgaagatgcgctggaaaaacacatgaaacgattggtaaacagcctgccacctgagggctcggtacgatgtttgagcgttaccgaaaaacaatttgcgggcatgaaaatgctggttggcctgccgcttttccaggaaaaagcgatcaaagccaaccaaatgttgttgttctgagccgtttttttcaagcagaacgcccgtccagcccaagctggacgggcgtttgcgtgagagctattgtaatgcatccggggtg

SEQ ID NO: 2948 - DNA, 5530 bp, synthetic construct
  source 1..5530: mol_type = other DNA
  misc_feature 1..5530: note = Synthetic
gggcggggcgccgccccctcccccccccgcctgctcgacatcgaggcgcccaccgcccccgacccctgcctcatctacccgccccaggactcccccgccgacgccgtcgtgcccagggaaaagatccgccccatcctcgaagccctgcgcgccctgcgcttcatggacgagaccttctacctgcgcgccggctcgctcaacatcttcaacggcatggtcggcctcaccttctcctgcgacggctcgcactacatcccgtggaacgagtttctcggcaagggctacgacttctgggcacccgcggcgggggcggggcagagctgcccggtttgagccaggctacggccacgacttcgccgcaatcgcgcagcaggcgcacaaacggaaagacccgagacaagctcgggtcttgggttcggttcatccctttcgggataaccttattgcagcaacggctctcaccccggaaagctacaacaagaacgaatatacaaggaggatacggtggaaggcaacaacaaaaacctgacgttcggctttgacatcggcatcgcctcggtcggctgggccgttctcgcccccgaccgaatcgtcgcgctcggcgtgcgtgcatttgacaaggcagaaaccgccaaagaaggcgagtcactgaatctggctcgccgatccgcacgattgatgcggcgccggctgtaccggcgcgcatggcggcaaaccaaggtcgcccgcttgctgaaacgcgagggactgatcgccaatgtgcagcttctgcgcgatcagcaccatacgccggcctccccctggcaattgcgtgttgacggactcgaccgcctgctcagcgcagaagaatgggcgcgggtgatctaccacttgtgcaagcaccgcggtttccactggatcagccgcgccgaggaaaagaaggccggggaagacaccaagagcgagggcggcaaggtcaagcaagggcttgccgacacgaagcgacgcatgaacgacaagggtcaccgcacggcggctgaaatggtgctggccgaatttccggacgcccagcgcaacaagcagggcagctacgacaaggcgctctcccgcgttttgctggccgaagaacttgagaccttgttcagccgccagcgcgcattaggcaaccctcacgcaagcgaacccatgcaggcagaacttcttggcggcggagattgcagaagcgggctgttctggatgcagaaaccggcactctccggcgataacctgctcaaaatgctcggccgctgtaccttcgaaaaatccgaatatcgtgcccccaaagccagcttcaccgccgaacggcacgtatggcttacccgtctcaacaatctccgcattgtggtcgatggcgccacccgcgccctcaatgagcaggagcgccgggttgcgcttcccctgccatacaaccaggcaggcgatctgacgcataaacaattgcgagccgcgttgctcaaggcaggcgtgctcgacgaatcctttcgtttcgccagattcccctatgcacaaagtgccgacgggaaggctaaagacccggaaaccacggtactggtcaaacttcccgcctggcaggaactgcgcaaactgctgaaggacaaaggactggagaccgagtggcagagcatcgcaggcgcggcgcaagtcggcgatccagaactactggaccgcatcgcctgggtgctttctgtttacaaggacgacgccgaggttgagcgcgaactcgggaagctcagtctgccgggcggcaaggcaatgatcgatgcgttgagtgaaatccgcttcgacaagttcagcaatctttccctcaaggcattgcgcaacatcgtgccgcatatggaagccggcatgcgttacgacgaagcctgcgacgttgcaggttaccaccacagccagttgttcaagtccggcgagggtggggaacgttacttgccaccgttctactcggggcgcgacggcaacggacgcatggtgttcaacgacgatctggacattccccgcaacccggtcgtgctacgggcgctcaatcaggcccgcaaggtggcgaatgcgctcatccgtgagcacggctcgcccacgtctgtgcacatcgagatggcacgggaattgtccaagcccttcgatgaacgcagggatatcaagaaggagcaggacgaataccagaaacgcaaccaggaagacaaagcgcgttttgcggaacacttcggtcagatgccgaaaggacaggaattcgagaaatggcgtctgtatcgggaacagcagggcaagtgcgcctactcggttgccaccatcgatctggagcggttgcttgaacccggctatgtggaaatcgaccacgccctcccctactcccgcagcttcgacgacagcaagaacaacagggtactggtgctggccaaggaaaatcgcgacaagggcaacgccacgccttacgaatatcttgacggcgcgagtgacagcgagcgctggcgccacttcgtggcctatgttgaaggcaacaaagcctatcgccttgccaagcgcacgcgactgctgcgcaagaatttcggtgcggaagaagcgaaggacttccgtgagcgtaacctcaacgacacccgctacatctgcaaattcttcaagaactacgtcgagcgttatctgaaacttgccgatggcagcgaatcaaaacgctgcgtcgtattgtccgggcaactcaccgcctttctgcgtgcccgctggggactgataaaaatccgcagcgacagcgatcgccaccatgcgatggatgccgttgttgttgccgcatgcagccatggcctggtcaagcgactgtccgattactcacgacgcaaggagcttgaagcggtacgcgacggatttgccgatctggaaaccggcgagatcgtggaccttgcaatgcaccgacaattgaaagaacattttcctgatccttggccgggcttccgtcacgaactggaagcacgactgtttctggacgacccattgcatctgcgtactgccgtcgaggggctgggttcgtatccaccggacgcgctcgacaccctgaaaccgcttttcgtatcgcgggcgccgcaacgccgtaacagcggcgcggcacacaaggacaccatttacgctcaaccggcgcggttgaagacccaggggggcgtcacccagaaggtcccgctcgcgaacctgggcctgaaagacctcgacaccctcatcgatccacaccgaaacgaaaagctctaccgcgccattcgggaacgtctggaagctcacggtggcaaaggcgacaaggcctttcctgcaagcaacccgctccgaaagcccgatcgggaaggcaacccaaccggtcccatcgtgcggacggttaccaaggtcatcgacaagcagtccggcatcccgatccgtggcggccttgcgaagaacgacaccatgcttcgggtggacgttttcaccaagggcggaaaatttcatcttgtacccgtgtacgtccaccacagggtgaaaggcttgccgaaccgggcgattgtggcattcaaggatgaagcggactggacgctgatggatgaaagcttcgagttctgcttctcgttatatccgaacgattttgtgcgtgtggagttgaagcaggagactctcagtggctacttcgctggctgcgatcgctccacgggtaacgttggtctttggattcatgaccgcgacattcggatcggcaaagatgggtttattcgaacgggagtgaaaacagcttcctcactggaaaaatttcatgttgatgtgcttggcaacctttaccccgcgccaccggagtcacgccgtgacttggcgtagcgtgatgatctcccgaccagccacgctgcgccgggagaatttcgccttgctcatcgagcaggagcgggacgcccgcgtacccttcgaggacatcgccatgatagttctcaatcaccgcgagatcacactcacacactccgttctgtcggcctgcggggaatatggcatcagccttttttccaccggaccgacgcatcatccgaacggcgtgttcctgccgtacctcccacatacgcgcgccacgcgcacgctgcgccttcagcttgcgctgggtcgacccgctgccaagcgggcctggcaggccatcgtccaggccaagatccggaatcaggcccggtgtctgcaactcgcggaaaaaactggcgtagacaggctggagtccctggcgagacgggttcgctcgggcgaccccgacaatcttgaatcacaggccagcgtcgtgcatttccatggcctgttcggcaaggattttcgccgtgcgcaaccacgctggatcaatgccgctctcgattacggctatgcaatatttcgcgccgccatcgcacgcggtctcgtggcacacggcttccttccggcgcttgggttgttccacgccagcgaacagaatgcattcaatctggcggacgatctgatcgaaccctatcgtccgctggtcgacctccatgtgaacacgcattgcaccggacatgacatggacgacttgcatcccttggacaaagccgtactcgtcagcctgttgaacgtggacgtcggcatgccacgcggaacgatgtccgcgctgacttccatcgagcagtgcgtggaatccctgatgcgtctatatgaaggcggcagtgaacaactgctggaactgccaaatctcatcgggctggcgccgcaccagtatgagtgttgagacgaggcgtttcatgcggatgctggttttcttcgacctgcccgtagtcaccaaagccgaacgccgggcctacaccgtgttccgccgttttctgctgaacgatggctacgacatgatccagttttccgtttacggacgcatcctcaacggtaacgatgcggaagccaagcacatgaaacgcctggtggacaatctgccgcccgcgggctccgtgcgtgtccttaccgtcacggaaaagcagttcgccagcatgaagctactggttgggttgccgctatttcaggagaaaacggtcaatgcacagcaaatcttgttgttctgaacgcaaaaaaaccgccgcaacccgcgctccaagtcaagcgtgcagcgggattccggcggaggtattgtagctttccggggtgagagagggagctacaactacgaattagccaaggaggcagcgcggcgcattgtagctttccggggtgagagagggagctacaaccaggacgttggacagatcgcgcaacagcagattgtagctttccggggtgagagagggagctacaacatcggccacgcacaccggcagcgcgaccgcattgtagctttccggggtgagagagggagctacaacagtcgctgcgtaatctcggcatcacctcgaattgtagctttccgggttgagagagggagctacaactccgggcgcgagttattgggccccgtctacattgtagctttccggggtgagagagggagctacaacgcgcgggggaggcgctcggcatcgtgctttattgtagctttccggggtga

SEQ ID NO: 2949 - DNA, 5274 bp, synthetic construct
  source 1..5274: mol_type = other DNA
  misc_feature 1..5274: note = Synthetic
ctcggtggtattcatgctggtcatgctgttcatgctgaccatcgccagcttgctgggctagatcacgataataagtagattcaacatccgaaacctgacattcgcgatgaaccggtgtcgagacgtagtgattatagcgatataggcttgtgacagtcagctatagtacatgaagcagtcgttgagtcgggagtgagtaaatcaattgatctgagatgccccttcgcacccaacataactttggcatgcataaaatatggtgctttgcctaagtgctctgttcccgctcaaatctccgcaaaattaaaacatcgatttttacagccaactggttgctgcaattgcgcatgagcgctattctactatcacaataaaataactatccaaccaaaaagaaagcccagcaggtttccccactgggcttccggatacagatccaacctttcggttgattctttattgtagcaacggctctcaccccggatgagctacaacgacctcattatcacggagaacgcgcatgacaggcaagcagaataatctcggggcactcactttcggactggatatcggcattgcatcggtcggctgggcggtattgggtgagagtcgcatcattgatctgggtgtgcgctgcttcgacaaggctgaaactgccaaggaaggcgaatcgctgaatctggcgcgtcgttcagcgcgactgttgcgccgccgcctgcgtcgccgcgcatggcgacttacaaaactatccagattattcaaaagagaggggctgatttcgcacatatcagaactcaaagctccccagtcatttcctcaatcactctggcaactgcgcgtcgaggcgcttgaccgtcaactgagccgcgaagaattggcgcgcataatttatcacctctgcaaacatcgcggatttcactggataagccgcgcggaagaaaaggcagcggaaggcgatagcaagggagaaagcggcaaggtcaagcaaggtctggctggaacgaaaaagttgatgattgagaaaaaatatcgcaccgctgccgaaatggtgctggctgaattccccgaagcgcaacgcaacaaacagggcaattacagtaaagccctttcccgtgttctgcttggcgatgaactgaaaacgttgttccagcatcagcgcgaattcggcaacctgcacgccagtgctgactttgaaaccgccatcctcggcaacggcgaccgtaaaagcggcttgttctggcagcaaaaccctgctctcgctggtaacgatttgttaaaaatgctcgggcattgcacctttgaaaaatccgaataccgtgctcccaaggcgagttttaccgcagaacgccatgtctggctgacacgtctgaataacctgcgcatcgtagtggatggcacgatgcgtccactgaacgaaatggagcatcgtgttgcgttgccactgccttacctgcaagcaggggatttgacctataaacaattgggcagcgcactcgtcaaggaaggttttctacaaaaggatggcttcaagttcattggtctgctctacgccagcaaatcggccaatgaagagaaagccaaagacccggaaagcgcagtgctggtcaaaatacccgcatggcaggccctgtccaaagtattaaaaggtgcaaaccttgcgactgaatggcagaaaatctcaagtgatgcgctggagggcaagccgcaactgctagaccagatcgcccgggtgttgagtgtttacaaagacgatacagaagtggaaactgaactgcgaaagctctccttacccaatgcagagcgaatggtagatgcactgctcgatattcgtttcgacacattcagcaacctctcgctcaaggcgctctacaacatcctgccacacatggaagtcggcttgcgttacgacgaagcctgcctgcaagcgtgctaccaccacagccagttacacaaagtcggcgcaggcgaacataaatacttgccgccgttctactcaagtcgcgataaagatggccgcatggttttcgacgaagatatggacatcccgcgcaacccggttgtgttgcgggcgctgaaccaggcgcgcaaagtagtgaacgcgctgatcaaaaaatatggttcaccgcatgaagtgcatatcgaaatggcgcgcgacttgtctcgccctctcgatgaacgtcgcgacgttgaaaaattgcagaaagagtttcgcgaccgtaacgagaaggaaaaatccctgtttgccgaaactttcagcgttacaggcgcaatcaagggcaaggaatttgaaaaataccagctttatcgggaacagcaggggaaatgcgcctattctgtcactgcactggacataaatcgtctgtttgatctcggatatgtggaaatcgaccacgccctgccctattcgcgcagcttcgacgacagcaaaaacaaccgggtgctggtgctggcaaaggaaaatagggacaagggaaatcacacaccttacgaatatcttgatggcaaggacaacagcgaacgctggcggcagtttgtcgcgttcgttgaaggcaataagacctaccgtctggccaagcgcagccgcctgctgcgcaaggatttcggcgcagatgaagccaaaggattccgcgagcgcaatctcaacgacacgcgctatatctgcaaatttttcaagaactatgtcgagcaatatctgcaattgcataccgacagcgatgccaagcgttgcgtggtgttgagcgggcagatgacttcctttctgcgcgcccgctggggcttggtcaaagtgcgctcggactccgaccgccatcacgcactggatgccgccgtggtcgccgcgtgtagacacagcatggtcaaacggttgtccgactactcgcgccgcaaggaactggagcaggtgcgaagcggcttcgttgatatcgatggcgaaatactcaaccctgagatgttcgaccggatcgaaaaacactttcccaacccgtggcataacttccgcgatgagctgaaactgcgtctatatgttgatgatcctgttttgctgcgcgaagaaatgcagcgactggacacctatccgcttgcagccttgcaaaccttgcagcccctgttcgtctcacgcgcaccgcaacgtcgcaacggcggcgcggcgcacaaagatactatttatgcgcagccggaacgactggtcgcacagggcggcgtgacgcagaaagtgccgctctccagcctgacgatgaaagattgggacaagctggtcgatccgcatcgcaacgaaagactttacgctgccatacgcacccgtcttgaacaacacggcggcaaaggcgacaaggcattttcggccagcaacccattattcaagccagacgccgaagggaatccgaccggccctgtcgtgcgcagcgtgacgatggtcaccgacaaactatcgggtataccaatacgcggtggcatcgccaaaaacgacagcatgctgcgcgtggacgttttcagcaaagccggaaaattccaccttgtcccagtctatgtgcatcatgccgtggcgaagtcgttgcctgacaaagcaattgtgcaagcaaaggacgaagcggattggacacagatcgacgatagtttcgagttccttttctcgctgtatccgaatgatctggtacgagtaaaactgaaaaaagagtttcatctgggatattacgccggatgtgatcgctcgactggatgtatcaacctgtgggcgcatgaccgaaatcagcaagtgggcaaggatggattgattcgcggtatcggcgttaaaacagccattgccgtcgaaaaatacaatgtagacgtgctgggcaactgctaccctgccccgccggaaattcgccgcttataccctgctcaacacaacaaagcatgagctggcgtagtgtggtcatctcgcgcccggccagattgaggcgcgaacatttctcgcttgccatcgagcaggaaaaaaccgccttcgtgccgttcgaggacatcgcggtgatcgtgcttaatcaccgcgagatcacactcaaccactccgtgctgtccgcctgcggcgaatacggcatcagcctttttgcaacgggcgatacgcaccagcctagcggcgtattcctgccatttttacagcattcgcgcgcgaccaaatggcagcgattacagatggatttgccgcgtccggttgcgaaacagacgtgggctgccatcgtgcgcagaaaaatcagcaatcaggcgatttgcctgcaactgaccggatgcgatggcgcggacaggctggattcgtattcaagacgtgtgcgctcgggggatacaggcaaccttgaagggcaagctgcctccttctacttcacccagctattcggcaaacatttccatcgcggtcaggcgcgatttgccaatgcggcgctggactacggctatgcgatacttcggggcgccatcgcgcgcggactggtagcccatggcctgctgccctcaatcggcctgttccattccagcgagcagaatgcattcaatctcgccgatgatgtcatcgaacccttccgtccattggtcgatttgtttgtgtcgaaaatgatcccgcaacccgatgacgagctgcatccggaaaacaagattgcgctggtcagcctgctcaacatggatatgggcatgccgcgcggaaaaatgtcagttttgtcggcgatagagcaaaccatagaaagtctggcgagaatatacgagggtggcagcgagacgctcatcgaattgccggtactgatcggagtggagcaacaccgcctggagtgttgacgtgagtatagaaacgagacgatttatgcgattgctggtatttttcgatcttcctgtcgtcaccaaggccgaacgccgcgcctatacactttttcgccgttttttgatcaacgacggctacgatatgattcagtactcaatctacggtcgcatcctcaatggcgaggacgcgctggaaaaacacatgcaaagactggtgaacagcctgccgccggaaggttcggttcgatgcctttccgtcaccgaaaaacagtttgcgggcatgaaaatgctggtcggactaccgctttttcaggaaaaagcgatcaaggccaatcaaatgctgctgttctaaacgaaatttttaaagcagagcgcccgtccagcctaagctgggcgggcgtttgcgtaaaaccaattgtaagccatccggggtgagagagggagctacaactcaccgaccttgttgtacttctgtaggtggattgtaagccatcc

SEQ ID NO: 2950 - DNA, 5195 bp, synthetic construct
  source 1..5195: mol_type = other DNA
  misc_feature 1..5195: note = Synthetic
caaactccccggcccctgcgccgccgccgcacacgatatcagccagcaactcgccgccctcgtctctgtcgatttcatcgccaaacacccgccgcaacgcctggcccacctgccccgttaccttgccgccatcgaccgccgactggaaaaactccctcgcgacctagttcgtgacacccaacaccagcgcgacatggcccccctcctgcaagccgccgccaccttaaagggagaaagcgccgtcgaattccgctgggcgctagaagaactgcgcgtctccctcttcgctcaagaactcaaaacccctgaacccgtctccatcaaacgcctagaaaaacgcctggcagaaattcggcgctgaaagaagagaagccccgcagcgaactgcggggcttcccggatacagctaaattgctttattgtagcaacggctctcaccccggatagctacggtgcaaattatcaaggaggtttttatgattagcaagcccattgtttttggcctagatatcggcattgcctcagtcggctgggcggtgctagcagatgaccacattgttaatctgggtgtacgcgcctttgataaggcggaaacagctaaaaaaggtgaatcgctcaacctggcccggcgtatggcacgcctgatgcggcggcgtttgcggcggcgcgcttggcggcagatcaaactggcgcgactacttaggcgcgaaggcttgattgcagagacgagcgtggtgcaatctccttcaccaatttcgccttggcaactacgcgtcgaagggctggatcggcccctcgccgcagaagaatgggcacgcgtgatctaccacctgtgcaagcaccgcggctttcactgggtcagccgggccgaagcaaagaaagctggagaagacgccaagggcgagggcggaaaggtcaagaaaggcctagctgaaacccagcgtcgcatgagtgaaaagggctaccgtagcgctgccgagatggtgctggctgaataccccgacgcccagcggaacaaagccgacgactatggtaaggcccttgcccggacactgttggctgatgaaatggcgcttgtgttcgagcgccaaagagaattcggcaacccccatgccagcccagatctggaagagaagattctcggcaacggcgaccacaaaaacggactgttctggtcacaaaaaccgccgctggccggggccgacctgcttaaaatgctgggccgctgtacctttgaaaaggccgaataccgcgcccccaaggccagctttaccgccgagcgccatgtctggctcacccggctcaacaacctgcgcattgtcgctgatggtgaaacccgtggcctgaatgataccgaacggcagatcgccctgcccttgccctatgccaaggccggcgatttaacgcacaaacagttgcgcgctgcactgaccaaggcgggcctgtgggacgagcgtgtgcattttgcttatttttcctacgcacaaagcgccgacggcaaagccaaagatcccgaatctgccgtgctgatcaagctacctgcctggcaagagctgcgcaaaacgctgaaggacaaggggctggaaacggaatggcacagccttgcgggcaccgcccaggcaggcaatccagaactgcttgaccagattgcctgggtgctgaccgtctacaaggatgacgccgagatcgaacgcgaactaacccaactgaatctacccggtagccgggcaatgatcgacgccctcttggagatcagcttcgacaaattcagcaacctgtcgttaaaggccctgcgcaagattgtcccgcacatggaaacggggcttcgttacgacgaggcctgtgtcaaagccggttaccaccacagccagttgcatcaaaccggcacgggcacgcacaagtatctgccgccgctctactcacaccgcgacaaggatgggcgcatggtcttcgccgacgatgtcgaaatccctcgcaacccggtcgtgttgcgctcgctcaaccaggcgcgcaaggtggtgaacgccctgatccgcgaatacggctcaccgcattccgtccacatcgaaatggcgcgtgacctctctaaacctttcgaagaacggcgcaagatcgaaaaggaacagcatgaataccgcgaccgcaacgaagaggacaaagcccggttcgcagagcacttcggccaactccccaaaggccaagaatttgagaaatggcggttgtaccgcgagcagcaaggcaaatgtgcctactctgtcacacccatcgaccttgctcgcctgctcgaacccggctatgtggaaatcgaccacgccttgccgtattcgcgcagcttcgacgacagcaagaacaacaaggtgctggtgctcgccaaggaaaaccgagacaagggcaaccacaccccttttgaatatctgacctcgttcccgggcggcgaagacagcccacgctggcgccatttcgtcgcctttgttgaaggcaacaaggcctatcgcttagctaaacgcacgcgccttttgcgcaaaaactttggcgaaaaagagtcttccgaattcaaagaacgcaacctcaacgacacccgctatatctgcaaatttttcaaaaactatgtcgagcgctacctaaagctagcagaaggtagtgaatcgaagcggtgtgtcgtgctgtccggccagctaaccgcatttttgcgggcccgctggggtttgcttaaaatccgcgaggaaagtgaccggcaccacgcactggatgccgtcatcgtcgcggcctgtagccgcggcatggtcaagcgcctgtccgactatgcccgctgcaagaaactcgaatccgtacgcgatggttttgtggacctggaaaccggcgagatcgttaatccagcccgctaccaccagttgcagacccacttccccgacccttggacgggcttccgctacgaactggaaacccggctaaaactggacaacccggagaaactgcgcacagccgtcgctgacatgggcacctattccccagaagaactgaccaaactcaagccgctgtttgtctcccgcgccccgcaacggcgtaatggcggcgcggcgcacaaggacactatctacgcccaacccgacgccttgaaggcgcaaggcggcgtcacgcagaaagtgccgctcaccagcctgaagctcgccgacctcgaaaacctcatcgatacgcatcgcaacgaaaaactctacgccgccatccgcacccgcctggaggcacatggtggcaagggcgacaaggcctttcccgccagcaacccgctacgcaaaccggacagagacggcaaccccaccggccccattgtgcgcaccgtgacgatggtcatcgacaagctctctggcattcccatacgcggcggcatcgccaaaaacgacaccatgctgcgcgtggatgtatttaccaaaggcggcaagttccacctggtgccggtgtatgtgcatcaccgcgtgaaagggctgcccaaccgggccatcgtcgcctccaaggacgaagcagagtggacgctgatcgacgacagctttaacttttgcttttcgctgtatccaaatgatcttgtgcgggtcggactaaagaacgaaaccatcctggggtatttctccggctgcgaccggtcaacgggaaacatcgggttatgggcgcacgatcgcaatcagtcagtcggcaaggacggctttgttcgcacaggcgtcaaaaccgccctcacccttgagaagttccatgtcgatgtcctcggcaatatctatcccgcacccccggaaacaaggcgtgggctggcgtagcgtcatgatctcgcgcccagccaggctgcggcgcgcgcatttctcactggccatcgagcaggacgataccgccttcgtgccttttgaagacattgccgtcatcgtcctcaatcaccgcgaaatcacgctcacgcatccggtgctatcggcctgtgccgaatacggcatcagcctttttgccaccggcgaggaccatcagcccaacggcatttttttaccctttttgcaacactcgcgtagcacccgtctgtggcgtctgcagcaagccgcctctcggcctttggtgaaacagctatgggccgccttgatccgcaccaagatcgataaccagaccgtcgttcttcgccgatacaacaaagacggggctgaggcgctcgaatctctggcacgccgcgtccgttccggcgacccggaacggctcgaaagccaagcggcggcgcgttattttgcagccctgtttggcccttcgttcagccgcgagttttccggctttgccaacgctgccctgaactacggttatgccgtgttacgcggcgttatcgcccgcagcctggtagcgcacggtctgcatcccagcatcgggctgtttcacgacagcgagcaaaatgccttcaatctggctgacgacctcatcgaacccttccgcccgctggttgatctttgggtcgcccacacgataacgacagccagccgcgatgaactgatgccgcctgacaaggccgcgctggtcggcttgctgaacaccgatgtgcgtatgccgcgtggtgacatggctgcactcaccgccatcgaacaaagcgtcgaaagcttggtgcgcgccctggaaaccgacacggcagaggccctggagctgcctgtcctcctcgggctgcgggcgcacccagccgatggctaaagatgggtatcgagacccgccgccacatgcgtctgctggtcttcttcgatctgccggtagtcacccgcgccgagcgccgcgcctacaccgtctttcgtcgtttcctacttaaggacggctacgacatgatccagttttcggtctatggccgtattctcaacggccgcgatgccgcagccaaacaccagaaacgcctgctggaaaatctgccgcctgcgggctcggtgcgttgcatgacggtaaccgagaaacagttcgccggcatcacgctcctggtgggccaaccgcgttttcaagaaaattcggtacgggcctcgcaactcctattgttctgaccgcttttcgcaaaaaaagttttcccgccagaccaaggcctgacgggaaaacggggtgggttaattgtagccatccggggtgagagagggagcgacaaccacctgattgcgataggccgagatgcctgaattgtagccatccggggtgagagagggagctac

SEQ ID NO: 2951 - DNA, 5094 bp, synthetic construct
  source 1..5094: mol_type = other DNA
  misc_feature 1..5094: note = Synthetic
atcaaaccggagtaattcgcggctctccctggatcgaggcaataagccggagaagcgcgccctgcttgactctccggccgattttagagttcagcatcgaccgcgcacatgatcgtgcgcgtggcacacactacgcttgcttgcggcagggaacgacgaataagtgtgctctcccgcacccgccaaaataagaagcccggtggattgctccaccgggcggattcgtcaaatctttcgatttgacttattgtagcaacggctctcaccccggattgctgcaacggtttccagtatagggagaaaatcatggctgtcaaggtaaccggctcgctcactatcggtctggacatcggcatcgcgtctgtagggtgggcggtacttgcgccagaccggatcgtagccctcggggtgcgtgcctttgacaaggcggaaaccgccaaggaaggcgcctctcttaatttggttcgtcgcaccgcgcgattgacgcgtcgccgcattcaccgccgcgcctggcgtttgacgaagctggctcgcttgctgaagcggcaaggggtcattgacgacacaaggatgttccagccgcagcgcccttttccccactcgctctggcgattgcgggtagaaggactggatcggcaactaaacgccgaagaatgggctagggtgatctaccacttgtgcaagcatcgcggttttcattggataagccgcgccgaggagaaaaaggcggaagccgataccaagggcgaaggcggcaaggtcaagcagggcttggcggcaaccaagaaactcatgcaggaaaagggctaccgcagcgccagcgaaatggtgctgatggaattccccgaagcgcagcgcaacaagcaaggcgactacggcaaggcgctttcccgtatctcgctgggcgaggaactggccgacctgttccggcgtcagcgcgaattagggaacgcccatgctggcgcggaacttgaggcggcaatcctcggcagcggcgaccgcaagaccggcctgttctgggcgcaaaaaccggcgctcgcaggtgaggccctgttgaagatgctcggcaagtgcacattcgaaagagacgaataccgcgcacccaaagccagcttcacggcagaacgccatgtgtggttgacgcgactaaacaatctgcgtatcaacgtagacggtgtaatacgcccgctgcaggaagcagaacgtcaggtcgttcttcctctcccctatcttcaagctggcaatttcacatacaagcaacttcacgacgctttagtgaagaagggattgttgccgcaatcattcgacttcgttggccttcgaagcactaaagacaaggatccattgaaagaaacactcgtgaaactcccggcctggcaggaactacgcaaggcaatagaaggggctggtttgaagagcgaatggcaaaagatttccggcgacgccctggagagcaaacccgacctgctggacaaaatcgcttggatactttcggtttacaaggaggatgaggaaaccgaacgagaattgcgccggttagatctaccaaatgccgaagaaacggtcgcggctctcctgagcttttcgcgctcatccttcagcggattccatgccctatccctgactgcattacgcaagatcgtaccgcgcatggaatccggcctgcgctacgacgaagcagtggccgacatttccgagtacggacaccacagtcaattgctgaagagcgccgatgagaaaaatgactatttgcccccgctgtacgaacaccatcgagacaaggagagtcgcaatcgcaacaagatgctattcaacaaacgtgtagagcaggaaattcagggcggcatcccgaggaatccagttgtgttgcgggcgataaaccaaggtcgtaaggtacttaatgccattattcgcgaatacggatctccctatgccgtgcacatcgaattagcaagggatttgtcccgtccgcttgtgggtcataaggacaagcatggcaactacatcaagggtaggcgcgatatcgagaacgagcaggtcgaaaacagagccagaaacgaaacagactggcaggaatacgtcgcttatgctccgagttttagtgctgtcggctcgcccaatggtcgtgattttgaaaagtggcaactttatcggcagcaagatgggaaatgtccctattgtctagggcgaattgacagcgatcggctcctagagcccaaatacgtcgaagtagatcatgcgctgccccgttcgaggagtttcgacaacggcaggaacaacaaggtgctggtccatactcacgagaaccaaaacaaaggtaatcggaccccgcatgagtacttccaagaactggacggtagtgtagacggcccgctttggcgtcacttcgaagcctttgtaaagactaaccccaagtacccaacgccaaagaaagaacggctattgcgcaaaaatttcggcgaaaaggaagcgcgggatttcagcgaacgcaacctctatgacacgaggtatatcggcaaattcttcaagagctatgtcgaacgctacttgaaactcgccgatgacagcgactctaaacgatgtgtagtactttctggacagctcacggcgttcctgcggcggcgttggggactgcccaagttacgcagcgaaagtgatcgccatcacgcactcgatgccgccgttgtcgccgcatgcagtcacgggatggtcaagcgcctgtcagattactcccgccgcaaggaactcgctcaggtgcgggaaggttttgtggatgtggaaacgggcgagatcgtgaattccgcgatgttccagcaagtgcgtcagcacttccccgatccctggccgaactttcgccatgagctggaagctcggttgaaaatcgatgacccggcgatgttgcgtgcggaaataggtcggttaggcaactaccccccgggcgcgttgaacgcactccagcccctgtttgtatcacgcgcaccaaagcgacgcgatggcggcgagctccatcaagacacaatccgctccgcaaaattgcttgaccaaggtctgagctatgtcagtgtgccgctgcaaaaactgaggctgacggacctggataaaattgtcggcgcgggtgacccgcgaaatgcctcgcttatcgacgcgttacgcaagagactacatgcgcatgatggcgatgggaagaaggcattttcaacaccggtattcaaaccctccgcccctggtagccaggctccactcgtgcggacggttaagctgtcttcaactcagaaaggcggggtacgagtgcgtggcggggtagccgatcagggcgaaatgctccacgtaaatgtttaccgacacaaggaacgatttctgatcgaacctgcctacgggatcgacgccgagaagcacctaagtctgcccgaaattcccgcagaggcggaattcctctttgccctgtctaagaacgactacgtcaaagtcgtcttgggcgatgccacgcacgagggctacttcgtcatgtacgaaagcgatggccgaataacgttgagagcccatgatcagccgaaacccgacaaagattattttcgcaaaggtgttgtcaacgcatcacggattgagaaatttgacgtcgatgtcctcggcaaccgctatcctgcgcgcccggagaaacgtcgtggtctggcgtagcgtaatgatctcgcgcccggctaagctccggcgtgagcactattcgctggccatcgaacaggaagaaacggcgttcgtgcctttcgaagacattgcggtaatcatgttgaatcaccgcgaaatcacgctcacacatccggtactctccgcctgcggcgaatacggcatcagcctgtttgccactggcgacacacaccatccaagcggcgtcttcctgccttttctagcccactcgcgcgccactcgctggctgcgccttcagttggacattccgcgcccgcttgcaaaacaggtatgggctgccgtcgtgaggcgaaaaatcgccaatcaggcggcatgcctgaagctcgccggcgtcgacggcgacgaccggcttgaatcgtacgtgcgccgcgtacgctcaggcgacagcggcaaactggagggtcaggcggcggcgttttacttcgccaagcttttcggcaaggagtttcggcgcggcgatgaatgttgggttaatgcggggctggactacggttacgccgtcctgcgcggcacaatcgcgcgcgggcttgttgcacatggcctgctgccttcgatcggattgtttcacgccagcgagcagaatgccttcaatctcgctgatgatctgattgaacctttccgtccgctgatcgacctgtacgtcacgaagcatcgattcgcggacgacgcggagttgcagccgacggataaagccgcgctggtcggcttgctcaatgtggatatggccatgccacgcggcgtaatgtccgctctggatgcgatcgaacacgcagtagaaagcctagcgcgaatctacgagggtggtagcgaaagcttgctggaactgcctactcttatcggcctgcgccagcaccaccgcgagtcgtaatgcatgagcatagggacgcaacgccacatgcgcctgctcgtatttttcgacctgcctgtgactactcgcgccgatcgccgcgcttataccgtgttccgccgttttctcatcaacgacggctacgatatgatccaattttcagtgtacggccgcatcctcaacggcagcgatgccgagcaaaagcacatgaagcgcttaatcgataacctgccgccggatggatcggtgcgatgtctgaccgtaaccgaaaagcagtacgcaagcaccaagcttctagtcggcctgcctctttttcaggaaaaagcggtcaaggccaatcaaatgctgctcttctaatccccattttatcaggcgcaaaaccccgccagccaaggctgggcggggttttccacgaggtctattgtagcaatccggggtgagagtgggagctacaacgcgtggtgccgcccgtgtctttgacggataattgtagcaatccggggtgagagtgggagctacaacttgttgatcgccgtcacggtctgcgc
